United States Patent Application Publication US 2011/0183924 A1 - sequence listing, part 247

SEQ ID NO: 692837 - DNA, 403 bp, Homo sapiens
ctggtatgagcacgtgctgtcatggtagtgcgagatttgtgtcagacattgctgtaggtctgcttgaggatctgcccagtacggcgggtgcggtctaccagcctccccatcagcgttaggatgccttccgctaggtcctttatgaggttgatagtcatcgctgtccgaggggtcatacaccaggttggttggcgaacatactcctgaggaaccgcacgggctccagccacgactcgatgagcagcagggagatgcggagcagctctagattggatttctgttgcgtttcctccatgttggagggtgtcggaatagagtctgagaagcagaaggaggtctgggagtcatgcaggaatgaatacttctggtccttagggatataggtttcttcaaactcctcctt

SEQ ID NO: 692838 - DNA, 221 bp, Homo sapiens
cctagaggaccctacaagcagctatcagtacttaggatattcaagtgttcgaactggtaagaatattcttccagctgaatacaatgcagaatggaccatttaggggtaaataacctcacttaatcactctttcctgctaacaaaaataatacaaatatttgtttatattaggctataaattaagacattgaatattagatttggaatagctgctgtagttg

SEQ ID NO: 692839 - DNA, 329 bp, Homo sapiens
actcttgagggtacactctctgcctgccagattcaggctaacaggtagctgggattacaggcacatgccaccacacccggccaatttctgtatttttagtagagacggggcttcaccatgttagtcaggctggtctcgaactcctgacctcgtgatccacccgcctcggcctccccaagtgctgggattacaggcgtgagccaccgcacccgcccaaaatttttaatatttatgtatagaatgtaagcttttcagcatgattttgaatcaaacaaaatgagttagattgaaagctctgctttctgagagcttagatttgtaactcagaa

SEQ ID NO: 692840 - DNA, 591 bp, Homo sapiens
tgaaattaccaacagaactggcagcgtcctgtcttgccttgggcacagggtctgctgctcgcctgcctgccagccctgagagaaactccctgcacatctcctcagtaagagggtgaacctccctttctggtacttcagcgggtgttggacattttggggggacagagcaggggaacatctggctctgttcacagtctctgcaaacgtggtatgttctgcccctgaacagtggctagatgcttggtagacactgagctaatcatgtggtctcaggtcttaggtctgcccacctcagtcagggtttaagctccagccctaggggatgtgggagcagctgttgtgagggaagtcggccatatgccctgcttgcttgggagctcactgagctcaagggccagcttcctccagaatggatcatctgcattctgcagagtggtgtcccagttagggtatgtatgattgttggtcttctgggcaaagctcagagaggccaagggaggcacggggtggcatcaagcgacactgatggttgggccttcagccacttgcccatcagcaaagatgtgcaagtaagtttcaggcaagagctgc

SEQ ID NO: 692841 - DNA, 304 bp, Homo sapiens
ccccgggggggaaaacccaaggcccggggtttggtttaaaaaaaaaatttttcccccccaatttccaacccccggttggggaggggggggaaccccaacgggggggtttttttttttccccaaacggggggggggccccccaaagggttttttttgggggaaaaaggggtttccccttaaacaaaaaaaaaggggccaaaaaaaaggggggcccccaaaaaccaagaaaacccaaaaaaccccccgggggggggttttttttttcccggggggggggggtaaaaaagggggttttttttgggga

SEQ ID NO: 692842 - DNA, 895 bp, Homo sapiens
tggtgtaaggggcccaaacggctgcaaaccagaggggtgatagcgcctaagcatagggttagagttgggattagggggctatttcctggtctagggggtggaagcggttgattaaaaaatatccctgctacaacaatagggcttgaggggagtagggctgaaacggggggggggccttctagggctgagggagagtcaggggtgggaagacctaatggggctgataaggcctagctgcggctagagaggaggcctagatagcggggagtagaggctgggaataaagcgttaaaaagggagctactcagggaggaggaggagtcctacaatagacgttgggaagtggtacaggataaacctcatggcaaaggggcaaagcgatagaaaccagaatatacggccgaataccggtgagtaatagagatagggctcagaaacggagctagaacgagaatgtcggagcatctggctcgaagcgtatcactcacctggaatgacgccagagagggaatcataaatccccacagcgcccttcatcccacccgagtggaaccacgccgggaaacaaggctgcgctacagccgagcaacacaaaggaatacgaatgtgggccaactacgagggcaacaacaagcgcagaacaccaactactctgcggcaacgcaaccactggctacacagtggtagggggggcccggaagcttaccataacatcccacgagccgcagaaaatccctatgtaggcggaccccgaggcaaccggaccataggccaccagggcgactcaaactattcggcgagacgacaccccaacgcagaccccaaggaacaaccaggcgagagaaaggagtgaggagaccacacaccggcgagaaaaacactcgtgacatagacc

SEQ ID NO: 692843 - DNA, 951 bp, Homo sapiens
tgtgattggatatcgatactagctggagcaatgagctgcgttggcaactacctctggcaggcctctgaagtgcaccaccacgtgtcactcgttctcgtcttgccagctgatattcaggtagagaagttcatctgccatgacgaggaagatgaatgacctgctctggcacgaaggcctagaagtcggtcagttcaccacaactgcctccgtgagctccaagagcttccagcgtgctgatgcatgaaacgagtggaccgctcgtgaatactgaccgtttcatcagagctccgggaagtcaagtgcgttcctgcctaccgatgggaacgaatgaactgattactgttctagaacctgcgggagtcatcctgggtgtcaggtatgggtgagacaagctaatcgataccatcgtcgggggaacggatcctactgtaagcgccaaatgtcgcccaagccatggaacaggtgcacattccaggcctatggaagcctggcgtcaagaccgcaggaactagatggtgcgtccatgtccacattctggtttgcctacggagcgggactggctttcgtgcatctagtccgtgaggctggcatctgaagatgacgcccgtgggcccaagggggtcaccttcatgaatacaggatgagcgtgatcacggctgacgtgatgattgcaccaatcggcatacagtcagtggaaaggtacttgccttcgtgttgttgccccctcatgccgtcaagcggcctcttacagttcccctagattgtgagaaaccttgcaggcaggtgcccaaccatcgggatcttcccacctgagcacggtgactcgtctgaggctaccgggtagtgtttggaaaaaccaaagcgcgaactggcccgtcaaccgttgaaagggggccctttctcggtggaagggccgaccccactccaggttccccgtccatcaattggcac

SEQ ID NO: 692844 - DNA, 1149 bp, Homo sapiens
gcgaaaggcggcgaatgagggagccaagaagacaagtggattgatccatgtttactagagaaagattggtatgatgtgagagcacctggtatgttcaatattcaggaacatattggacagacgcgcgtcaccaggtctccaaggtagacgcgaagaattgcatctgatgagtctcaagggtcgtgtgtaagagagtgagtcttgctgagtatagaggaattgattgaaagtttggcccttgaggatcatatgttcataagctggattacctgaacgacgtgttcacgggggtaaataactagtctgatactactcttccattgggcatggagatcattacccgatgaccatacaagtggtgtttaccactgtggtcatagacacaccatgggcacgaacaaatgacttgaatgcctcaacgcttgacttgtacaaggaactaacccgacatgggtctagactctggcagttcgattctggtaacttggatgctacggatctgcgaccgtaagagaagcactgcaagcaaagtcacaggattaatcggtgaaagaacacctcgtgtaattgcatcaagggcgagccaaaaactaggcgttcctgctcgagaaatttcccgggacaggagaaggaatggagttggaaaaaatccaatgggaacgccgaagaaggtgtaggcaggaacaaaagtgacctttgggtatagaagaaacgtgaggtcaaattaaccttggaattatcccaggaagcagggcattagggagaaagaaggagcattaagtaaagacgggttttggcccaaatactaattaatatgcgcttccttcccatgcaatggttcctatcggttcagaacaaggcgggacaaaactttgcctggcaagtaaaggaccccccacgggtaagaacattggggggaagacaggctccatggggcagcctccacattggcgttggaacgggccaaggaaagatacagagggacaaaacagcccaacgagggcgagacacgcacaaaccagggctgattaggagttggacacgagagctgcatgggatcacttgacacgcaacacagtccaacgacacacccgggcgaacaaggtgcgacgacgttaccaacgacgctcgctcacgacacaccagggg

SEQ ID NO: 692845 - DNA, 441 bp, Homo sapiens
  misc_feature (16)..(16): n is a, c, g, or t
gggagaaggtggggtntgcgccaacgaactgccttccttaatattaaagacatggggtagctgccggaacgactagcctgcacagttaaagttggactcgggactgagacgattgcttctcgtactttccggtttgtttgccacagcgatggagttgtgggttgaactgcgtcacaaccttttgtcagccatttttttttcaagttttttaccattaccaattacacttgctttgccttattttgatcagcatagttgtagattaactttgttttgcctcagcttcccgaagcgcttgctttatacgtgtgtgtcgtcactgaagattgaccttgtatgaatactgaggtttcttggtaatgctttgtacaatccaaaatgttaaattggctatctgttgaaagtgtatgcttctaataaaaagcgtttagttttcattca

SEQ ID NO: 692846 - DNA, 151 bp, Homo sapiens
tgaccagatgatgcgcagcgtagatgaatatgcagatctgtactgggtgggggccacgcaaaaggaggtgagaagcacagtaactggcactgacgtggaagctgatgcagcagtggctaaaggagactgtacagtgcgttctctgcatcat

SEQ ID NO: 692847 - DNA, 536 bp, Homo sapiens
  misc_feature (530)..(530): n is a, c, g, or t
tcttaggctatgttattgttacttctcctttttaaaaaaaaaaaagggcagccgggcgcagtggctcacgcctgtagtcccagcactttgggaggccgaggcgggcggatcacaaggtcaagagatcgagaccatcctggccaacatggtggaatcccgtctctactaaaaatataaaaattagctgggcgtagtggtgcgtgcctgtagtcccagttgctcgggaggctgaggcagaagaatcgcttgaacccaggaggcggaggttgcagtgagtcgagatcacaccactgcactccagcctggtgacggagcgagactctgtctgaaaaaaaaaaaaaaaacgggcaaagcaaattttcttgaggtttctttggtggtggtgcaacgcagagggggtgggcaccaacccaagctggctcaaaaatggccgttgggagtaaacgtgagggctctgggtggccttgcctggccagatggcccttggtgccctggcggaacctctgccctttattattgggcatcagccncagtca

SEQ ID NO: 692848 - DNA, 184 bp, Homo sapiens
aagcggcccaaattaatctgagtggcgatggctttgcgcgagatatgcggcctatacgtgtcttagggttgacgggtctcgcgcagcaccgccacatcgagaactgcatcactccaccaccccattgctccgccaagaggcctaggatctaagcggtgaatgcccgcaacaggggtaggcggtg

SEQ ID NO: 692849 - DNA, 594 bp, Homo sapiens
ctccgggtcgccgccgttggacgtgctgcccatgactgcgcacgcggcgacgacgcggtcaggcgctgctcacgagcacgggtgtgggagccagggcgggagcagagtgggagcgggcgtcgcatccttccacggccatggataggtggagaatctgctgcgtaagtaccatgatcgccaatacatcggagacaaaggtctgacgtcgcctgtgccggtgtacatactctaagcgcctgttgtgcacaggatcaccttggtacgtgtacgatcgagtgctgctgtgtagtagcgatcatgtcgtaagggcgctctagtcagcacgtcgataccgccatactgatgatctggtatcatagtgtgtcactcctgaatagcgtaggtagttatcagtaagtctcgggcaattgacggatcagggtacacaacgcgtcatgtttgggtgaccagcagcgagcgtaagagcgaggttcagagtgattcgcgttctctatgttgctagtaggtggggagagtggggagagggggtgctatccagttcgcctgatgagggctctcgaaccagccgttttgggttgtaaaaaaacggtcgaa

SEQ ID NO: 692850 - DNA, 796 bp, Homo sapiens
  misc_feature (195)..(195): n is a, c, g, or t
aggcgggggcaaggagggggtcccaccccccgcgaagggaaggttcccgcccgctgcccgcagagaggggtccatacccacacgcgttcatcgacatctattggggaaagcagcgacgcgggcgcgcgcccgcggctgacttccaagagactccgctgcgagatacacggattacgagggggagattacttcctncgtctgatggcacaccctcattgcaacacgcaggcgagcgcgtggccacacggcacagggaggagcgccacacactgtggagccgggcgcggatgccattttaggtaaatggggtaagtataacctacgtggcggagtcgctcgcccaggatcgcaagagaagtgttagagaagatagttctcccaccccgtgcccatctatagagactaggcgcgttacgatcatatagcggcgggcttccaccgagaagcaatgtgtctctgtatttctgtctccgcccgcgcgagtatgtatatatgtgggcgcccgctctattctatctatgcgcgctcccgacacgctcaatctccgcaggtataggtgtggacactcttagtgacgcccgcatcgcttcatatttcaagggcagcacacttgtatgcagtgcgagatatgtgagagttcgtccttctggttctattacgtgcgctagcgacgattctcctgagaatagattatgcagtattggtgtcgcgcccaggagtgcaccaacatccatgttgtatgctggagccctccaatcggggcgttcaaaacattaaagggcccagacaataaaca

SEQ ID NO: 692851 - DNA, 732 bp, Homo sapiens
atttgtgccataggagctgtgcatgcatgatgaagtggcacagcctactgaacctatcagcgtaaacccaagacctctgatggcagatcacccacatcagccacacctctccccatatgccagtctctgagaataaacagtggggcaggcctcccttcaagagctctctgtcccacgcagcgttagctaggtccttcaggccagagattagcacaagtagggttacttaaagtgaccagtgatgctgtcaccgaaggcgaatccaagaagctcggtcaatgacaggagcaactccgacgggatcaacgaggtgcttgatgggaaggtggcttgttgtgaatagtctgggtctcaataactgccgaacagaaaaggaaaagaacaacactggagagtctgatctcagcaagctggcagttaaaacagatatgaagaaggaaagattagccatgcaatgatggattctcaatcgtgagtgcgagattctgatcggaagtgctgggagtctcagacgtcacagaatttatagggacatcccgagggcagtgtgtagcgagtgaaccccagataagagcgtccaatgaatgccttcatggtgtgggcgtaaagatgaacggagcaaagatccttcaagccttctcctgacatgcacaactccaagcatcagcaagatataggcgatctcgcgtggaaagcctatgaccaacctagagaaacaggcatattatgagg

SEQ ID NO: 692852 - DNA, 359 bp, Homo sapiens
gtcacgcccagagactccatgatggagggaggcagctgtgatccccaagctcacaggtagatgatgctatacctactcctagacactggaagagccctgtgcttgggaccggacactatggctttgggcctgtggtgggagaaatcggtgccaaaggagttgtcttaagaggacaaggcatgcagggtctgagatcagaggttgtgacgtggccaccccttagcgagtccgtttgggacacatcacactgcacagctttttaaaaaaataattagctgccaatcttttaaaatggtaagatttcatatacaaatctggatttttggcttctctaggagtaaacattgaaactttttttt

SEQ ID NO: 692853 - DNA, 179 bp, Homo sapiens
cgtgtagattatgccaaaactctatgacttctgttccaggatttccaacaagcggggaaaggcatgacttgggcgggtgggaacgacattaggagttgtttctattttttaccttggcagctttagctaccaatccagtaccctcctacctagaatgtatacacatcagcaggacactg

SEQ ID NO: 692854 - DNA, 1145 bp, Homo sapiens
ggtgtgccacttgaagatcctggtgtcgccatgggccagcgccccgcccgatagttaccggtattgtgaagaacaggagcccgtacccataatgtctcgcttctgccgaggatgtccactgtattgccaaacgattcctgcattattatgaccgtggtgagcgcgcacataataggctaacagtgggatggagtttccgcttagtggccaacatggtgtcagatgaatatgagcagctgtcctctgaagccctgtgagcgctgcccgaatttgtagccacataagtacatggttaaacagttgtggcaagagatggcttccagtatccgggtgcggctccaccccttccacgtcatccgcatcaacaagatgttgtcctgtgctggggctgacaggctccaaagaaggcatgcgaggtgcctttggaaagccccaggcactgtggcagggttcacattggcaagttatcattgtccatccgcaccaagctgcagaacaaggaagcctgtgatctggaggcctgcgcagggcccaagttcaagtttcctgagcgccagaagatccacattctcaaagaacgtggggctttcaccagagttcccatgcttgctgaatttcgaccgaccttggtgggtgaaaaggcggtcatcccagatggctgtgcgggtccagtacatcccccagtcgttgacctcttgggacagttggggggccctgcttccttgagggcttccccatggttgttgggccccctcttaaataactccagcagtaactttcttacgttgcttgtcccaacaggattgtccatacggaaaggggaacctcgcgggagcacatcaaattcgcggcggggcgtaacacggctgttttacctgggccgtgtgccgtcattatgagtttccccagcaacaccgaaggtttctggccacacaccaggtggacaacatgttgtgggaagcccccaatagtaaagcggctaccaattaaatgggtaaccaccacgagataaccccttaatatgaaaggagaaaacaaataatgagcgccacgagtgtcttaaggtgcctaccatttataacgaggtacaatagtgagtctgcgccaaatacgggggccacataactccacagcaaagaccacga

SEQ ID NO: 692855 - DNA, 280 bp, Homo sapiens
  misc_feature (136)..(136): n is a, c, g, or t
  misc_feature (144)..(144): n is a, c, g, or t
  misc_feature (170)..(170): n is a, c, g, or t
ggtagtctgtctatcattaggttgttgattcttagcaggtttggtgacaggacacacactcagcattgtagaactactcagtgaagatctgcaatctggacgctctcctcatcttccttactttcttaagtctgtngaaatgtnctatgctggcagttccccacctgtgncccagaatccctggagttcttgaagatgaagcagcagggtctcttggaattcatgtgggcataagaacgctttcaatcaatcagcgggaaaaggcacgtctgccttaagc

SEQ ID NO: 692856 - DNA, 958 bp, Homo sapiens
ccaacatgccatccagactgaggaagaccctggaaacttatggtggccactgtgatgccactggccactggccgcatagggcaatgcaccctggaatgcacccctgtgctgtgccgcgggtaaatgcttggttggtcttgcattcaaccaccgtggaatcaaagcttcggaccagaatacccactctcatgtgctaccttctgcggcacacacgcttggagtattgaacgcatttaaccaacttttaacccgacgcgaacccatgaagccttctggccacaacgttgtcaacccttttgaaccacaacttctgtgggcacttttcgggtccagtggacacaggacaactgagacttgcaattgccttgctaaacaacaccacacgacctgggtgcgcttggctcctcaattcacttgattggttgggtcgcctgaactcccgtgcgcttaacattaaccaaaaacggtttccttgggcgcaccaccgcgcagcacaaacggctttctccccacataatgccaagccctttgctccattcctgttggaatgggtgcccaacaattctcctttccagcccacgcaaaacaaaagccttgaacgggacacgcacacgactttcacacccgcacggcttgcctctagggcgcagcggggcccccctggctgattccccttggggtgtggggtccttgtggcgatcgcccaaccatacttgagcaccgcgtgcatgattatcccacttttcaaacaccctgtcccattaaaccttaaacctttctttttcccccccaccatatcccacatcccactcaaacctacaacacctcaccacttacccacactccaacacctcgttctttcctatacacctacatcactcttcacccacccctccactcacaacccactcctctctcctaccaaccccactattctatacaataaatagcaaccacg

SEQ ID NO: 692857 - DNA, 403 bp, Homo sapiens
gaaagtgtgagttacatctgcttaatttaggctgtaaattcactctaagttcattcatgtatatacatagtgggcagtactgcttctgttatttatatgccattcttttggtcaatagcactcgattagaagacatctcaatggctgtgcataaggtatataccattatcgcactcgtaatggactaagaatttatagataaagtccagtaacatgaaaggattaatatgtttttacattgtgattaggcgtagtacttagtgcacccatatcagattagctgtaaggatgaatgcagttaatgtcactaatgaggagagaggtacttgcatgtcaacgtagaccgttacaaacgaaagtcagagatgcagatggaggtacctctattgtcaagtctaaggct

SEQ ID NO: 692858 - DNA, 177 bp, Homo sapiens
agcaaccaacactcactggaatcccgcaatcaagagctaaaaggacttcttccatctctcagggacacacatccaccgataagaataaaagaaatgcctgaatgactctcactggcacttttaaacacagcaagcccaacatattttctccttttcataaagaagcctatacaccat

SEQ ID NO: 692859 - DNA, 332 bp, Homo sapiens
  misc_feature (242)..(242): n is a, c, g, or t
  misc_feature (247)..(247): n is a, c, g, or t
  misc_feature (269)..(269): n is a, c, g, or t
agggaaagaggatggaattgagatgcaaggtagaaaagcatgactatgttcagtttgggacttgatgaaatagatactggtaggacagttcactaggcactgggccttcaggagaaagagaagaaaggaatggtggcattgggagtagtaaagctgtgggtatgaatgagtatctatgagactcacctccctgtgaggacatagaatgaggagacacagtctacaggtagactaggtcgagntcagnagcctgaagaacaccagtgttnaagggatggtgttgggaaagggagccaggccagccagagaggaatgttccggaactctgaaag

SEQ ID NO: 692860 - DNA, 400 bp, Homo sapiens
gttattttgtagggcccttagatgacgagacatgaggaaacctcaaatctgactccctaagggatttgtggggttagggcgtttaaaggttttgaagtgggccaaagtgtagatatcattcattggttagagtgcagggtgaagtcatgggacaggttgaagaagaagctgtgttcttatgctgattctgttcctctctgggggtaattacactggttagcatgaactgttatggtggaatgggacatcacagggaaagaaccctgtgtaggtcctgtttatacaaggtgtcaggtcgctgttactgaagggtaccgctctgctcccctccctctgctattcttccccgcgcccctgatagcccctccttcctctctcgctcgccgctcccacacatctc

SEQ ID NO: 692861 - DNA, 1097 bp, Homo sapiens
ttctcacaagtgtagagttgaagtggcgcgtccaatatatctgtgcttgggcccaagtctcttttgtgcaaattcatatgcatgtgcgttcttaatcgtcggggttcactacgttttggtggtgctgcttacagttgtctaagtggtccctatgtggcaatggtcgggcttctttgatgttgctgtccgcggcgtttgctactggttgcttggctacggtggtgataacactatggtgcgtacagcctgctgttggtgtgcccccttttagggttctcctgggagggtgcgtatagtgtgcttggggttgttcccgcatgtggcgtctccttgtatctcgccgctactcaatgctttgcacactcatgcttgttcggccttgctcttctcggtttatgtggcttaagtgtgtcgcaagactgtgtcttggatctttggtttgtttggttgcctcccattggtgtcctcaagtccacttgtggttgttctcgtgtgtgctatggattgtgacgctggtgcctctcgcacgtttgcactgtgtatgacggtgactatggaccgagggctttctccatgtatgggactcgtttatatgcttgatacctcgctagtgcttgttcggaacagtattggctacgacacatgtttccaccacataggtgcccacgtggatgacgtgctcatgatctcctcatgatgcatctgatggacatgaggtggtctgtgactgtcatgggtccacgcgttcaaacgctgcgacacagtccactctcgccatctcggtccttttcctgttggggctcgttcaggccagcgctgctgggcgtcactgtcgtgcacttggctgcgctgccctggttctattggccctatggtcgcctgctctgttgggctgggactgggatgaggggtagacgggagcacagggagcacactgggttctccgctgagaacatctgggcacaagagtactggcctcttctatccctggcactgtgcctttgcacttgtccaggtggccccaatgtgagtcgctgtaaaaaatgctgccgttactattttctaagaaatgacttttatacgacccggcagtaaca

SEQ ID NO: 692862 - DNA, 970 bp, Homo sapiens
aattcaggatgatgtttaaattgatccaggtgttgtttctaacttctgtaatacatacaatgcaaaaaaaaaaaaaaaattggcccaagtttgcacgtggcccacccattagtggcgctagttcgcaggatcacgtctcaagtcggaagttctaaaccgtcgggtccctggggacgggttatcttcactttggggcatcatacacttattttcacgggtttaaggaagtctaaacgagggatacatcacctctttttggccgttccctgatatgtaaaagtgctattctccactgtttcctcgattaatgtcccagagtttcttagaaaataaagaaggtgctgcaactccctgaggcaagaatggatagtccctggtgcacttggcgtgcaacgtgtcggagaaccagcaaaatctggcggggtctgcacctcattttggtcctttgtgtttccgcattcacccagtgtgtgcgcttccactggtgtcgggcatggtgtaccttgttgctgtttccacgaacgtacacggtgtggccgcattagaagggatcttgcgcccacttgttcgcaaattcacgcgttgtccaggaactggactggacttacacattccccccttttggtcttttgctcacctttatcaggacagaatgttggagttgactttcacaataggtgaaggctgttgcgcacagggtggacatttgggtgagtttcgcccacagggcatatacgtgccaggttctacagacatatttaattaggtctccctggaaactttattgcgtggcagaggactccttggtttgtgttccaaaattaggggatctgacaacaatggttcaagtgacaaaccgttgtggcaacaaggtgaaccattactagataaggatatccggagagacaaaatcgtgtgctacagagcgccgtcatgtgtaatagtcattgatttattttttttttttggc

SEQ ID NO: 692863 - DNA, 148 bp, Homo sapiens
  misc_feature (141)..(141): n is a, c, g, or t
caccaggctggactgttattcattccttcccaagctctgtgccaccctgaatggtcctggagctgacagagacagaacagcccctggcacttgcatccaggccaagtcaggacctggtttcgtgcaccccgtacggcccangacacgc

SEQ ID NO: 692864 - DNA, 200 bp, Homo sapiens
tacaccctaaattattatggcgataggggtgtaagtgtgcctttgtaagaagtgggctaaggcatttttaatcttagagcgaaagcctattatccctgggcccggtcataaggggattgccctggctaggtttatagattgttgggtggttggtgtcacattagttaggccggagcccgaggaggttagttgtggccatt

SEQ ID NO: 692865 - DNA, 319 bp, Homo sapiens
  misc_feature (76)..(76): n is a, c, g, or t
ggattactggccacaatatatgaagaactcctaaaactcagcaacaaactgattcaaaaatggggaaaggactttnaatagacttttctccaaagaggcacaaatgaccaacagacacattaaaaagatgctcaacatcacaattactagggaaatgcaaatcaaaaccatagtgagatactacttcacagttactaggatggctgttatttaaaagacaaaaacaaaagcagaaaataacgtgttagctagcaagtggagaaattaaaacctttgtaccggctgggtgcggtgcctcacacctgtaatccccggtcga

SEQ ID NO: 692866 - DNA, 210 bp, Homo sapiens
ggggagtatgctcagccctggaagcaggattctgatgccaggcacaccttgtggcaaggggaggtgacagacaagagtctagccctaaggaagggggaggtactgaaagccaagcaaatgctcccacaccctgcaaatccagagcccagcagcctttgctccatggggatagaggccctggcgaggcacttgtcccgttcccgtgtgccc

SEQ ID NO: 692867 - DNA, 126 bp, Homo sapiens
ctacagaaaggagaaaaacatctattccaaaagatggcagaaagaagaaattcatcgtgaaagtatagtttggtgcgattcagtaaagatggctgttccctcagaacgtgatatcatactgaccac

SEQ ID NO: 692868 - DNA, 463 bp, Homo sapiens
ggggttacaaaaaaaaaaaaaaatttaaaaaaaaaaaaaaaaaaaaaaaaaaaaaaaaaggaaaaaaaaaaaaaaaaaaaaaagaaaaaaaaaaaaaaaaaaaaaaaaaaaaaaaaaaaaaaaaaaaaaaaaaaaaaaaaaaaaaatttttggccccctttgccccaatcaattttaaatttgaccaatttttttattggggcccaatttcggcccattttgccaaattccccttatatgggggcttttaaaattaaatggcccgcgttttaaaaacttttaacttggaaaacccttgggtttcccaacttaaatccctttggagaaaatccctttttccccatttggggaaaaagcaaaaaggccccccccaatcgccttttcaaaaagtgtccaaccttaaatgccaaagggaattttaaaccctaaattttttttaaaaaattccgttaaatttttgata

SEQ ID NO: 692869 - DNA, 1116 bp, Homo sapiens
  misc_feature (476)..(476): n is a, c, g, or t
gagcacattccagaagcttcagagccaaggagcgtgcctgtgtggcagaggaggtcagcgcgtctctttgcaatggcggagctgaacccagtggcccccaaggcccaagaagaaggttccaggtccccgtaaggcctggacctggagagccttggatcaatgagccactctcggcacatgcggatgtcagaggacgagatggcccagggtcgtcttccacgaggacgcgagcatgcggtgtcccgaagcaccggcgcgtccggaggcggacgaggaacgagctggcgtcggggccgagaggcccaggaagctaggagtcagtgtccaactaagcccattctatatcgaagagcatcagccatcgccgacaagaagcggtaccagggacagcccggggcgtggaagcacatgcccgtggtgcagattgagctctccgtcccctatgaaggttccatgggcatgcactaatgtcagantcaggtatgtgacatgtctggacagaggaagcgagaggctaaccggtgcagtaagtcatgtgtaggaacggaacaaggtagggatggacaatcagagcgagaggagactggatgaagatggggcttgtgttcgtacaaaatggttcggttgctcaacgtgcgatagcgtcccgagggaacatcggcacacgcatgtggcgaacgatgttaggtaccaatcagggcaacgagccgtggagaatggacctgttacgaactgtctactggcaccggtgcagaactgcaggaatgacaaaaggggcccccataagcggatcccgtacgggggcaatcccgtaattagtggggccccatggtaactaagtgaccttgatacccggactggaggggttccaagaccgtgtgcccttatttcggggtagagaccaccttggtcccctggcggtgccgtaaacttccatggatgtcgcccgttcaatgaaaaggagaagggttttcgcaattgggccggccacaaggggcgtaacgaagacaaagtagggcccccttaaaaacttggggcgttcacaaaagggtacccccggagcgggcgagcgtatttcccgcggacggcttagacgcactacagtggcgacactac

SEQ ID NO: 692870 - DNA, 266 bp, Homo sapiens
ccctgccaaaaagtgaaactggacgcagtgtgagggttacagggaaggcagtgctgtcggtgccgagcaggggagcacgtcgggggtacagcaccatggctggaggaatcggctggcccacaggtgggcgacctggtgaccctctatgtcaggtggtacatgctgtagcccacatgtgtccgtgtagagtcccactggtgcgccacagtgcagcgcggcgcggctggcaaggggccagaggcgaccgtatagcgaggtcacccgcc

SEQ ID NO: 692871 - DNA, 1087 bp, Homo sapiens
  misc_feature (146)..(146): n is a, c, g, or t
ttacacgataattgaaactctctaacttgtatcatatcacacttatctatacctgcgaattgagatgatgtgatacagagatccttggcgcatactattgatattacattcagctacatatatgaacacatagtgtaggtgattangtaacaattgatcgagcacggttctcaagagaagtactagttaacagtagtcagtagggacgtttacatcactaataggagccagatctctgaagtcgtcgtaatgtttctctgtttacctatggacttctcgaatggcgtgcatcagatcatgtgctgacgggaatcgtagaaaatatctggtgtgatagacctgacgtatcaatctccgtggtggttgatctatgagggactgtcgatttgagggctgcccgtcgtctgcaatgtatgaggacctctcgtgtttgcatccaccagagtatccatatagacactgtaggcagagtcacattgatccctgaatccataccaatgctgaacccgcggatcgtgaataagcttgagagcaacggccaagactggttgcgccatccatttgcttcggcaggtccagggtcatggtcgtttatgggctaaccacctgagtatattgaaccctaatggagaggagttgatgtgcttaccgatcccacagacttcttttacctgaaagaaagtcctggaatgtttgccccattctatttggactaggacaagctaattctgaatgtcccaagtggagggcatctaagtggggtgaacttcaagcctcctggggtcttcgtgaacaaccctatttaatggtgaaggccctttcccgatgcttgctcgaaatcgccgattgaagggggacctacgtttggccaccaagtttgatatcctgacattggagaccccggccctttagaaaggaacaacagggcggctgacattcgactgtcccatcggtcccgatgtgagcggcaaaagagaatagacgggcgcaacagcagcacagctcgtgctgcagacctttgcgatgccactaatagacagacagactagacatggagcatatcgcacctccgcgacatcacacataa

SEQ ID NO: 692872 - DNA, 505 bp, Homo sapiens
tgggttgactcaggattataaaaacgggaacggtgaaggtgacagcagtcggttggagcgagcatcccccaaagttcaaatgtggccgaggattgggatggcacttggtggttttttaaatagtcattccaaatatgagatgcgtggtcacaggaagtccctcgccatcctaaaagccaccccacttctctctaaggagaagggcccagtcctctcccaagtccacacaggggaggtgatcagcatggcttccgtgtaacatcatgtactgcaaaatttcttaaatcttcgccttaatacttttccatttggtctaatttggaatgatgagccttcgggccccccttccccctttttggtcccccaatttgagatgtatgaaggctttgggtctcccgtgggagtgtcggtggacggcagccagggctctacctgtacactgactcgagacagtcgaatcaccactgccccccttacaactgcacaacacacaaagcaccccaca

SEQ ID NO: 692873 - DNA, 196 bp, Homo sapiens
ctcctcccttcaccaacactcgcggtcccgttttttgtcttttactctttctcgctccctttccctctctcgctctctctctcgctcccgttctcgttctcgctctcgttctctctctctctctctctcccgctctcgttccctttcacgatctctgcttttttctcttgactcgacccgcgctttcttgacggca

SEQ ID NO: 692874 - DNA, 138 bp, Homo sapiens
ccctgtttgtcggggaagcgctttgtgaagtagctatttctcttgtcctttcgtacaggcaggaatttgaagtagatagaaaccgacctggattactccggtctgagactcaattcacggtccattatatgcaatcga

SEQ ID NO: 692875 - DNA, 593 bp, Homo sapiens
  misc_feature (299)..(302): n is a, c, g, or t
  misc_feature (334)..(334): n is a, c, g, or t
  misc_feature (377)..(377): n is a, c, g, or t
atgggccactcctctgcagcaaataattaacgcccgttgatatgggtatcttacagatattttgcaagaccatattaagacagcccagttagtagaattattaccccggccaaaaagcctgtctataggcaggaggcaagttgtatcccgtagaggattggcccagtagcaaagagtaggaagagccattggtccttcttccaaaagttatgggattccacttttcaggaaaagaggagaaaaaggttgagcaagggaaccaaaggtatttggtgagtttttagatgattgaaaggggnnnnccccccccccctcttctccaaagaaaagtagnagtctccccttcatgccattcagaaaaaaatggaaagtcctcncaattggtccccttccccaacccaatcagctggccatgggctactcccttgtttacatagggtgtacccagtaaccaatgggaaacctctagcgggtatgtaaaccccagaaaattctgtaaccagtgctcttgagctgcttgctggagcctactcccactttgtgaagtgtactttcatttcaataaatttgtgctttcattgcttcaaaaaaaa

SEQ ID NO: 692876 - DNA, 204 bp, Homo sapiens
actcaatgagtaaataaccaacacaacaatataatgggcaaaagacctgaataggaactttactaaagaagatcttaatggcaaataagaacatgaaaagttgctcaaccacaatagccattaaggaaatgccaattaaatctacaatgagatattaccattacattcctattacaatggctgattttttttttttttggagtg

SEQ ID NO: 692877 - DNA, 372 bp, Homo sapiens
  misc_feature (6)..(6): n is a, c, g, or t
  misc_feature (60)..(60): n is a, c, g, or t
  misc_feature (83)..(84): n is a, c, g, or t
  misc_feature (86)..(86): n is a, c, g, or t
  misc_feature (130)..(130): n is a, c, g, or t
  misc_feature (137)..(137): n is a, c, g, or t
  misc_feature (219)..(219): n is a, c, g, or t
  misc_feature (233)..(233): n is a, c, g, or t
  misc_feature (335)..(335): n is a, c, g, or t
gccgcntgctgctgtcgcgcagtccgctcctccgctgcagagtcgtgcccatgagctcgnccgacaaggtgccattcgcacgnngnatcctgccagccgcgaccccagccttcgccgtcgccgcctaggnccccagncgcaccatggtgaaggtgacgttcaactcggcgcatggccagaaggaggcaagaaggacgagccaagagcagcgaggaggcnctcatcgtcctccnggatgccgtgcggtggattcaaggacccgggtgacgtggttccggttggacagaggagagcgtggtgttggtgcatgtgtttcggacttggcttcatgcttnctggcgtcatcctcggaggggcgtactgtacaagtat

SEQ ID NO: 692878 - DNA, 210 bp, Homo sapiens
aggacctgggaaattagcgacgatacaagttttctacatctgttatcttccttggcacgaatttccctgaagagaaacggtcatgttgatgaagaccgtggaattataagcttgggttagtgaggatagtaaactgcgtgggtttaggtgtttctatgatccattcatttctttttttacatagaaccagacatgtttcacatccacagc

SEQ ID NO: 692879 - DNA, 565 bp, Homo sapiens
  misc_feature (359)..(359): n is a, c, g, or t
  misc_feature (525)..(525): n is a, c, g, or t
tctgtgttgtgactttatgtgttatgtccgtctaccttacatgcatgttctgttgtgtgtctctgttgtgtacagtgtgttcccccttgtgtatctatgcctatggctggtgtgtacagtacttctctttgtggtgtgtttgtgtcctgtacatgctgtggtgtgttctgacctgtgtcggaacaacatgcgttgtgcactgtgtgttgtgtatctacattatacttgtgctgtgtctctgtgccgaacgcctgtgctgttagtgcaaggtgttgtgtggcctgtttgggcgtcctgggtctgtgtctgcgccaagggtccgcgccgccctgctgtgtgtctgtgccagggtccgccgntgcctgcgcgcagagctgtgtttcctcaacaagtgtgcgagcggtcgtgtgcgccatgagcgctgcctggcgtctccgtgtgcgccgcggtgtggccgctcctcggcggggggcccgggtcctggctagtggccgcggaggatgcgcgcccgcggggcgggcgggngcgggcgggggctggcggcgctgcggagcccggcggccgc

SEQ ID NO: 692880 - DNA, 317 bp, Homo sapiens
tctagcgcgtaacatattttgtcatcactgccaggatctccatttaacgcccctcacccttaggcagctggagcagcaggaagaaataccaagggtgccttttaggagaaataaagagggtgtcggttggtggaaatatgacttctgctatggccaacatgttcatcaataccatgaggaccaggatagtgggaaaacctctgtggttgtcgggacatggaacccattttttagcatcttgacatgggctaagaagaatactgctagagctatatcatcttcaagacgatggtacccagacagtcagggtggtatca

SEQ ID NO: 692881 - DNA, 92 bp, Homo sapiens
tgggttggggaaaaaaataaaaagggggggaaaggtttttttaaaatttggtttttttgaaatattgtaaaaaaataaagttgtaaactttt

SEQ ID NO: 692882 - DNA, 335 bp, Homo sapiens
  misc_feature (198)..(198): n is a, c, g, or t
ttgcgtcccacgtcgtgcaggtaggcaactaaggtagtgaatgtggatggtgagggctatgatgaatcgtaagacaactgaaagcggagccgttatgggggctagtggtacacacacgtcagagtcattgaatggagctatgtgatacgtagctgatgggtctcaatccagccatggacattgacttcacagacattntgtgatgacctaaagtggttccatatttaacaatattaattctcatggagatatacttatttgatgcttaaatagtaccaaattaaaaaaataatccgatggcaggtgtgagattcatctagaagaaaacacaaaca

SEQ ID NO: 692883 - DNA, 217 bp, Homo sapiens
aaggatcccggctcagtgatctcttctgtcagataattgtcactttacagtattcacaggtgcctgggcccgggggtcatggcagaacgcagagactttatgatgaggacggtgccacgatgatgccactaggccagcacaggccaaggcacagagcacagtctccgtatgtctcaggcatctaggattggctcttgggcctcccatgtgcttgagg

SEQ ID NO: 692884 - DNA, 244 bp, Homo sapiens
  misc_feature (119)..(119): n is a, c, g, or t
  misc_feature (163)..(163): n is a, c, g, or t
  misc_feature (206)..(207): n is a, c, g, or t
cgacctcagtgtaaatcacaaaacgggaagagctgatattggcaaaataattacatggctcatttccttgcatgtcaaaataggatttgattggttgtaaaagatgacaaatacctttncggtttcaatgttcttaagtgggaagtcacttattacagacctnattgggagtaaacaaagctgttagacctttcattatcagtccnnttaatcccttcaataatccccctaaatcagtgaggcg

SEQ ID NO: 692885 - DNA, 1659 bp, Homo sapiens
  misc_feature (537)..(537): n is a, c, g, or t
  misc_feature (775)..(775): n is a, c, g, or t
  misc_feature (834)..(834): n is a, c, g, or t
gagtggcgtggaacgcggtgtggtcgcggacgaatcggtactccgggcctgggtattcaccgtggttccagacgacggtagtggcgacgtggcggataccagacacgcgatgacattccttgtcgggggaaagtacagtgtctgccagtgcatcctaaggagggtagacgtttccaccgtgtactctcgagacaaggagtgcacacggaggagtagtaagggcgatagtgaccacgtgggagcgcatgatccgacatgggccaggaacatgttcacctcatgaagcgtcgcgtcatcgtggtcagcgtacgcctccaagggtctccaagcttggtcaccaggagaaggcagcacggaagctaagctcagggagcctagaagaatagcgctgtggcgacggcgcgcgatagataacgctcgatctgtgcaagccgcttaaaaggggcagaggaaagacgagcatcccttgtgtgcaagccctagaatgtcgacgtcgagaccttgctactggcgctacaagctagagtaggtagaccngactgtaggagaacgtcgacgtcctacactggagcacttctcgatttccgcaataactttagtttgaggcaggcgacccagctaacgggaagaggcgatggagatgtcggatcaacaggccagcttgggcccatacgacacgtacatggtagctcctgcatgagaatgtcgctgacgatacgcttgggagtacgcctggcagcgtagtcgcatagatcggagagtatggtcccactgnaagacacgtgctagcggcggactggcgttggtacaaacgacgccgtagggcaaacccanttgaagagaaacaaaaccccggggggttgcgatagggaacgcttgggaatgcgggactgaaaaggcgttgcgatccatttgcgagccccaaattaccaaagcctaaacctaaaaaaattttcccaaggcctgggaatccaatgttggaacggattccgacagaggaaagcggccttatttgacgctaccgcctaatgggcggcgtgtgcctaatagagccggttggcacttcaaagggggttcaaaaccagagaatttgcggtggttgaggtggctacagccggggcacaccgttcaccaggggcgtaattcgggagccccaggatacccgaagattaggaagggcgccactcacgaagagaatacgtaatttcccttaatgtttgaagaacctcttctggagacacccggagatattctgagaggcgggggaaaacaacaagagaagtaccgcgggtataaagcaccctgtgctgtgaatcacagggcgacagaccttgggaaggactaagcactaaggtgtgcttgtaagacccaacagagggcagggggggggacccaagcgcacaccccgaaatggggggaccccacatgggagcggggggcaccacacccgcgcgatatgtgaacgaaaggaaagggagggcgacgagagaaaaaccaccctgaagccatattcaggcccgggggggttgtccacacaacgggcaacaaaaacacgaagaagcagcgttaccccacagcaagtggcaagaacgaccgacaccacaagaccagagcgcgacactataagagaaggaggaggtactgccaaatgagaacgag

SEQ ID NO: 692886 - DNA, 229 bp, Homo sapiens
aaaaacccccgggggggcctttttttggggcccgggttgtttttccgggggccgggccccccccccccccctttttcttttaggggtttttttccccctttgggggggggtggggggggttccgggacccccccgggggggggcccccctccttttttccccccccgggggggttggggggggttttttccccgggtttgcctggggattaaaacccccttttttttta

SEQ ID NO: 692887 - DNA, 267 bp, Homo sapiens
gcatgttgtcacattacaaccagaaattggcacaaatgctactagtgtcggggttgtagccaattatcttaatgtaagtgctgactacctataacaatttcctacatatctcttctggctgtagggtaggatcagtggaatccattaaagttaacaccagacaattcactagtctcacaccacagtgtgtaagccagcaatggcatgctctcgaggtctgcccattcttggagataccagcttcaaattcaccaacaccagcagcac

SEQ ID NO: 692888 - DNA, 243 bp, Homo sapiens
gagaattgcttgaacctgggaagcggaggttgcagtgagccgagatcgcaccgctgcactccagcctggtgacgaagcaagactccgtctcaaaaaaaaaaaaaggaaaaaaagaatttggtttcggattaagggcctcctctaaaaaaattggcctggaaattttgccttactcgagagggctgctctgaggaggcccataaagaagctggacccggcttctatttcattccggggacagag

SEQ ID NO: 692889 - DNA, 397 bp, Homo sapiens
  misc_feature (167)..(167): n is a, c, g, or t
gccagaccgcgtcacacggtgatagacattgacagtccaggaccagtcgctccatcgtgcccagtcgatgccggtgtagtcccgacggtaggttcggttgccgtaagtggcggccaggcccacgcccacaaaaccccgggccaggggcaggccgctggtcagacccnattcggtttgcaccccattctggctttgcccactgccataggacacggcgctttgcagcaaggcgatgtcacccagcatgccgtttgcaaacagctgtttctgcaatctcggccccagacgcggctgggacgcggacgcatcctgccgatcccgcccgaactgcggccacaagcgcagccctgcctgccagcgctcagatgacgaggcattgaagcccaagcccatttcc

SEQ ID NO: 692890 - DNA, 418 bp, Homo sapiens
acctggctcctttttttcaagaatggtattagataccaagaggtacaagaagatgaaggaaatacaagtgcaatttatttatttatttaaaaaagagacagggtctcactattgcccaggctggtctcagactcctgaactcaggtgattcccttccctcagcactttgggaggccagggtggatggatcacgaggtcagagttcaagaccagcctggccaagatggtgaaaccccgtctctactaaaaatacaaaaattagccaggcatggtggcgggtgcctgtaatcccagctactcagcaggctgaggcagagaattgcttgaacccgggaggcagaggttgtggtgagccgagatcatgccactcgccagaagcctgggcgacagagcaagaatccatctcaaaaaacaaatt

SEQ ID NO: 692891 - DNA, 278 bp, Homo sapiens
ctgcgcctactactacccgcctttacagaggaggaaatggaggcacagggccaaacacaccaccaagccgagatgcaaatccacatggtctgggccacagggtccaggctcttaattactacccacggactcaccaaggcgatccttggtcttaactggcatttccccgattacgggtgagaaggggcatcttttttggatggatgggctatgggacttctgttcaagacctcgattgggagaggtgtataaagggggatccatgaggaacaggttca

SEQ ID NO: 692892 - DNA, 1262 bp, Homo sapiens
gtcgtgggctcggtggccgtgatttgtttgcgcggcatgctcccgggagagggcatatacgatattccggggggtccacccggttgcggtcacaaacggaatgtggggggccgccgcctatacgtgataattgatgtttttccatagtgggtgccgtaatgttggcttgtgttgcaccgggagtgtacaacagggttgccgccgtctccaatcaccgaatgtttacactacaaccttgtggtttccgtgggtgatgtgtaatacctccaccatagaactggttccgcatgttcgtgatcgcgcttatgggcgcgtgatacccatggtatgggtatgacaggcgttccaggggtcgggtataacgccgtgaagacgcccgggctgccgatagcttatgccataaatatggggggcgttattgtgctgctggagcgttgttgccgaagtttcccggcgggggaagcgcactataggcgcatctggtcggccctaagggatgagagaacgttgtgcgcttactgccaatgcggtgagtttaaccgttgaacgatactcggatagtgtagcgtcttccgcgtagggtctctggggagcaaaatgtgcgctaatagggtgctcgagttgcgcttgttatagtacgtctagaggagagttgcaacctcaacgaggtggttagcccgctgttactgcgggggtgtcctgagggcgtggagccgcttgggcatctgagggcaccgttttggcctcaggcctgggccctgagagctggacttgtatacgtatataggttatataagagtgctaagcagttcgcggtcggtggcctagtgatcgcccgtgtgcagcgcatgcagagccactcatggacgagacagaagctcagttgctcagaccagcgccatcggtgccgacccagatggtgcaaggatgcctcgaccagtggacggacacattatctgactgtaacggctggcatttcggtgagcgctgatgtctcacgtgacagtagtgtggcgagcgctggcatcagctgtcacccatcctggtcagttaactcgggtactcaagaagtgggaagccagatgagctgctgaagatgcttggtatcgatcagggatgccattgcacaagtctgtgaggggcctcgatcaccaaggtcctagggcagggtatgaagtgtgggacgggggtctatacattcctgagattctgggaaagtgcttcagcggtactggaggaggaaatgtggggggggcgggtgc

SEQ ID NO: 692893 - DNA, 518 bp, Homo sapiens
acaaagagtaactagaaggtgagactactcggaaacatcaaaagctaagtaaccaagagcactagaagtagcagtgtgtagaaacataacatagaaaacagtgtaccttaaaactgagcatcccttgatttcccccatggacctacaatttccagtgactagcaggcctgaagaggccaacatggtgccagacttaggcgccactagacaggaccaaggaggcatagtgcactactaccagggatagctaagagcagggtacaggaaggatgaggaggaaggctagagtactaccctcccaggagccccaaccaatagtacaggtggagacctgcaccaggagtgctacagggcaagtatccttatacaataagcttaccctcgcaccaagggccactgtctatgtactcaccccataaaaacaaaaatgttactgtaccccttacaagtgactaacacgtacaccacccatgaagggctgtccctttattactggccatgcatccagggctgctact

SEQ ID NO: 692894 - DNA, 142 bp, Homo sapiens
  misc_feature (10)..(10): n is a, c, g, or t
ctcacagacncgcccgtccttgcatgcgtccccgcttggctgtagccccgatgggcagctcctcaccccacagtcctcgtccattgtagccggggttacacagctgctgtgcccattctcacaggcgccccctctcgactgc

SEQ ID NO: 692895 - DNA, 344 bp, Homo sapiens
cctagttaagaacaaaaggaacactctcccctgccatccattgctggtatcctgtgtgtgtttgatacctcagattcagcatctactacagcacgaagtgttatgcgtgtcctgaatcataggagagtcggattcaccaccctgcccagaaacagaagcattccagaggtttcttaatagatcacgaaatgaaatgaccgatccacttcgatgacaggaggcatgaactaagccgtgctctctgataagatttgtgccactgttccgtgcttctaacgtaaaccggtctgggtgttacgagaaaaaccacgaggcccggctactcttaagtagccaatgcaaaa

SEQ ID NO: 692896 - DNA, 229 bp, Homo sapiens
aatgcataatttatccttctatggctgagtagtatccatcatatatatatatcacatatatatgatatatatatataaaagaaacatatcacatatatatgatatatatatcacatctatatgatatatatatcacatctatatgatatatatatcacatatctatcatatatatataaaagaaacatatatgtatatatatatgaaacagcttctttatccatgtgtt

SEQ ID NO: 692897 - DNA, 869 bp, Homo sapiens
gatttacgagtgtgagtaaatcgtttcttctttttatttgattattattacacagccaaatccaacagatcaatacaccgctaatcccccgccatgtcgtgtatacttgtggaattgcaggccctcgctcccacacaaacattacacattaccatcccacctccggaaagcctgaacagccagccaccctcaaggtgtgccagcctgaagctatgtccttgggcccagagatgacctgtctattaacccaccgaatcggttgccactccggacagtatacagaccttcggagaaagttagcttttgaaaaggccacaaccctggtgtgcactgtctaaagcacgcataccgggagatcgagcaaaagaacctacgggaggttttttctacaccccaaagaggtctatagcattaaaaaacaaaatgcctgaatcaaagcactatgtaatttaatctctcaaaaagaattgcacacctaatgtaatttgtataattattcagacgaacagacataaatacacacaaacaggggtgggagggcactctttgtacttcaccactcttgttgattaaatgtggtttaatgctcaattcggcaccatagatacaattgataacagataactagatgattatgaaatgtaaactgtatgtacagtacatgccagataacttgaatacagaactctattacgttatccacaaacaacaacgttcactatactaacagagaatacattgtattttgatgtgggcatggttacatggaacaatataaacaaaagagcgctatacacctacatattgtccaaagacacacgtgataggacaatataaaacagaggaagaagataatgaatgataaccgt

SEQ ID NO: 692898 - DNA, 302 bp, Homo sapiens
ctgcgattttattcgacatatactagaagtgtattatgcgggattgttacaggaggactaacatcactgcgaaattatttgtagtaatccagggggatgattatcctaaagtcacagggtgtgtacaccctgtgatattattcatattattctagggggatgttactcctaatgtcgcagatgtgtatgcgctgtgatattattcacaatatactagctggatattgttactaatgtcacaatgcgtgtacaccttgtgatattatttgtactatcctaaggggatgttactcctattgtca

SEQ ID NO: 692899 - DNA, 144 bp, Homo sapiens
  misc_feature (4)..(4): n is a, c, g, or t
  misc_feature (48)..(48): n is a, c, g, or t
aaanctgatattctaaggtcgcacctcaaggagctagagaaacaaganaaatcccaaacccaaacccagcagaagaaagaaaataaccaagatcagagcagaagtaaatgaacttgaaacaaaacaaaacaaacaaaccaaaaa

SEQ ID NO: 692900 - DNA, 150 bp, Homo sapiens
tcatctgcctttacttctcatttcaaggtttcacagagtgtggctcacccacatcataacttaactaacttgccttccccaacaaacatgaaagacttaaaaataaaaatattcttctcgccaggacacagactgtcacccaaaccagaa

SEQ ID NO: 692901 - DNA, 904 bp, Homo sapiens
  misc_feature (47)..(47): n is a, c, g, or t
  misc_feature (153)..(153): n is a, c, g, or t
  misc_feature (286)..(286): n is a, c, g, or t
  misc_feature (342)..(342): n is a, c, g, or t
  misc_feature (347)..(347): n is a, c, g, or t
  misc_feature (360)..(360): n is a, c, g, or t
  misc_feature (904)..(904): n is a, c, g, or t
gccggacccgttggcagaggtggcggcggcggcatgggtgccccgangttgccccctgcctggcagccctttctcaaggaccaccgcatctctacattcaagaactggcccttcttggagggctgcgcctgcaccccggagcggatggccgangctggcttcatccactgccccactgagaacgagccagacttggaccagtgtttcttctgcttcaaggagctggaaggctgggagccagatgacgaccccatagaggaacataaaaagcattcgtccggttgcngctttcctttctagtacaagaaacagttttgaagaattaacccttggtgaattttngaaantggacagagaaanagccaagaacaaaattgcaaaggaaaccaaccaataagaaagaccgacttgaggaaactgcgaagaaagtgcgccgtgcatcgagcagcctggctgccattggattggaggcctcctgccggagctgcctggtccccaagagtgctgcaccacttccagggttaattccctggtgcaccagcttcctgtgggcccttagcaatgtcttaggaaaggacatcacattttccacataagatgttccaactgtgctctagtcgtcttgaaagtggcaccagaggtgctctgcctgtgcagcgggtgcctgcggtaacagggcggtcttctccaccaccacaacaggggccatatgcgatgatcccggcctacacagtgacaacgtgagagagaaaggaggccttgcaaaaggaccttgtaggggaaccccaggacggtgaccttgtacgtcacactaggaggacgcgaataggctatgaccgcccaaatggggcccgagaccggtcggagaaccccaactttggcaaccaacgcggctgggccgccn

SEQ ID NO: 692902 - DNA, 285 bp, Homo sapiens
caagaattgaataaagagctttctggcatccagcagggttttctggctaaggaattgcaagcggagctctctgcaaacttgataggaaagtaaaagcaacaattgagcaattcatgaagatcttggaggagattgacacaatggtcctaccagaacaatttaaagacagcaggctaaaaaggaggattttgtgaaaaaggttcaggtgttcttagcagagtgtgacacagtggagcaatacatctgccaagagacagagcggctgcagtctacaaacttggccct

SEQ ID NO: 692903 - DNA, 233 bp, Homo sapiens
ggggaaccccccccggtttgggggagaaaatttcccgggccttgggttaaaaaaccggttttgttttaatccgggggttccccgccctttttttccgataaaagccggccccctttttgggccccccttttttaatggtggaggggacgggttggggtaaaccccctttgttttttgtttttaagaactttttgggcccccccccgttttccggtaaatgggtttttttggta

SEQ ID NO: 692904 - DNA, 1339 bp, Homo sapiens
ctctttttatgtgggaacgtaatgtaggggaaagggtctttgagtgtgttcctagtgctccttatgtacaacagtgaaaatgcctcaaagccttgctatcccagcaacctggggctggttccacatgtgcctggtcctgccccttacctggttcttatctcaatggcagagcttctgaatttcagtgccttcattccatgagccctcattgtggccatggccttccttttgcttggcaggcaaggtacacatgtggtgcaatgctagcatgctagtcacttgagagggcatcatccatatggccttgtatccaccaacacgtagcagcagcacaggtcacttactctattgtaaccatccattgtatcagcccaggttgccattctcaacaagacacctcctctcaccagacttgtcagtggacactacactagtcccacagaagctagcagtggccacaggcgtgattctcatcaagtgtccatatttgtcgcaagcacaccacagtagcatcttcagctcagctcacacgttatcacacacgtcagtcacacttgcgtacacttgtcatttcacgttgggcgcgttgggcacatctcccacgcaaacgcacacatctcccgcacacgcacgcaagcatcccactgtgcgctgggatccttgccattggtgcaaaatcgcacacccaaggcacacttgcaagccccaaggcacccaggcgccttgggcccatcgagtccatttaggccatcttcatttccccttccaccccacattaatggtgcaccccatatcactccctggccccatttaaccgaatttaatcacgactggtataatacaccatcccgaagtaccgtacacacaaacggcaatgaccacgataagcaaagataccttaagtctatgcattttgaaaacttttcaacagcacaacacgtactgtgggacgccacgcacttcacacagcgtggcgcaccccgtccattttggcgacgtattggcaattatctctatggcgttatcactttctcccgttccttccccttgcttgcggtacgcggtcacttactttaaccgcgtacaacagagcattgaccagccacgcaactactcatggacacgacgcttataatctttacccgataacattagctcggggcgacacacacatttcccccccttaataacacgcaacgcacagctctatggagaagagacatacaagccataacagtttcaacacgggcgagattatccagacaaggaaactagtcacacgcagctaccccccaaacccattgtcgccttaccaacaggaccaaagggcgccacatcc

SEQ ID NO: 692905 - DNA, 304 bp, Homo sapiens
  misc_feature (45)..(45): n is a, c, g, or t
cccgccgagtacggaatgagacatttgctcttcagagaacaactntttttttattttttcttgagatggagtctcactggtgggatcaggctggagcgctgtgctgccctatcggctcactgcagtctccacttcctgggttcaagcgatcctcctgcctcagcctcccgagtagctgggattacaggcacccaccaccacgcctggctaattttttgtatttttaggagagacgagggttcaccacattggctaggcttgccagacagactctcaggcctctccctgttctagcccctgagat

SEQ ID NO: 692906 - DNA, 833 bp, Homo sapiens
cgcccgggccccggaacccaggtgcttccagctctcctctgtccttgctggcctcagagtcagtcggactgaccctgttatcattgaggtgtcccagtgggaagcaggacgtctggagcttatacgtgttcatatgtggacgagggagaagcagtaggtaaggaggcgttccactcacctcgcgttccttcgttctccctcgcgtacgaggtgcgtgagcaagagagagctcccgcaagtaagagtggctcgaggcacaatacaaaaccaataacaaaacaaaacataaaacataaaaaaagaagaaaaaaacaaaacaaagatacgccacaacacagcacaataggccaaccacaccgagccgagagacgacatatatcgcgcggaggagcggcgcaacagacagggcgcgcgagcgagaagcgcaagcgcgcggcgcgcgcgtcgcaccccaaacagagccgacaaagccgcacacaagaccacaccacaactctgacaaaaaaacaaaaacgcgggagagcacacaccgcagcgcccgggcgacaacgcctcacaacatgggaggtgcgagcggccgcaacccacgaaaccaataacggaagcaaaagaccaaccggagagagtaaccccaccgcaccggatgctcaactcaggagccccgacgcgcaacgaccacaaccgcccgcaccacccacagcagaaacaccacaccacaccagcaacagcaaagcgcacaccacaaccacgccaagcgagcccacacgacacgaacccccccaccgcacccacacaccacacacccacgagccacccacaggaccacggcaacg

SEQ ID NO: 692907 - DNA, 510 bp, Homo sapiens
  misc_feature (500)..(500): n is a, c, g, or t
  misc_feature (507)..(507): n is a, c, g, or t
actcctgggctcaagcatctgcctaccttagcctcataaagtgctggaattgcaggtgtgagccactgcacctggccaagaacttggtgtttcttatttccaagcttatctcctctgttatttgctcccagggagaccccttttccatttatgtttccagggtgctggggggaagtgattgccctcatctcttttgcccagccaccaaacccagtgcagactctgctgaatgcaggccccatctctgtattttacttattccatttcctgtcttgaaggtgggggcactatgtttatctctaaggaccctgactggctcatcattgaaagcttattttgtgcaaagcattgttctgagcactgtgtgtgtatgattctacttcatcctctgtaaccctagcagtccggtcaaatagtaatcattttatagacaaggcaactgaggcacagagcagctcagcagcttgcccagatcaaacagctgggaaagtgggtagagntggaatntgg

SEQ ID NO: 692908 - DNA, 646 bp, Homo sapiens
ttatagtgctcagtggccagaacaagagcacggtaacgtcagcgttcctgcggctgttactgtgaccacatcacaaaggcggtataatgaggccgtcagccgccgctccatcaccgatatggagcatggcgaacaaattagtcattcccggacggtacatcgactaaccgttgcttcaccatgtgccgcggctgtccatcagaccgtgttgcatcccggcaacaaggaattcaccaccggcgaacatatccagcgcccacaaggcggtggcgagggtgaaggtccgggcaaagccggctactctggcgaaggcatggatgaattctgtattccagatcactcaggatagaattcctcgaattcttgttcgaagacctcgaactgaccaacctggtcaaacgcaacctgaccggcaccgataacttcaagaccgtacgcgcagggatcagccacgagggctatcccgtcgcgcatcaacatcatccgcaccctgcgctcagcccattcacggcgtatcgccctgtccggcagcagtcgagccacactcaaacagagcaaggaagagttggaacgcttgaagcgcgaagacccggacaacttcggaggatatccaggaaatagaggcggaaatcgaacaaatcagtcg

SEQ ID NO: 692909 - DNA, 1317 bp, Homo sapiens
gaacactgtcttccgtgtgtctgtaccatcttcgccttttcgttattatatggtccttattttcttgtttttttttgtaatttttccccccaaccatcgtgattggtcttttcagggcagatttagttagaattcactgccaggttatctatctgcccaccaaaatgatccagtctggaataacatttggtcaaaaaaaaatatatatctatatatatatagctagactggaagagattaatttcttcccccaacttctggcatgttgaagcatatttgagctatttttcatctaaaagagtaaggtattaggcccttaggtgggagccccatgtatgggtttttctagagctcgggtgggggaggcgagggcaggggcgagggctagcaataggtaatacgcagcaggcaaacagggcatacagtgctcaaaatttctcatacacggggttcaacaaaacaaagagggagtgccctggcaccaattaactattaagtgcatttataaactgtttcatatcaagtgggcaacagcgtttccatcggagcacatgtattagacatgacattgcatggaagcatgcaattctgaatagtcaacacatatataccttcaatagcggcgagtaagttagatccaccgctactcaaacaacgtcgagaccatccccaacaataagcaccccaccggaaagctatggaaaaactaaccgaatacatccgaagatgtccagggactagcacaatctgaattaggagaacaatcagagcgataacactgtaaacactcaaaacacccacaaggaggacaacaatgagcaacagggaaacacgtggagtggaactcccaacgcaaatctgggatagtcaacccgccgcacaacaatgacttcaccgaggatacaaggggcgaaccaacagtggcacacagtacatagtaccaccaacgacaaacgcattgtgagcacaaggaaccaaaagaaggacgatgacaaatgacactaccagaagtgacaacatggcccggggaaggtgaaaccgagcagaagacgcacaacaaccacaatcaacaggggacacagtaaaaaacacgctcggaaaaaaacaccgccaacgaccacgcgacccaagcaggcacagaaaaacacgccacgagaacgcagaggaacaccacacataacaagcacagcagcgccacaacacaccacatcaaaacaccaacaacaaccacgcccgtacagaagcaaacaacaacaacgaacaagaaagaacacgaaacaacacgaccgcataccacactcggctgcgccccgacac

SEQ ID NO: 692910 - DNA, 754 bp, Homo sapiens
ccaaagtcaagaacgggaaaaaaaaaaaaaaaaaaaaaaaaaaaaaaaaaaaaaaaaaaaaaaaaaaaaaaaaaaaaaaaaaaaaaaaaaaaaaaaaaaaaaaaaaaaaaaaaaaaaaaaaaatcttttgggggccggctgggccccatttgtttttagtttgggccagttttttttttggggccgattttggggttcttttggccatttccccttttggggggggtttttccatttcctgggccgggtttttccaccgtggggctgggaaaaccctggggtttccccattttattgccttgggagaaattccccttttcgccggtgggggtattaggaaaggggcccccccggttcgcctttccaaaaatttgcccaccctgatggggaatggaaatttttaggctttttttttttgttaaattccgggttaattttttgtaaaaccagtttttttttaacccaatgggccgaattgggaaaattcctttttaattaaaaaaattaccccgggttggggtggggggttttccactttgggaccaggaccccttttttaaggagcggggcctccacgcgaaagggggaaaaacccttctttaggggggtgggccctttccgggacccttcccttttataagtttttgggggccgggggcccaaaaggcttaattgggaaccctaaagggggcccccctttataattttgcggggaaaggccgccaacctgggagaaagggagggacccccccgg

SEQ ID NO: 692911 - DNA, 202 bp, Homo sapiens
gccaccatatctaacctaggtctcccctcctctggcaacccccttgtaaaggggagtgaactaaccacccccatcgcagatgcgctgaggcattacaaacagcatccagtgtacgatggaccagtaggagcagtgtcttgaaggcatgtatcaaggctccaggtgtgtcgtgaccagttgacaatgaggattctcgacatca

SEQ ID NO: 692912 - DNA, 158 bp, Homo sapiens
gtcatgtagagaggaaggtagactcaaccttactacacatgacaagttaaaagtccttacaaatagtagtgaagttagatgggccaaaccatcaaacttattaaaatagaagtaatagagcacatccatctttcttgaacacacatctcatgcacttt

SEQ ID NO: 692913 - DNA, 216 bp, Homo sapiens
aaatcaaaatttcccaaataaaactgatttgggatttgggggggaaaaattttgaaaattaatttatttttaaaaaagcaaaaaaggactttgggcaaaggatttttgtaaaagcttttcaaaaaatctgtctttggtagggcttttgctgctcccccccaattgataaaatgctattaaaaggtttaaaaaaaaagttttaatttttaaaaggga

SEQ ID NO: 692914 - DNA, 946 bp, Homo sapiens
tcttgctgtggtcccacaatttattgaaaataatacagcactacagaaaaaaattcaaacaggtccccgaggcgtttgtgaaattcatcccaactgtaggctgagttgacctgaaggtttggacagacgtgccgaagttccaaagagcttcagcatttctccttaggtgctcaggattcatacttcaattaatctcctgtgatccaagtgttgagaccttcaggaacattaagttgtctctcctttcatctctcctcctccgtgcagcttgatggagattacctcttacgtgggccctcttctgcaattcgctttcattcagaagtgcgtgtgacataaccgtgctatcattgtatgacgcgaggcttcatggcctggggaataagtgggggatcctccatcgacaacatcgcgcattgctcccgtggtggaagttccgttgcccaggccgcgtgtagatactttcctactgatgaccctgggccgccttcttcacggtttgggtgcagaacgcggcccatgtttggccccagagtttgcaacctcagcctcgcctttggctcccagaagcccccggcccgcgctgcccgcactcctggtcctgctcggggcctctgttcccaggaccctggcattgcccagacatctgtgtccccctcaaaagtcatcctgcccggggaggctccgtgctgctgacatgcgcacctcctgtgaccaagcccacagtgctcgggcattagagacccccgttgcctaaaaaggagttgctcctgccttgcgaacaaccggcagggcgctatgcacttgagcactgtgcaacaacgtatagccaccaatgtgctattcaattgccctaatgggcagtcacaaggcaacaactacccacgaggtaaggactcaaaaggtgcactggacccctccctctgcacccatgccaaacttactg

SEQ ID NO: 692915 - DNA, 112 bp, Homo sapiens
caggatccccctgtatccggggagggactgtgccacattcttttaaactaaccacttcttgtagtgagctctgctgagatactcactcttcattctccatcgcagggcacca

SEQ ID NO: 692916 - DNA, 321 bp, Homo sapiens
  misc_feature (148)..(148): n is a, c, g, or t
agtgactcttctatatctacagatctgtagcaatctccccttttacttcccatcgcaggtgcttccttcatagtttttttgtgcagcatcaccacgagatttacgagtttgggggactttcaaagaatcgatagttgacttttttggncctccatggaaggtgtgttctgaaggtttctcctccctgtgtctctagccctccctctaaggacgtttcaaacacctcttctatatcaatcagctcatgtctcctgaggaagaacgctcttgatttctcttgtgtgagtctgtctttatttcacctttatatcttgggtagat

SEQ ID NO: 692917 - DNA, 1059 bp, Homo sapiens
acaggtagtgtaatgtgatgtattttgctcccttcttttttgttgtctgcgtatgtctttcttagtgcctcctatcttgtgttttttgactttttttgcccgtgttgtggtttcaagtatgctcgttcccggggtgaatgtttctcgctcgccccaattggggtttctcgcccctcccacgtcccgtatttggattgaagacccggtttcaccgtggccagcgggttagaatctctgccttcgggggtccccccctcttggcctccccaagtgggggattacagccttgggctcccgggccccgcccttcaaaagcttgttgtattttcgcatatgttgaaaaccgtttgacacattggcaaaaatgatccgttttgaaggccaaatggccaatcttgcgattaagaaggccaaaatagtcaaggagtccaaacttatcaatccagtatttgggaaatgaagactggaagctaatttgccatgaattccccaacttttatactctttccgtaaaaaccatttttttccctttaaaaaccactatggatccagaatagcccccatttagaaccctttttgttatccgtccatatttttagatagttagaacctggtcctaagcctaaaaagtgggcttgatttctccccgtaaatcttttacacacctgcctcgacacaccacttaacctcttttataaaatatgacacctccccgaagtcttttgttcgcactggtcaccacccctgaatgcttagaatgttcccgtaatctaaatatggccccacgtagtcttgatgagcccaagtcccttttttccactctttagagaaactaacactggggacacacacacgagtcgagaccacgttttgaagctatctgtgtgtgtgagatgaacacctcttgctttaattccacgaaatgctggacactctaattttggagttgtaatatttcgtgtcttgtgtactttacgctttgattcatagtaactttttatggaattgatttgccttgaaccaccaactgtaaattaaaagaaatggctgaaagagcca

SEQ ID NO: 692918 - DNA, 368 bp, Homo sapiens
tttttttttgaaggagtctcaaattaatttattaattctttgttcaacacatatggtttattttctttatttttgcttttattgagacagggtctcaatctgtcactcaggccagagtgcagtggtgtgatcacagctccctgcagcctcaacctcccaagctcaaacaatcctcccacctcagtctccagagtagctgggactacaggtgcacaacaccatacccaggtaattttttggagataatgtctcactgttattcccaggctggtgtaaaaactcctgagctcaggcgatcctcccgtctcggcctcccaaagtgctggggatacaggtgtgagccaccatgcctggcttatgtttttttc

SEQ ID NO: 692919 - DNA, 1400 bp, Homo sapiens
acgtctgcacagttcgtcgctctctcgtctagtagcgcgagttattgtgcgccccgcctgccctgtgttggtggagagctgaacatcccccgcgcgagtcgttgttagtacaccggggggtttggacacaaccggggctcttttcgctgagagtgtttctgatgagacgcggctcgtgcccaccgggggctccctccagctgtgtgtgggatcctcgcactgctacgtcagtgggtttcccgtattagccccacacggagttctcgggtactatatcttgggggtgggaggagacttgtctgttgtagtcgtccgcttctgtgggggaacgccctttagtggcgccccccatatattgtttctggggtaaatttgccccacctccgggggccctttttggaggattgtgccctgtcccggtaatttggcccattatattcgtgggccaccaccgtggggccccaccccccccccctgttatacatccgggagcccccgggagtggttcctaactaccccagtcccatatgtttcgtcttcgcctttgcctcgatggtaatacaggagatcttggctttccccacgacacgcgtttgttatgcgtgatatgcccgtggtcggcgggccgtccacaatcaagtcgttcccacagggggcccccgcccgcgtttctaaccccttgaattgaggacccccatttggcgccgccggtttttgcacagtgccggccacccaagcgttgtccgcggtggtctgttgctttgcgcgtctccgatatgagccctttggcccccgagcttgcacgcgcggagccctctggcaccggccatatggcctcccggggctcttgtgactttagcaccacacctctcgcccgcgcgctggcgcgctcagcgcgccccatatttttttggggagacacacttcttgcgcgcccctatgaggacgcccaagtgggaggaagaaagccgatatagccgccaagtcttggaagcgcgccacaaagaatagtaaagtatttgtagcgccaggaggtcccacagttaacacccgcgttagcctttgttcgccacccgttggaggcccccaggacgccagaaaccttggaattgcccagaccgcttggggatagctggtaccaatttgtgggactcgccatagcttacttgttttagagctttgtttccaataggattttagaacttcatgcgccctctgagtcgccgcagtcacccttctgaagagccccccttgctcactaaacccaaatgcccctgttggtcctctgccctggagcctgtgaccacttttctggactatttttctgtgtttaatttgtggccgagtgtaacaaccatataataaatcacctcttccgcctgttttagctgaagaattta

SEQ ID NO: 692920 - DNA, 477 bp, Homo sapiens
gtcgaaggtaaacagtcgcttcctacttccatcctcgtccgcagcctcattcctctttagtagtttaatttctcgtcctgtgacactcgtcccggtgcctgctgactgactgctgactgactgaccgtccgacggacgggggcatgctcgactaacctgtggcggtgacgtgagccccgacaacccggaaacgagcgagtggcggcgagtagcgagaggctcctgaggcgtccgtgctgctccacgcgccggctgctccctcatcgcctcagctcacgtggtcagacatggaagacagaataactgagcggcactaggaactgttgcattaaaactctatatcaataggtctacacctagcgttagatacgacaggagctaacggaacagatatactactctagctactggcttggacagtgttaactcttcacacatgggggcaaatccttcccttaacacgtttggaaacatgca

SEQ ID NO: 692921 - DNA, 503 bp, Homo sapiens
ctttaagttggttgtcagtcagctggataagtagtataatagagctacttagctgtggttttaatactcttctgttatcaatttgcaggccaattaatggccttttctaacatagttcatcccaccacagacctccacaccatcgttaccttaaaaccgattatcgatcatgcccactacgatccaagctactggccgcctttatacagaggggtgaagggtctgtgctagatcaaaaggcacggggtggcgatgtggcagagaagttgcttgtggggagaccttgctcttaacaggcttctggaaaagctagggaaaagtggttgcccgctttccccctttccctccccttcaagcaccgcttgagatttgggctttattattaagagctgctataaaaacagcttgcttaactgttaagagaagcccaggggtacttcaagcattccttcggatgcttcactccagaaagagggagttgaggcaagtcctcattaataata

SEQ ID NO: 692922 - DNA, 391 bp, Homo sapiens
  misc_feature (190)..(190): n is a, c, g, or t
  misc_feature (302)..(302): n is a, c, g, or t
  misc_feature (311)..(311): n is a, c, g, or t
  misc_feature (315)..(315): n is a, c, g, or t
  misc_feature (346)..(346): n is a, c, g, or t
  misc_feature (362)..(362): n is a, c, g, or t
  misc_feature (366)..(366): n is a, c, g, or t
gggccagggccaaaggggaaggccctggattttcactcatgtgagatcttgaatctctttctttgttcggtttgttaagttaggatcatctggtaaaatagttaaaaacccccaaaaaactctgtatctgtttttagcatgtgctgcattgactctattaatcccatttcaaattccccctacattcctntccttttcactagcctctttgaaggtgtcctggccagccctggaaaagcactggtgtttgcagcccccctcagttcctgtgcctcagcccccaggcccctgtgataatggtntgtttagcncttntgtatttattgtaagaatgattataatgaanataccccctgtaactncaanaaattataaatgtttttcccatcaa

SEQ ID NO: 692923 - DNA, 158 bp, Homo sapiens
gaacttcccggtgctggaaacacagaatagaccctaaatgaccactgttttatttattattgtctcagaattgtttagagctaaataatgattcagtatgtgattttctagaaaactcacggaaggagataagacttgcttttcatgaaaattggtac

SEQ ID NO: 692924 - DNA, 228 bp, Homo sapiens
ccccccggggcttttgggggggggggggggttttaaaataagggggggggggtggtttttttttccccccgcccccccccttggggggacaaggggggggggggggggggtttttggggggttttggcccccccccaagggggggggggggggggggggggttttttttttccccccctttttttttttgggggccccctctttttttggtttttttttcccccccca

SEQ ID NO: 692925 - DNA, 896 bp, Homo sapiens
aaagaaggtcatgtgttgggggggtatcttgcatgtgcggattatttgtcccctctcaccgaagcccttgtgagtctagcaaactattgccaggtagtcgtgagggtgctgataggactcttagtatgaagttcaagaagcttgtatagtagtataattggatgctggtcatctgaaatttatgatccatcttaagtttcatagtcagaattttcatgaattggttttagtggtgtgttgaactgtgaagaagacatattaattcatggtttacaaaagatctcattgtatataaagtagtggaaataagctatgtagtgtagagtggctatctagtaatctccgtaggatgaataaagcaaataaatggtgatgaagggaaattgagcatggtgtatagtatgaatctaatcattaagaagtgtctgagagtaaaacagagttcttgtagaaataatgtacaaatggcatgcaagctcgtgaattgatttggggttggagctgttgttgcaggagctgtattttgctaccagaaagtcttaattttaaaattggttcaggtcgaagcctcttggaatgaccaatattttatttacatatttgcatgtatgtcacatgtagagtctgttcccgcattatgcatgctgaggagctctaaagggtagagctagataatatatgcttgatggacagtttaagttggcaatctgggttgggtgtacatactatgattaccggggcatacaataggtcatggtggggggttggggaaaatgttcatgggcacggggaaaaggaaaacgaaaagagggcagaagattatgacaaatgtgggtacattaagacgttaggaaatatacagtgagaagagataatactgttatacgtctagttca

SEQ ID NO: 692926 - DNA, 155 bp, Homo sapiens
ggcagcagcttcactagggacactccctacaccatgaccacctattctgtggactatacagtgaggagcaattagctgtgtcagtcagggttagcatggagaagcagaatgagtaggagaaacagacagaaacatagatagtaggcataattcat

SEQ ID NO: 692927 - DNA, 1157 bp, Homo sapiens
cctaggcccgggcctgcgtgtggtgtggggttgctgcgcgccgggggtcgctcctgctgctgtcttaccgctccagcttcgcccacttccccttgccagcggtggtgggcgcggagaagacctgccggacgccatggtaggacgaacgctggtccgcttttgccaacgaacgatggaccaacgatggtgcacgaacgaagcacgctggctggacgcacttggacctttgctacaacgcgagcttaacgaactacttcctatgaccccgtggaacttacctgcagggtaccaccaacgacactcgcgacactgtcactgtcacttgcctacttcgccaacgcacgcacgtaccacgacttgaccggacacgttaacccctcgtttggccccacagtcctctatcactcaccactccttggaccaaccccactttctttacgcctcggtggccaattcaaccgttgacgaacgccgacccctttgaaccgaccgcatcgaccctgaaacacgacagcctctggccaaccgttacccacttccggcacgaccaccatgaccctcttgactgcgcaccccggactgacatcgcaacaccgtacgcttcccatggcctgtgcaccacacttgatacactgtcgccaccccaggcacacccgggcacttgacgtcaaccaacagttgcctctcgtacgcacttcaccgtctcaattgcgtgtgtccgaccatctccattgttttccccttgcgtggaggccagaccccgagacgtgcccacccccttttcctttggcaacttatccctttgtgtggccgcgcggctctacgcacgcgggcctggctcacggtggcgtccagtgtccattcggctcgcttcttggcccttgtgtctccttgcccttctcgtactcccggcaccacccccacgcgcggtgcggacctctggacaccggtaccccccacagttatggtacaacacacttggtgggccacggcccttgtgcccctggccacgcgggcacaacagcacaccgtttttccaggtggcacctcccgtccccaactccctttgtgcaccgacgcatccacgccccttacacttccatttcctttcgccacgcggacaacccactttcacacgcgcaccacctacccgacgc

SEQ ID NO: 692928 - DNA, 434 bp, Homo sapiens
  misc_feature (395)..(395): n is a, c, g, or t
  misc_feature (421)..(421): n is a, c, g, or t
aacggctgatgcggttggggagagagattggtctcaactccaaaaagggcatgggcagaaggaaatttgtagccaaggagcagagtaaacgggattctggctaagctgacctaacgggattcttgctgaagacaggccaggctgcttagacaccacctgggggatagtagaggatgaagaatctgatcagagatctaggatgatcaaaaatacgaggatcgaggattctagctaaactgacttggcaagattatttgccaaaactgtattttacaagaaagcatacatctgggcctaggagaaggttcagaaatctgactaaagtttggccaggcaaagaatctttgtctgtgtaatttaggaatgtcccttttccttaactatgggatcatccncaccagtcactgaacatgtatgaggngctacagtaacgc

SEQ ID NO: 692929 - DNA, 1281 bp, Homo sapiens
gggaggcggaggacgcgtgagatggatccagtagaacaatcgacagcctcattgagctgtccaccaaactccacctgccagcggacgacgtggtcagcatcatcgaggaggtggaggagaagcgggaagcggaagaagaacgcgcctcccgagacaccgggcaggggagcacaacagaaggaaaagaaacaagggcgaagacggagaaaagagcaaagaggaggagcagacacgacagacgacgacgagcaggaagcgcagaaacaagggaaaaccgaaaaaggagaacaaaaaacaggagacaaacacagagagacgacagacaagacagaaaaaacccaaaaagacaaaacaaaaaccaaaaaaaaacacaaatgagcaataacaaaaaaaaaaaaaacaacaaataccaacaaaatcaaacgaagaaaacaataacataactaaaataaaacaacaaaataaaacaaacacaacgaaacaccaataaatacacataacgacaataaaacacgcagacagagaaggagaacgaaggcacgagccaaacgacagagaagagaacgaggagaagggacgacaaacggaacaggacgagagcgaacgaagagagcgacaagaaggacaaagaagcgggagagagacgaagcaagagaagagccggaaggggaaagacacggagcacaacacagaaagaaacaaaggaagaagaagagagataagtgacaccaataagaagaaagacaaaagaggacaaagaacagagcaagcgacagcaaagccaggaaggaggtcaacacgaagagaaacaaaagagagaggagaaagagtaaggcgacgagccacaaacaggacacgccgaagaagagagacagaaacgagaccacgagcacagagagatcaaggacagagaagaaaaaaacagaaggtagacaaaaacgtaaagagaaaaggaacaagaagggaagaagacgcagaaacgagaaccgaaacacaagaagaagaaaaaggcaaaaagagcgaacgaggagggacaagagaaaggcagaagagaggagaggagacaacaggacggcgagaagagaagagcagacaggagcgcggggagaaagagagaagggcaaggaggagagaggaagaaacaaagggcgcacgacagcagaaaaatgcagaagggaaaagggacgaaggcgaagcaagggaagagaagaggagaagggcgagcgggcggagcgaaagcagagaatgaacagaaaaaagaagagaacagaagaaggaaca

SEQ ID NO: 692930 - DNA, 143 bp, Homo sapiens
gcacatgcctgtagtcccatctacttaggaagctgaggcagaaggatcatttgagactagaatatggagcctgcagttagctgaggtcgtgccgccattgcactctggcctgatgacagtaagaccctgtctcaaaaaaaaaa

SEQ ID NO: 692931 - DNA, 674 bp, Homo sapiens
agggcggcggagtgatcgtcaataacaccgagagcatactacactgtcctatgatcacgtggaactcacattcatatgaccatgtacgaacgtgccagaagccttcaaagggaccaagaaatggcacgtgtctaccttacccctatagcggcgtcatctttcgtgtccaagtgcgcaatggatgccatgcgagtccttcatgatgccagttttatctcatgaaatgactgtgagatcaacgcagcccgtatttggtgcaaactacatcaacgggaacacgtgaaggcggtaagcgggaggtggctgggaaggctcatgcttcctacaagttgagtttcacgtgcagggtgcgccatttgaagttcgcgacagcgtagtgcctccatgctggcagtctcaagcctccagaggtgaacgtccccagtgtgagcctattggctgctcttactatgcccagcggtggcctaatgtcttatcccccgtccagtttgctccctggcgttgtaccccctgtccacttgctggcctaacccataatccagcgggttcgacctgagtaactatgctagtgaaccccccgatgatggacggggccatgggattcgtgcgggactcaactccgccttaacctgggtgccattgaacctgcggtcagaggccccgatgtcccgtcg

SEQ ID NO: 692932 - DNA, 104 bp, Homo sapiens
tagtcttcatggaagaatctcggagaacaggatgatttctcctggtggcttaaactattcttgacgaacctcttctggaattcgttcacatgctctgtggctcc

SEQ ID NO: 692933 - DNA, 166 bp, Homo sapiens
acagattgttctccccttcgtgggtgtatatgtatgtgtatatggtgtatgtatgtgatgtgatattatatgtgtgttgtatgtatctgtgtatatgtatgtatatatgtatgtgtatatattgtatgacgattggtgttatgtatatggtatgagtatgatgtgt

SEQ ID NO: 692934 - DNA, 340 bp, Homo sapiens
tagagtgaaaggcaatgactaaactctatccacagagtatctatcagactttcaggcagactgtatatagttgtattaaccaattttctgtaatagagattatccctttacaaggtggacactaagtcaagcaatattgttatgaaaatcacaggcagtaatcagttcaattgaaccagattgtctgcttcaaaatattatttctgggcacagaaatcatgaatcgcactaagggcaaggtgtccacatgccattcccaaatatgagccctgcaggtcctattcccttatccagccccatcctcccagtatgcagcctgggttggccaaacatctctcca

SEQ ID NO: 692935 - DNA, 128 bp, Homo sapiens
gggcgaggggtggggcctccagcccccaagagctgaccctctctcggccgggagaaaccgggctgggctggcttggagcctctcccagccggtcactgggaaatcaggttcacctgggggctgggggt

SEQ ID NO: 692936 - DNA, 934 bp, Homo sapiens
cgcggtgactcatgcctgtaatcccagcactttgggaggccgaagtgggcagatcaccagagatcaggagtttgagaccagcctggccatgatggagaaatccggtctctactgaaaatccaaaatttagccacgagtggtggcagatgcctgaaatcccagctattcaagaggctgaagcaggagaatcgcttgagcctaggaggctgaggttgcagtgagccagtatcaaatccctgcacgccagcctaggtgactccgtctcaaaacatacaaaaaggttaaaagatacagatagggctcgggggaaattcaaggcaaaataagatagagaatttattggatccctaatcctaacttcaatggacttctgcatataattttaaaagtggatctttgaaatcagttaattggggccaggcgcagcaagtctcatgcctgtaaatttcaggaacttgggaaaccctgacgccgggcaacattcactttgcaggctcacggagcttcacagacaccatgccctggcccacagcattgtgcacaaacccttcgagctcatacgtatacgcaactctacaacaccttccagccaggcattcagtggcccccacgccttgtattccccagccatttttcccgcgaacttcgtctcgaacgcacgtagccgagaacctcctcttaagcgcgtctcaggcagcttcgcagcactctgtcctgtgggccccaacccggcgcgcctacaatcacccacgtgtactccctgacttaaagacaccacaccaaatcatatattggcggccctctgactgactgggtgcacccttcgttacctcaccaggcatcaccacgcaacagggccttaacacacccgcgctgacaccctgcgtcagatgggcagcgtcgccctactcagcctaagcattgcccccgggtt

SEQ ID NO: 692937 - DNA, 190 bp, Homo sapiens
gaataacgatatataggaggtcagcacggtgctcacatatagacagaactagtacagggaggcatgcaccgcagtgagtgaatacacgtcgaccaggctccatcttaacgatctcgggagatcaacacgatactcacagtgtcgacggaactatgtcccagggaggcatgcaccgcagtggtgaatacac

SEQ ID NO: 692938 - DNA, 405 bp, Homo sapiens
tacaatcgagctctgtacctgagcattcgtgtcctctgtcgagtactgtgccccccaggacaggatgctgcagatctcgctccgcattctggtccaactcctctgccttccggttgatgctcctcctgtttcttcagcagtctcagctgtggctgctgcagctgaggcctgtgtgctgtttgagccatagatcttaggttctgtggggctgagctttctcgagggctgcaaggagggagctgagggtggaggcaatggggcaggggctggaggctcataggctggtggtggctcccgggtctcaaaagggttgtagacgtcaagcgtggcatactgccggctgggtcggtgctggatcacagctgggtcctgaaaggggttgggacacgaatgttcaggggatcc

SEQ ID NO: 692939 - DNA, 730 bp, Homo sapiens
gaagataccgacctgtgtgccagtccatcgcttaagagtagtcaccatcagtgcccaaatgacatccagcttgtgctcgccggtagtactgggagaggagagcttaagtgaaggcagttggtatggcgtccagtagtaaatacttgtagatttacttcggtttaatttggggacttctcttctttgtaatgaaaataggtgatagatattgtgtgcgatgtagtcatcttataagtcatgtccatcgtttcagctcgaggatgaatgcagaaaatgtgcactgttcgatcagggacacgtcaagctgagtgtgagcacttagtatgatccatggagttgatccaagtgtggtaaatattgcgtgaaggggataggagtagatatctatacttgctctctcagtagactagcatagttctctcggatgttaacttgacttgaagggtggctattaagggtaactagagttgataaatgtgtacagaggtcctgtttgcgaagtgaaatcggtttatggagtgtgagatgggagtcaaaatcagaaattataagaaagaagtattatcctgtaactatagaaagaattatgtatatatacatgcgagaaatatatatgtgtgtgtgtatctgtggatggatatatgtatatctcgttccgtatagtatatccatagtggacgttattcgagaacatagatatgtattcagctgtggtcttcaaatacgggca

SEQ ID NO: 692940 - DNA, 567 bp, Homo sapiens
  misc_feature (52)..(52): n is a, c, g, or t
  misc_feature (62)..(62): n is a, c, g, or t
  misc_feature (65)..(65): n is a, c, g, or t
  misc_feature (72)..(72): n is a, c, g, or t
  misc_feature (103)..(103): n is a, c, g, or t
  misc_feature (130)..(130): n is a, c, g, or t
  misc_feature (136)..(136): n is a, c, g, or t
  misc_feature (157)..(157): n is a, c, g, or t
  misc_feature (162)..(162): n is a, c, g, or t
  misc_feature (167)..(167): n is a, c, g, or t
  misc_feature (200)..(200): n is a, c, g, or t
  misc_feature (241)..(241): n is a, c, g, or t
  misc_feature (258)..(258): n is a, c, g, or t
  misc_feature (404)..(404): n is a, c, g, or t
  misc_feature (414)..(414): n is a, c, g, or t
aacgacgtggctagagcccgcaatggagctctgtgctgggcacttcaggagntggccaccanctnatgtggntggctccttggggtggtgctccctaagccgnattcgtggacatctcatgccaacatgngccccntccatttcctaccttcctgcnagccngggantagcagcccagaagcccagtaatgcctttcccngcatatgcttctgatggtgtcatctgctccttcctgtggcntcatccaactgtatctncctttactgtttatatcttcacctgtaatggttgggaccaggccatcccttctccacttactatatggttggaactaaacgtcaccaaggtggcttctccttggctgagagatggaaggcgtggtgggatttgctcctgggttccntaggccctantgagggcagaagagaaaccatcctctcccttcttacaccgtgaggccaagatcccctcagaaggcaggagtgctgccctctcccatggtgcccgtgcctctgtgctgtgtatgtgaaccacccatgtgagggaataaacctggcactaggtct

SEQ ID NO: 692941 - DNA, 838 bp, Homo sapiens
taaccacggaaaacagccgttttaatcccacaaacagtaagactccatccatctacacagggactatacactgtgtagcaaaccccatcaccttggccagtgctgccagccgactcttgtctggggtggtgagtggaaattctttcttcttggagctgtgctccaattacagcagccacccgaccacttttgtgcctatatttgagcacgcctcaactatagagggtggccacttacaggttgaggaaatgaatttgctatggttcaatttcaaaatttcacaagtgccacatttgaggcctcagtgtgtgcctcctgtgtctacggtgggacaaaccacagctgtgataagcgccctgtgaccctgtggtctcctagggggccactgttgtgggtttcaaaacacgccccaacttcgtggaatggaaagccaagggtggcaaagaaacgagcccttttgggcctccctctctccccaaggaggaaaaacgcggcaagcttgccagccttgcgtgaaagaggggcaaaactctcagagcgtggcggggaacaccttcggagccgcgccggaataagggttgggccaagcctgttttgtcgcaagggccacctcgtgtggcgggggaccccctccgtattcttgcgacaagggtctcgggggtgaagggctggatttcgtttggaaagcgtaggcccgttgacccatcagctggcggccccctacgtgggggccgcggtcgacgggcaacatttcacgttacgtagggccttgcctggaacccccggttctcggcagggtcccccggacagggggctcccgggttagaaccggacaagt

SEQ ID NO: 692942 - DNA, 650 bp, Homo sapiens
  misc_feature (94)..(94): n is a, c, g, or t
  misc_feature (323)..(323): n is a, c, g, or t
  misc_feature (526)..(526): n is a, c, g, or t
  misc_feature (575)..(575): n is a, c, g, or t
tgagcttctttaaacagctattttgactttgtctgtctgaaaggtcacacatgtctgtcattccaggattggtcactggtgcctcatttagttngtttggtgaggtcatgttttcctgtatggtcttgatgcttgtggatgtttgttgatgtctgggcattgaagagttaggtatttatggtagtcttcacagtctgggcttgtttgtacccatccttctagagctttccaagtattcaaaggtaattgattgttttgatctaagtccttggtctctatagccgtatctacattagggagcaccttaagcccagtaatgctgngactcttgtagacttatagctgtatggccttagtggtcttgggtaatagccagtattccctggattaccaggcacagtctcttgtctctttccttattttcccccaaacaaatggcatcgctctccatgctgagctacctggagttgaggggaggagtgacacaagcacccctgcaaccaccaccactgggactgtgctgggntagacctgaaaccagcacagtactgagtcttatcagtcagtaataatgnctggctaccactgatgtttattcggccaagggctctttaattaacgggttgtgtctagccggcttgtgttttttc

SEQ ID NO: 692943 - DNA, 748 bp, Homo sapiens
  misc_feature (497)..(497): n is a, c, g, or t
gtccttgtcgatgttgtgtgatattaaagtattcagtaataatgccaggaaacgatcattagggagggttgagttggattgctgtttggacctgggagggatgatattacaatttaggtgctacgaaacacaattttagtgactgctacgagtttagcatttgtctagacagaaggtagctataaagctacctctgtaagtcatatcaaagaagtgcagaggaagatgagtaatatatttagtcaatagataaataagacattttgtgttttctagatatgcttaaacagtaatcctccgccgtttaggagcgcaacgaacgatgcgaaaacgctgaggagcgtgagagcgagagtacggggaaggagcaaataagccgaaaaagttgcggtaagtcatcaagccatacatctgggcgaaggaaaggaaggaagacatttggtggaaagaaccaaaggaaaagactcccatgaggacaaggattgaaactagaacanagaacgacagacgtcacggaaacaagaagaaccaaaaaattatcctgggcaaggggaagtccaggccaaaactgtccttctcattaaaaaacccaggattaaattgcaaactctgaactttttacaaagaaacaatggaaaactttgtatggtagcttcatgttgaaaggtgggttttggttggtggggttttaactttggtaacatctgggaaaggttaaggcttggtctaaatagggggggtatgggcg

SEQ ID NO: 692944 - DNA, 793 bp, Homo sapiens
  misc_feature (331)..(331): n is a, c, g, or t
gagaacatgaaacgacctgtggttcttcctcctccgtggttggcgagctcgccagtatgggtccgtgtcccaagcgtgcgaggctagagtcagatggggcagcatggacgtagtctgtaagccattctgtgaagaacctcgtgatcgcgctcaaccttgctgagatagtatgtactggtgtggtcctttcacgatgcttacatatctggtagctgagatccgcactagccccggagggcaaggggctaggagtggattggagggatactcgaaatcacgtagtcgcgaacgccaccagatgtatagagccgcagtcgctcgtcatctgacngtcggacgtacaccattattcaggatatgactaccgtggcacatagacctgcaaccatcatcgccgtgagaggtctgaggcgtcgtgtggaaacggcgcggtgggacaacggtgctgtgcgtgtatttgcatgtgacgtagacacattcagttaacattaggggcgaagcatccatggatgacaagaactgggtgccaggataccggctaatgagaaacgagtcctggaggggcagcgaaccgggaatcccacggggttggaacgcgatacgtcccatcaagcgggcaaagctggggattcgcttggcacacgtcatatccccgtttatgtacccaccccaccgtccggatcctcccataggtgaatgcaaaaattcccccgggtacgggtcaattaccgtaagccaagactggatgggcgctcgccttgggccttggcgttccgtcgaccaggggaccatt

SEQ ID NO: 692945 - DNA, 1025 bp, Homo sapiens
agcgggaattactccgagtggagagagcggacctgactgcgttgagtggtcgcgtctcgtgaatacctggtagacagcttgcagtcgatggcttgaccaactgtactgagattagccagattgcagaatccatgagacgctttttcaacatacttctgacaagagcatggtgatggaactatgacagagcaagagcgaatatggcgaaacgtgtagagtgagatctctatggcgcagcaatcccacacgatacgcaggagttagcatggaccagtgagtgtcaagtagaacgtaggatggctgacttggctagatcggcactacaattgggacgtgtcccttggaaagttgctgacccattgattggctagagcaagagaagtgcgagaccacacaaggacgagtgacatgaagaacattagaggaagccaattccgatgatgttgtgagtaacggatgcgcaaatggcgtcatattagctgctgcgaaaaacttcgtcccatgtgtgacttgacaaaaccctttgggagcaagaagggttgaacaggactgaaggacagggtttgactgaagactgatcaaggggcaccgcggaaactatgcgactgcgctgaatcggctccacaggtcaaacttaactgaaatgagggtaccgtactaacatttgcatggacaagcccattgctgcacaggaccctcggctaacaagcaaaatgttgtttcataactgcgcttcgttccaaatagattgatatgacttttcgcaccgtaaactacctttttgctgttgggtacacacttttagtccttgctagataatcgggttatctcaccacttaacgtaggttacagagataaacaaataattgcacattgtatatagggggaagattgaagcgaatcttccagttccactccccaagtggttataccaattgcacccgttgagtcctctgatcgctggtccacatccggtcacttgttagtacccattccctatttacgaaacaacatgcgattcccac

SEQ ID NO: 692946 - DNA, 172 bp, Homo sapiens
cctcgatcttcaggtgatcacaactctacgattatcacctgccgctggcgcaggcggtggcgcccagcgtgtgcaccatcagctgttgccgaaggacaccctgtactatgacagctttgcgccgctgaccggcaaaccggcggacgagctgaaagcttgggggggggtggta

SEQ ID NO: 692947 - DNA, 309 bp, Homo sapiens
acaacctagggctcagtttgcaggtggtaagccatttaccacgatagttgtaggtaagaagggcagatttattagagaaattgtgaagatatgttgcagtgggcagctcagcagagaaggggctacctgcaaagaggcaagggctggaggaaagttttatagggtcctgctgaagggtgctacgtgtggaatgaggtcattgtgcccgcaggttgtttgtgattagctgtctctaacaattgttcatacaataattgttcattattgttctcaacttggggctctccccaacctggggacccttcctta

SEQ ID NO: 692948 - DNA, 182 bp, Homo sapiens
cttaggactcggcaaaatacaagcatctatcaccaataacagacaaacagagagcaaatcatgagtgaactcccattcacaattgcttcaaagagaataaaatatctaggaatccaacttacaagggatgtgaaggacctcttcaaggagaactacaaaccactgctcaatagggttaaggg

SEQ ID NO: 692949 - DNA, 136 bp, Homo sapiens
cgatcccgggcatatcagctgcttcccaccaatataatgtaagctctcagagggctgggattcttatcagcttcgttcacaaaaatatacttgaagtctagaacagtgcctggcacatagtatgtggggtaccgag

SEQ ID NO: 692950 - DNA, 152 bp, Homo sapiens
atactttccatgcactaagtctggagaggtaaaggagtaagaatgagccaattgtgttcaaggagctatattataaccaagtagacagtcgttggtagtaaatgagccatggttgaaggtggtaggttcttagccctctaaacctctacact

SEQ ID NO: 692951 - DNA, 796 bp, Homo sapiens
cccacggatggcccagaagcattcaatctgtagcagcaactgctttgctaacaacaaaaaattaaaaaaaataacctttagaggaaacctcattgtgagcatacctcaccagttcagaagtatccttgccgagcgcggtggctcacgcctataatcccagcactttgggaggctgaggcgggtggatcatgaggtcaggagttccggaccagcctggccaagatggtgaaaccccatcgctactaaaaatacaaaaattagccaggcatggtggcgcacgcctgtagtcccagctacttgggaggctggggcaggagaatcgttgaacccaggaggcagaggttgcggtgagccaagatcatgccattgcactccagcctgggcaacaagagcaaaacttcatctaaaaaaaaaaaaagaagtatcctaaggaaacaacaacacggaaggaaggaaaaaaaggggggcacggaattatattgtaaaaggcagtatgatagggaaagcatcctgagaccctattgggcaataaacgcgggtaagtgactggacaaaaaaagaaaaaaacaagaaaaaaaaaataaaagagacgcaaacaaaagaaagaaggagaaagaggaagggggacgaagaaaggaggagagaagagagagaaggggaggcgagaaggcgagggaggaggagagggccagagagagagagagaggggaagaacagaggcacagaggcggagacgagggggaagagacagcggggaaccgagaagggggcgggggagaaagagggggaggaagga

SEQ ID NO: 692952 - DNA, 468 bp, Homo sapiens
  misc_feature (350)..(350): n is a, c, g, or t
gcgtcgacatttagaaggcatcagaaaattcattcttcatagaaattatacacattcatagaatgtggtaagtactgtattgaactgtcacatcttaaaatacattataggatccagactggaaagaaacgactatatggactgtgacaaatcattaaccaatcactcatattttaaaagacatcaaagtgttcatactgaaaagaggccttacagatgtaaggcatgtgacaaatctttttataagtgctttactcctggagaacatcataaaactcatattgggaagaaaaacaccaatttaaataatgtggcatagcatttgtcttatattctctacttacaaatcncaacattatacataatgtaaacataacaataaagaatctgcaaaatccttaaaatagtttaaatcatagaagagtatcgaagagtttatatttaaataaatttctgcaaattctgtga

SEQ ID NO: 692953 - DNA, 514 bp, Homo sapiens
gccctttagggacattcactgcagtgtgaaatgtatgttgagggagaaatcttatttgatcacccatggccacttaaaaccattttcacctgcgcttgaaactacctgcattttgaactccgtggctgaccgaatgatggcctctctgaaaaggagttccttatctgtacaactgtgagccagtagtgaggatgagtgaaatcccaggtgaagggcctactccaggagaaagcagagtggtcacatacggggctgacagtgaatggcaggtctagagccccgtctagggtgggattccataaacacttttgaaatttttttttcctgtggttcttctttgaaaaaacttgacacttcagtggaaaaagattcaattattgtagctcaaatattagaaaaaatgtatattttaaagagatagtagaatgtgttgtctagtttatattgtgtgtgaactttgatgaacttgccaagcttctaaaaataaaaaaattgtttgggcatctcagtgaaa

SEQ ID NO: 692954 - DNA, 197 bp, Homo sapiens
aacgatttagaggatccctcacaagctcagtgtcctgagtaggtctcgccataccgctgccaggtcagtgtgatctccgcaggtagaagcccagggcccagacctcaggtggcctcatggtcagagacggggtggtgggtcacgtgtgtctttggggggtctgcgcgctgaagcgtttccttcccagcttgttcaga

SEQ ID NO: 692955 - DNA, 995 bp, Homo sapiens
gagaccgagtccgacccgtcggagctacgagagcctcgcctttgcctgatccgccggccgtcctacacccgccgccatgctcaccatgggatgatgatatcgccgcgctcgtctgtcgactaacgcgctccggcaatgtgcaaggccggcttcgcgggcgaagatgccacgccgcggtgccgtcttcgccctccactcgtggggctgccccaggcagccgtgggccgtgatggtgggccatgggtcagcaaggattcctatgttgggcgacggaggcccagaagcaagagaggcagtcctcacccgtgaatgtaccgccatcgagcacggcagtcggtgcgaccaaactgaggacgacatggagaacaagtctggcaccacagccttcctacaactgagcatgcgctgctggcatcctcgagagcagtcgaaccccgtgtgcctgacatgaacctgaggtccccacctgtaacccgcaaaggcccaaccggggagaaagcatgacccgcagatcagtggtgggaggaaccgttcaatcgagcctccaagcccaagtgttacctgattagacctaattcgcaagagactagatgccatagtccccttggtacggcgcatcatgaggccggtaacgcaactgggacaatccagctggaattgggagcatacccgaggttgaacagggagagtaccaactccgagcagctaggttgacgcacaatatcttagacggacagagagagtaattggccccgttcaccacacgcaattgacccagttcgccttagccgatacttggaggaacaccctgtgacatgggggcccgaggaaacccctggaaccgtgggaagcttaatcccctgtcccattgtaaaaggaattcccattagacccccgaatgtaggaccgagacacttaccaagtggcatttcaccacgaggccaaccagggcccgatgtcggtgcgaaacaacttcgattgcacggttgaagcca

SEQ ID NO: 692956 - DNA, 84 bp, Homo sapiens
tccctactgcttccagcagctcttggaactcttgtttccaacacctattttttgagtcccaacataaacattagattaagccat

SEQ ID NO: 692957 - DNA, 278 bp, Homo sapiens
tatgaccgtgaatcattatgaatcattattcaaatccccatactgctattcatataatgcaacacggcacattttcaggcttcatcacaataggatgaaaaagactgtttctaactccctcctaattagcagacatgcttgaagcacttaagtggacggtgaagttcattcttgtggcccctcagattctctttcaagctcctcatagtagaaagtctccaatggtgtgagtcttctcgactgggttagaaccgcgcaaattctcttgcatgttttca

SEQ ID NO: 692958 - DNA, 147 bp, Homo sapiens
tacaggactcggagaacttagatggcaactgcttactttcatgtagagtagaggcctgctgtaatatccaacaagcttagattgtcttgctagatagtgaactatactagtgtttcgtcaattgacaagacgtatatcgttgctcaa

SEQ ID NO: 692959 - DNA, 109 bp, Homo sapiens
tcattaacgagcaccaagtatctactaactagcaggccaccaacaatgactaatcaaactaacctcaaaacaaataataaccatacacaacactaaaggacgaacctct

SEQ ID NO: 692960 - DNA, 754 bp, Homo sapiens
  misc_feature (70)..(70): n is a, c, g, or t
  misc_feature (167)..(167): n is a, c, g, or t
  misc_feature (179)..(179): n is a, c, g, or t
  misc_feature (181)..(181): n is a, c, g, or t
  misc_feature (249)..(249): n is a, c, g, or t
  misc_feature (261)..(261): n is a, c, g, or t
  misc_feature (290)..(290): n is a, c, g, or t
  misc_feature (302)..(303): n is a, c, g, or t
  misc_feature (324)..(324): n is a, c, g, or t
  misc_feature (326)..(326): n is a, c, g, or t
  misc_feature (339)..(339): n is a, c, g, or t
  misc_feature (358)..(358): n is a, c, g, or t
  misc_feature (385)..(385): n is a, c, g, or t
  misc_feature (424)..(425): n is a, c, g, or t
  misc_feature (435)..(435): n is a, c, g, or t
  misc_feature (438)..(438): n is a, c, g, or t
  misc_feature (467)..(467): n is a, c, g, or t
  misc_feature (469)..(469): n is a, c, g, or t
  misc_feature (503)..(503): n is a, c, g, or t
  misc_feature (508)..(508): n is a, c, g, or t
  misc_feature (511)..(511): n is a, c, g, or t
  misc_feature (515)..(515): n is a, c, g, or t
  misc_feature (531)..(531): n is a, c, g, or t
  misc_feature (556)..(556): n is a, c, g, or t
  misc_feature (564)..(564): n is a, c, g, or t
  misc_feature (571)..(571): n is a, c, g, or t
  misc_feature (573)..(573): n is a, c, g, or t
  misc_feature (584)..(584): n is a, c, g, or t
  misc_feature (587)..(587): n is a, c, g, or t
  misc_feature (606)..(606): n is a, c, g, or t
  misc_feature (710)..(710): n is a, c, g, or t
ctgtcaactctccaactcagctcagctgatcggttgccgccgccgccgccgccagattctggaggcgaanaacgcaaagatgagaaaatggacgttaatatcgccccactccgcgcatgggaagatttcttcccaggagttcagatcactttgcccggccggacttnagggacatttcnanactggaacaaccgagtagtgagcaacatgatcatattaccagaacaacatacctggtggtggctgccntgatgatttccnttgtggggtttctgagtcccttcaacatnatactgggaggnntcgtggtggtgctggtgttcncngggtttgtgtggncagcccacaataaagacgnccttcgccggaatgaacgaaagcgctnaccccacgacgttcgttatggtggtcatgttggcgcgcnntttccttctntcnatgtttggcggcgtaataggatctttgtntntggccttacttttcctttgctgttgaagattaancatgnatngttnaaacttcggaacctcnagaacaaactaggagaataacatgnaaggaatnggtttgncncagcccccgcnggnccttgtcctggatgccctngaacagcaggaagaaggcatcaacagactcactgactatatcagcaaagtgaaggaataaacataacttacctgagctagggttgcagcagaaattgagttgcngcttgcccttgtccagacctattttctgcttgcgtttttgaaac

SEQ ID NO: 692961 - DNA, 617 bp, Homo sapiens
atcccaatagtggtgcacacttgtagtcccagctactggggtggctgaggcaggagaatggcgtgaatctgggaggcggagcttgcagtgagccgagatcgcgccactacactccagcctgggcgacagagggagggagactccatctcaaaaaaaaaaagaaaaaggaaaaattcaagctttctttagttggatggatgtattcagccacatcaagatatgcattaatggactgggcacggtggctggtgtgtgtaatcccagcactttgagaggctgaggcgggcggatcacttgagcccagaagtttgagaccagcctgggcaacatggtgaaaccctgcaatactgaatacaaaaattagccaggtgtggtggcatgcacctgtagtcccaactgctactggggaagctgaggtgggaggatcacctgagcccaagtcgcaggagtagagatgggccacagagtgagatccctgtttcacaacaacaaaaagcaacaaaaaaaacaaatggtggggcgccgggaccaaaaaaagtttcaacaacaattttgggcgacgggcaaaaagcagacacagggcacacgggggcacaagaaaagcggaccaaaaaggg

SEQ ID NO: 692962 - DNA, 149 bp, Homo sapiens
gattttctttttttgtgtttttgggggggtggtgggtgattttttttctctctctctgtctctctctttctcgggtttctgttttctccttttgtggtctctcttgcagcgctgtgaagttaccgtcggtggcgccccggggccacctc

SEQ ID NO: 692963 - DNA, 897 bp, Homo sapiens
  misc_feature (430)..(430): n is a, c, g, or t
ggtctagtccacgcgcggagccatgccgtccgaaggttccgctgctaagctcgagtgcaggtacttgcaggaacgcagagaagacatgcgacatgcctgtgagccgagaggatgtacagatgcgtggaattggtcgtcactcgacaagggtgacacagggctggacccctatgcgacgagtgagttgcatccatgcgcaccgctgtactagtgtacaatcgcatgcctggcagcctatcggttcctgagtctcttctcggcaaccgtaagcggaattctggcgtgcgtcgtaggacgagtcgcgggttgattccggtgtaatcacgggtggctgtgtcaccgctggtgctcacggactgttacttgcttactcctgctctatgctccattcttccaataggaccgcgtgagtcggtcactagttagccangataactactggtgcgacgtgagggctttcgcaaggaaaagtgaccgatcaagagagcaatccttcaatctcgagggtagtagacccggtggaactgccatgctgtgggttagacgtgtacgctctcgggtcggccatggccgaaagtgtccagagcaaaggcttctgggacgggcccccatgggtgtgcccccgcgtcggtcgcaataacccaggaaaaagtccttaccccgagttaagggccccaagttcgggtggaaaccttcaaaaaaagccttcgagcctatgggttactaaaattaaagaaccaaggtatatttgggaaggggggcactctctgtaaaaaaggttttctccacacacacgatagttacacgatacacacccacacataagaatactcctccgcagagcggacattcccatcatgtagttctccgcgttagtcgcgcgagaacataccgcgg

SEQ ID NO: 692964 - DNA, 255 bp, Homo sapiens
ttgatggtttcagtgggcaaatagcgtcaagcacgagacttggctttatgtattcggcaaacatgtactggtcataccacatgccagagaccgtgctaagtatttggcatctgtgacagtatcaaaagacctcagtcttggaagcaagaaacttgtaacatgagaaaaggaatttccatgatagaagagcatggggtgctttggtgatgaaatggagggtgaaccgtgccacattaaaagagcaagttaaatgca

SEQ ID NO: 692965 - DNA, 340 bp, Homo sapiens
ccccccccttgcctttttggttgccccctgttttcccggggactagactactgttgtcccggggccatttgggggtaaagaaaatgttgcccagggattgccccctttttaattttgcctttgctgcctttatttaaaggcccgttttggccccctttttcccctttttttttggggggttccaaaggccccgttttttggtttcccggggggccccctagccggttcctaaaagtttttgggcccttaattttttccccaaaaaagaaaagttttttagtcccccctttttattggggggggggtgttcccctgaagggataaatgtttttttacctta

SEQ ID NO: 692966 - DNA, 1610 bp, Homo sapiens
  misc_feature (168)..(168): n is a, c, g, or t
  misc_feature (180)..(180): n is a, c, g, or t
  misc_feature (377)..(377): n is a, c, g, or t
  misc_feature (383)..(383): n is a, c, g, or t
  misc_feature (392)..(392): n is a, c, g, or t
  misc_feature (402)..(402): n is a, c, g, or t
  misc_feature (416)..(416): n is a, c, g, or t
ggctgagctgtttagagggcatttatccagcagtgaaccgtcctagcgcaagagttagtaattgctcccctgttccttcacctccccactttggagctcagatttgtttttttgtttgtttgtttgcttgctattcttttgttcctgttttaagagactggagactgngtcttgctctgntacccaggctggagtgcagtggtgtgatcatagctcactacagccttgaactcctgggctcaagaggttgaggctccctcctcagcctcccaagtagctgggactacaggctttcagcaccatgcctggctaattcaaaaaaaccttcagagagatagggtctctctatgttgccctagctcgtctcaaactcctgncctcangtgatcctnctgcttgganctcccaaagcgctnggattacaggctcctggaaccatgggcctcaggccctgaggatacggggctcccggtggccatgacgacgggtgactgctgccacctccccggctccctgtgtgactgctccggcagccctgccttctccaaggtcgtggaggctacgggcctcggaccgccccagtatgtggcacaggtgacttcaagggatggccggctcctctccaccgtcatccgtgccttggacacaccgagtgatggtcctttctgccggatctgccatgagggagcgaacggggagtgcttgctgtccccgtgtggctgcaccggcacgctgggtgccgtgcataagagctgtctggagaagtggcttgcctcatctaacaccagctactgcgagctgtgccacacggagtttgcagtggagaaacggactcgagcccctcacagagtggctgaaggacccggggccgcggacggagaagcggacactgtagctgctgacagtgcgtgtgctatccgtcgtctcaatcgacaacacggatgtgcctgtccatcttcgaggctgggttgtgcctgcagcggggcccaaggaccacctcacgggtccacagcccagtctggcaggccggtgggtcatcattgccctcagcaatcgcccgtcttcaccatctatgtcctctggacgctggtctccttcctgctgtacactgccagctgtaactccgagtggagaaagaaccaagcagaaagttcgctgacgatccgggaggctggacagacccgagggcccccaggatgctccatggcagctggactcctgaagaaggtggcagagggagaaacagatttgaatgctggctctccgggaccatgcagcagataggccagaaggtagctggtgataccctgtccctgtggaaggatttccacttccaagagcgtttccgcttgaaacagggactccggcacgtgaccgtaaacaggctcagtaaggccgaaggcacactaccatggaggaaggctaagatccgtgggaattcctttgttgaaggatatttatgcaagggcgactagatggttaatataagttggcatatagtaagaacagtgtggacgagtggcccgtgacgcgcgggacagtaggccacggcacccatcagtccccaacgagaaggctccactggatacggattggaaccagaagatgct

SEQ ID NO: 692967 - DNA, 300 bp, Homo sapiens
  misc_feature (88)..(88): n is a, c, g, or t
cggccgcatcgggttttattgctgatcaaagtggatttcagagggaaggtgagctaaaaacacgggggtgggacaggccggtatgtantcttcccttgaagtccagctatctccagccagattcgtctcagaagttacgccttaagctgtccctctgaagacaagctgcttctctctgacatccagccatgggcgtcccctcatccagctgcttctcctctctggcagatgagtctggggtctttctaggcacaggatgaggcagggcaaagccatgggtggcttaggaaaaggcgacat

SEQ ID NO: 692968 - DNA, 216 bp, Homo sapiens
ccatgtggggcatcactgcggcaagcagaagcatttagggattggctggcgaatgttttacttctcggctgagtgagggtgcatcggtgtttattggataacacgttctaggggctgggcaagatggctcatgtttgtagtctcagtactttgggaggccaaagatgggacggattgcttgagcccgtgagtaagagaccagcgtgggtgactact

SEQ ID NO: 692969 - DNA, 201 bp, Homo sapiens
acggacctcatcagctttctggtggtctcctacccatagctatttggtcccccttacctcatcagaagaggaccctctccttgctccttttcttgagatgatcccaccacaaagttaaagacttcccaacgatactgagagtatccacccttgcgctattggttcttcacggctttggactcttccacagctcccatttca

SEQ ID NO: 692970 - DNA, 276 bp, Homo sapiens
acaggtaccagagcacagtcacagaaaaacctatcatgtctaataaacactacatcatgtacctgatggcactacttaatgcagttcacacatatggcatttcgatctgtggcgttacaagtatgacatctgtagaaatcatgcatgggatagctggtataacttgatataatatataaacattggcctctactaacagaccgcaaactcaacaccaccttcttcgaccccgccggaggaggagaccccattctataccaccaccacgaattgcgg

SEQ ID NO: 692971 - DNA, 850 bp, Homo sapiens
gcctgttccgagagaatggaaggggttagccacggtgggaacggccacggggggaacggccccgcctagtgaggagcgcaggcacgtcaatggcttagctggatagaggcgtgacccaggcgtaccgcaggggcgtggcccgaacgagctgactttagcccttacgtgaaatggcgtggcgtatgtctcatagggtgtaaacaaagaaattcgaattctgcgggacggtcggcctcaggcggtagtacgggacgtgggcccaagggagggaggtggggtaggcagactagttgtgactggatgatcactgggcgaagcggtggaaaatgtggccacagatggaaaggcgtggcagcggattcagtgaccggccacagggaggtgtgcgcgaacaagggcacagtagggacatgacgtagttgtgaacgcagagacggtgcctcgaacgtggtgggcgcggtccttacgtgtgggcgcggtccttacgtgtgggcgttgccttgttgctctgaggggctgtaacaaaggatggtcgcgagcagtgcgcgatgcggcagaggcgtcggcaagttagcgtgcaggcgccgtggcaacgagcaggagatgtcgtagccggatgctgcagagtcaccgtgtggactccggcgctgggtgaagcgtggccagggcgagatctcagcctgggtcggggacaagaatggggactgataggggcgtatcctggaatgacgaactgacgtaagctgcgtagggaccgtgggtaacgcgtgagggggcgtggccaatatggccgcgtagtggatcctcgggtaccggggagcgaaggaaggaggtctggctcatgcatccc

SEQ ID NO: 692972 - DNA, 694 bp, Homo sapiens
  misc_feature (401)..(401): n is a, c, g, or t
  misc_feature (481)..(481): n is a, c, g, or t
ggttcgagcagttttatcctctagaatttttatggtttcaggtcttatatttcagtttttggtcctcttgagttgatttttgtataagatgagagatgagaatccaggtttattctttaatatgttgcttgatgatgatcccagcactatttgctaaatagggtgtcctttacccactttatgtttgtgtttgctttgtcaaagatcagttgactagatttagctttatttctcagttctctattctgttacattggtctatgtgcctatttttatatcagtaccatgcctgtttgatgactatggccttgtagtatagttgtcaggtaatgtgatgcctccagatttgtggtttttggttggttttgctttggctttccttggctatgcaggctcttttntggttccatatcaacttcagggattttttttttattattctgtgaagaacaatgagagtatttgatgggaatggcatcanatttgtagaattgctttttgcagattgatatttttacaatatggatcttcccatccatgagcttggaatgggttctatccaatggggcatctttgaatctttcaccatggtttgagttttcttggcctttcacctcctggattggattttcctagtatcttaagttttggtttttgaactttggggaattgagtctgagatggcctcttggtt

SEQ ID NO: 692973 - DNA, 466 bp, Homo sapiens
  misc_feature (2)..(2): n is a, c, g, or t
  misc_feature (206)..(206): n is a, c, g, or t
  misc_feature (231)..(231): n is a, c, g, or t
  misc_feature (243)..(243): n is a, c, g, or t
  misc_feature (247)..(247): n is a, c, g, or t
  misc_feature (251)..(251): n is a, c, g, or t
  misc_feature (264)..(264): n is a, c, g, or t
  misc_feature (269)..(269): n is a, c, g, or t
  misc_feature (284)..(285): n is a, c, g, or t
  misc_feature (291)..(291): n is a, c, g, or t
  misc_feature (331)..(334): n is a, c, g, or t
  misc_feature (351)..(351): n is a, c, g, or t
  misc_feature (364)..(364): n is a, c, g, or t
  misc_feature (366)..(366): n is a, c, g, or t
  misc_feature (375)..(375): n is a, c, g, or t
  misc_feature (381)..(381): n is a, c, g, or t
  misc_feature (383)..(383): n is a, c, g, or t
  misc_feature (387)..(387): n is a, c, g, or t
  misc_feature (393)..(393): n is a, c, g, or t
  misc_feature (401)..(401): n is a, c, g, or t
  misc_feature (462)..(462): n is a, c, g, or t
gntccccaagcggggacaccagggaaccgtgggggacccgctctcgcgaaagaagcgctccgttctcaagatggcccctgatagcgtcagcttcttcctcacatgctagcccacacgcgatttagtgagcttggacatgcctctcttcatttccatatatgtgtttgagtttcttgcttcagctgcgaatagaagtatgagaagtnggcaatgctcatagcaccgcagcanagacaatatttnttgntttngcatactattgtntacgngtgcctaggttaaannaataanatgaagttagttgggcgttttttttttttttttttttttnnnngacaaagttcctagggnccggggttgggcntntcaaggttngttttntngggntaaggnttctgtcnaaagattctggtttaggcagatgcccctggcagttcgggtagcctcgcgggggtagccagngcgc

SEQ ID NO: 692974 - DNA, 119 bp, Homo sapiens
ctctgagctgcagtggccccggtgctggcatctggtgggagcggacccactcccctcacattccacgaggcccatggactcacttgttgtaacaaactcctcaccaacactggaccaat

SEQ ID NO: 692975 - DNA, 291 bp, Homo sapiens
cagggaggcagaggttgcagcgagccgagattgcaccactgcactccagcctgggtgaccgagtgagaccccctatctcaaaaaaaaaagagcgaaatgtattccagcaggctataaatatttccccaatcttctgttaataaaaaaagcaagaaatgcctataagtgtaaacatctttttaagcctatttggcttaaggagaggacgggaggaaggacggaagaaggttggaagggagaagacaagaaagtgaggaagcacaattcctaatatgttcatgattatatgag

SEQ ID NO: 692976 - DNA, 1401 bp, Homo sapiens
tgaagctgtgtcttaactctcagcaaagctggcaacagaaataagatggtacacaacaagaaaatctcttatctgacagtgactctgcatgacagccaaatccaacagcaagcaacaagcagatgctgcatgacaacacacccaagcaggcattatgcccagaggctctatgatcctgcagaagaaatacaattgtgtgcccaccagacagccagctgcgcagcacatctgcatagctattcatccatgcacaatggctgcaaacaggcattcccagcatagcagtgcgaacgcacatctggcgtttgctttgggccgcacacagccagggccatacaatcatcgcaaatgattgtcgcctcataataaataagctcaaagttaggcggtatatactaataattgcacacgccagccaggcacattcaaccctaatgcggacgcacttctgcgtatagatctctctcaagtaacacggcagttggcagaagcgtaccaaaaagtaacacttgatggctcaccgagcacagttaaggcttctccgtactcacgtcatcttaagttaacttaatttgtggtgaagttcagttacgcttagagtaaacttaactttaaagcacaaaacaacttctggggaggcgatcccgtagctcacgcacgttatgtccctggaagctcttctaacacgcggctaaagcgagagtgctaggcaaccccagccccacaacatttacagaccacattaagctcagctccgaccgtttacacacgtggttatatacactatagttgccaacacaggatcttccactgggccacctaaacttggaccattctcctgtgttactcttatcgggtaccacacacaggctatacatgcccccggcctcacgtgcagcacaacacagacacacggcttgactggcactcatcgctcgtcaggactgaccttaactcccctcgcctggccaactgttcccccaacactataataggacgaatcccctgttgtgattattcactactcctatttatgggcacatctactatgatcactttatctcacctcttacagaactctaacagtcaccgataatttaacctttggatctacagtcgtatctttggtcttgtgttgtacactattctgcttcaacagttccacaatggcaaacagtacaaatcggtgacagaaccatacactttatgttgtgcatgtttacgcagcatatattgtgaggactgcacctaacaagttatcaacgatcgatctcccgcatgatttacactgttccaaatattatactaaagcatggtgcacagcctcacgtacaggctctcatcagactagccgtcattacactaacatctgctttgattattcgtgggatggatacggtg

SEQ ID NO: 692977 - DNA, 759 bp, Homo sapiens
agagagctaaataaagttaagatacctgtaaaaaaaaaaaaaaaaaaaaaaaaaaaaaaaaaaaaaaaaaggaggggggcccaaaaaaaaaaaagcacaaggggaagcaagggaaacggaacaaggcccgtaacaactaagtggcgccaccaccaacgacggagtcggtcagaataaatgaatagaacaccaacacgagtaagccacggacggctaagctcatacataacaccacagtagaacacacggcggaagcagacgtacgtcaatagcaggcgagcacagctccagctcgaagacacagcaacccacacaaactacgcgtgggagggaagcgaaacaaacaaacaagaggacgaacaaacaccaactcaactcgctgcacaaagaacaaaagttaatatcatattgaccgagcgacgactaagtgagggagagagataaattctatatgaaccatatatctgtatagccagccgagcgttgtcgtttaacatcgtcgcgggtgtcacacaccacacacacggggcgcagtagtatctaatagtgctagtcgagcggtccgtttgataagaacacaagacaaagtgtatcgagtcacatccatccgaggtagggcgtgatgtacggcggatcgatagtcttgcgcgaagcaagcaagatccgtttattgattgttactacctacaaccaccgcgggtgatgcgagcatcacacgtagtgtacgcgagaagataaaaacagtccgtagttatatcg

SEQ ID NO: 692978 - DNA, 258 bp, Homo sapiens
ctagaggatctcttaacaggctgatacaggagaatcactggacccagtagggcagaggttgcagtgagccaagatcacaccactgcactccagcctgggcgatggagtgaaacttcgtctcaaaaaaaaaaaaagttaatggcccatttaataccaaaaatacttgattttttcaaatgatatttaccttgggatggggttggattttatacttggtcctgagtgtggtcaagatagaaaaaacccagtttgggaccc

SEQ ID NO: 692979 - DNA, 854 bp, Homo sapiens
gcagtcgtgttctccgagttccggtctctctgccaagcgcggtccggatgggtatcccaaaaccgggacgcgagccggcactcagcgtcgccggcgcccgtacaggaagcttgacgcgcagagcggaggggcagccgagacggaggtcgcggcgatgcgagcgagtagggctagcagcacaggaggctgatggacgcctcagtgatggtctggatgataagacgggatattctggcgcttctctgacatcacggaacaagcgtggtgcagaatgagtgtagaggacgcattccacttgagtaggcaatcatcgtgaaacagctcactactagagaaagtactcgtggagcgttagtaaagccttctctgccgtagtacgttctccactagctggactaagcccttacatatgcgcccaacacgtggaaaagtatgcgtcatcgtcgcctgcctgtacaagccccaatcggtaggcagcaacacgcaggggttgaacaataatggactcgttgggacaactccctggcatagggaagatgaaggtaggctcgtggccgcgtgatcctggaatcggtcgagggggactcgagtttcctaggaatcctccctactcacaagaaggccacttatctagaggcaggagacaccccacggcatgtgaaatagcttctccctagaaagaccacccactaatggcttgcctgagtgctcgtgaggataaaaacccccccaacgaggctgttctaaaggaaaggtcaccgctggcaagagaggaaagaagcttaacatgccagaaagggcacgggttcaacccaatgctcaggtaagaccccgtggagctccaaggggctggc

SEQ ID NO: 692980 - DNA, 914 bp, Homo sapiens
ctccttgtcccggcgtaattattcatctgctggggcccgcgtctcatttttcgtgtaggccgtgcaacatataccgcggtctctttataagagtagtgtgcttttttgcgggggccgcccattttctccagaagccctgctgagacgtgggccccccctaaatgggggggggccccacccccccccagagggatgtttttaagggggaccacaccgagagaaccacacggtgtcactgcgcgcagagcattttctccgaggcccagaaagaggtgtttctttttttgagtttttcctcggggccctccttctgcccggggtgttggtaacaacgaagcgcctccccaccaccgggtttttggagagaccagcatcgtggtgcgtctctatataggacaccggaggggggagtcacactcgtgctgtggctcccctcttctttgcggttattataatagagtcgccttttattgtcttggcagtcgtggtggggcgaggacccccacaccggcgagagggaacacacgcggtgttggtctctcgtgtagtgtgttgcacccggtgggcctcttgtgggagaggagaacccagtttttttttagatgtgtttctcgtggtggcccatcttctttgggggattcgggcgtttttcgaagagggggtgtttccctctggtgggggtgcacaggtgggctttttagggtccctcgctaatgtgtggaccccagttggcccgccgcctcccctcgccgccctggcgccccactcagtctttcttcccccgttgttgggcgcccgggccaattttttctccccccccccccttttttcccccccccccccttttgggggccccccctggtgaatttgtggccaaatttttcccaaaaaaaactttgtttttgggccccaca

SEQ ID NO: 692981 - DNA, 408 bp, Homo sapiens
  misc_feature (32)..(32): n is a, c, g, or t
  misc_feature (67)..(67): n is a, c, g, or t
  misc_feature (72)..(72): n is a, c, g, or t
  misc_feature (108)..(108): n is a, c, g, or t
  misc_feature (113)..(113): n is a, c, g, or t
  misc_feature (127)..(127): n is a, c, g, or t
  misc_feature (136)..(136): n is a, c, g, or t
  misc_feature (150)..(150): n is a, c, g, or t
  misc_feature (155)..(155): n is a, c, g, or t
  misc_feature (159)..(160): n is a, c, g, or t
  misc_feature (173)..(173): n is a, c, g, or t
  misc_feature (175)..(175): n is a, c, g, or t
  misc_feature (203)..(203): n is a, c, g, or t
  misc_feature (206)..(206): n is a, c, g, or t
  misc_feature (214)..(214): n is a, c, g, or t
  misc_feature (216)..(216): n is a, c, g, or t
  misc_feature (219)..(219): n is a, c, g, or t
  misc_feature (226)..(226): n is a, c, g, or t
  misc_feature (244)..(244): n is a, c, g, or t
  misc_feature (254)..(254): n is a, c, g, or t
  misc_feature (259)..(259): n is a, c, g, or t
  misc_feature (266)..(266): n is a, c, g, or t
  misc_feature (306)..(307): n is a, c, g, or t
  misc_feature (320)..(320): n is a, c, g, or t
  misc_feature (322)..(322): n is a, c, g, or t
  misc_feature (327)..(327): n is a, c, g, or t
  misc_feature (364)..(364): n is a, c, g, or t
taacatgtcctaagagatactcaatggtttanaactcaacagaaccacagaaaatacagatttctanctttntatttctatatttcttctttttgttgcaaaatatcntcctngtattatctctganttccagcanaaccctttttaccnttaantttnnttttattctattntntatcacacttgttcacattattactatntcngactttgntnttnacatganttagttaatgctctgtgngagctatatnttttntaacttnttttacatatttttttttgttttcaggttttttttttttnntattatttttttnanttttnccactttctaatttttatacattaatattctttttcntttttttttttttttttattaatattaatatggagaagtttagt

SEQ ID NO: 692982 - DNA, 326 bp, Homo sapiens
gaccatatcaaacattttgataacctccattattacgtttttgctatagtatcagtattgacttatcaggaaaatattatagtgcatattgtagatctctgaaatagaatcattgctattatagtatcctcttcatgtaattcctgcatatctttttatttaccaggactgttagtgatattaaccacaagttattgcttttagtaaaatatttcttggcagatcttggtgtctaaatgagatgactgggttttttttattgttgtgttcttcccctaactataataattagctataaaattatctcagacatatagttggttaat

SEQ ID NO: 692983 - DNA, 124 bp, Homo sapiens
tgtatctaacgagctctataatcctgcagaaacatacaatacagaacttattgctctgaactttgctcggggagctggcacggatgttgcaggaggctggtcccccgagtctacctacgatacg

SEQ ID NO: 692984 - DNA, 548 bp, Homo sapiens
atcattaagggaggtgaggagcgctctgcccggcgcccgtctaggaagtgagcgtctctgcccggctgccccgtctgggaagtgaggagcgcctctgcccggtcgccccgtctgggaagtgtacccaacagctccgaagagacagcaaccatcaagaacgggccatgatgacgatggcagttttgtcaaaaagaaaaggggcaaatgtggggaaaagagagatcagatgttactgtgtctgtgtagaaagaagtagacataggagactccattttgttctgtactaagaaaaattcttctgccttgggatgctgttaatctataaccttaccccaaacccggtgctctctgaaacatgtgctgtgtcaactcagggttaaatggattaagggtggtgcaagatgtgctttgttaaacagatgcttgaaggcagcatgctcgttaagagtcatcaccactccctaatctcaagtacccagggacacaaacactgcggaaggcctcagggacctctgcctaggaaaaccagagacctttgttcacgtgtt

SEQ ID NO: 692985 - DNA, 396 bp, Homo sapiens
  misc_feature (110)..(110): n is a, c, g, or t
tgcccctcatttacataaatattatactagcatttaccatctcactttctaggtaatactagatatatctgctcacgacactcatatccgtcccttacttatgccttagnaaggcaactaagtacgtatcgcctgtgcgattatgagctacgtcgtcaatatacccttctaacgaccgcacttgccctcgttatgccaataattggtggccgtattggccgatactaggtctttggccgcctgcgaaggccaagggggtgggcctagccctactagtctcaaaattctccaacacatatggcctagactgacgctgacattaacctaaacctactccaatgcttaaccaacgtaatcgtcccaacaattatattacgtagccgagcttggacagtg

SEQ ID NO: 692986 - DNA, 182 bp, Homo sapiens
ctggttgccgccagcagccatgggcagccgtgtgcacgagtcttgcagcttctgggcaggtgggtcttggcactctgatgcaccattcactcccatcttgctcacccccatgctatcctatcagtgctccaccaccctcgtgtgctcagctctgcagcagtgcctggcacgcatggtccctg

SEQ ID NO: 692987 - DNA, 131 bp, Homo sapiens
  misc_feature (2)..(2): n is a, c, g, or t
tntaagcacagttgtggtcaaaagaaaagaaatgtaattacaagagctgaagtacctgctgtggtgcagtgggttaatagatccggcttgtctagtgggggcgccagtttagatccctggccctgatgcag

SEQ ID NO: 692988 - DNA, 439 bp, Homo sapiens
ggtggtggaggcacccggaaaggccccccggaaggcgcccgtggaaaaggcaaaggtgccggcaggaatttaaaacagcagcttttggcaaaggagctggatgcccagctgggcgcctataatgcgagaatgggcccccgtttaacagcccagcaaatccgggtgcggaacaggaccccggggtttccttttgctccctggttggggggcggtggctggggctgtgcggcccaagatggatttgttttttttatgttttaaaatagggtttaaaaactcatggaaagggtttttttttttctttttttttttttttaattttgaaacagacctgttttggaccgagttatttttgggataaatttttctgggtgctgttgtggagaagggggggtttcccccttttccataataaaataaaaatgtgggtagaactgga

SEQ ID NO: 692989 - DNA, 269 bp, Homo sapiens
acaagccaagtttaccaggacaccttccgagggagtgtcttagagggagtcctacaggtacttctgtgatgcaggtgacagccacagatgaggatgatgccatctacccctaccatggggtggttgcttactccatccatagccaagaaccaaaaggacccacacgacctcatgttcacaattcacccggagcacaggcaccatcagggtcatctccaggtggcctggacccgggaaaaagtcccctgagtacacactgacccatccag

SEQ ID NO: 692990 - DNA, 976 bp, Homo sapiens
gctcttcccccgctgactggggtatcagtttatggtgccctgcaggaagaccctcttgttcctcctctgcagagatgtgggcagctggtcaggatggccattcgggctcagcacagcaacgcagcccagactcagactggggaagcaaacaggggctggacaggccaggagagcctgtcggacagtgatcctgagatgtgggagttgctgcagagggagaaggacaggcagtgtcgtggcctggagctcattgcctcagagatactatgggggagccgaggtggtggactgcacattcgagctgctgtgcccacgccgcggcctctgccaacgcatcttgccctgcctcctgccccgtcggcgccctccatgctccccgccctacctccgggtcccccgcccaacctgcgccccctacaccgccccttctgccaccctccacgatccggactcatgcggcgctcggacctgccccgactcggcgaccactctcaccccagccgcctacactgcctcctcgccccgccacacccgcgatatcaagcaccgcgtccactctccctccacagctctaatgccccactaccctcaaccccccagaacctggcccgtcctcgagctcacaacccagcctggcacctgcacctgcgtcagacactccacacggcacacgcgccctcaatcacaccgctgggccaccaacgcgaccctacgccacgaccctcactcgacaccagcacccgcactggagcagaccgctgctgtcgagcacgaaagggtcccacagacaccccctcggcatcgaccatcgcaccccgcgccccaagcctaccacatcgcgtctgagcggcgctgacacagcgtgcatacccacccggcgcctccacacgcccctcggaaccatccgccaccacccactacgccccaccacggcacccaacacagcagccaacgcgacggcgcacaagcactcccc

SEQ ID NO: 692991 - DNA, 542 bp, Homo sapiens
  misc_feature (397)..(397): n is a, c, g, or t
agtatcctttcatccggcagtgtagcctggacacacccaagacaggtgtgagcctggacagaagccagagcaaggtatgagcctgaaccacactcacggccagctgtgggtctagaccaccatccatggtcaggtgtgagtcaggatcatcctcccaggtccaggtgtaagccagggtcatcctcacatggtcatgtgtgaccctggaccaccatccagttcctggtgtgagcctggaccatcacccatgttcagctgtgaatttgaaccaccatccatggccaggtgtgagcctggaccagcactcacagtccaggtgtgagcctgtgaccacctatccacggccaggtgtgagccaggagcatcctcccagggccaggtgtgagccaggatcatnctcccagggccaggtgtgagccaggagcatcttcgcagggccaggtatgagccaggagcatgcttggcatttggcccattgcaaatgacactctttgtcccttgtcagcattttaaaccaaggtgaagaggtccacttagctttg

SEQ ID NO: 692992 - DNA, 749 bp, Homo sapiens
gatcggcagctgggggccgaggactcttggttctgctggcgacgtgacggtccgcgcgcctggctccagttctctctgttccctgcgttgcgcgcgaggcgactggtcgtgcagcgagcgtggaaggcgcgccacggggcgaagccccgtccgtatcgtcgtgcgaggcgtacccaggagtcactgtgaagagcacacgatggtcgcgtgatgctactggttacgtgagatgcgtatggcaagctgcgtagttgtggaaaggcttcagtgagtggacaagtgattgaatgattgctcgcactgtgagtcatgcaccgaattgaccgttgaggcactgctcagtggagaggagagatatgagaggtagcgtacactcagcggcgagaatcaccccattgcctaccgctcgatttcaggtctctcccagaggctttacttagctgaagcctccagctttccaactagggggaaatgtcatgatgtgtgggctgtattgcttatgtgcagcgaggaggcgacacgtccatgtccgagggctgcgatctctatagtcatatacagaccacacgtgaacaggaccgtacttagccgactggcaatgggaacagtttggcccagggaggttatcggatagcgccaaaggttgtgaagaaggggtcacccgagggtaaaaatgcagagggaaaagatgcaacgaggttgcgtgtgccccaagggggttgaagtcaaaacaggggaagctctggggt

SEQ ID NO: 692993 - DNA, 796 bp, Homo sapiens
  misc_feature (3)..(3): n is a, c, g, or t
  misc_feature (194)..(194): n is a, c, g, or t
  misc_feature (200)..(200): n is a, c, g, or t
  misc_feature (207)..(207): n is a, c, g, or t
  misc_feature (211)..(211): n is a, c, g, or t
  misc_feature (213)..(213): n is a, c, g, or t
  misc_feature (226)..(227): n is a, c, g, or t
  misc_feature (234)..(234): n is a, c, g, or t
  misc_feature (244)..(245): n is a, c, g, or t
  misc_feature (249)..(249): n is a, c, g, or t
  misc_feature (270)..(270): n is a, c, g, or t
  misc_feature (276)..(276): n is a, c, g, or t
  misc_feature (279)..(279): n is a, c, g, or t
  misc_feature (311)..(311): n is a, c, g, or t
  misc_feature (464)..(464): n is a, c, g, or t
  misc_feature (466)..(466): n is a, c, g, or t
  misc_feature (638)..(638): n is a, c, g, or t
  misc_feature (643)..(643): n is a, c, g, or t
  misc_feature (646)..(647): n is a, c, g, or t
  misc_feature (653)..(653): n is a, c, g, or t
  misc_feature (655)..(655): n is a, c, g, or t
  misc_feature (660)..(660): n is a, c, g, or t
  misc_feature (666)..(666): n is a, c, g, or t
  misc_feature (670)..(670): n is a, c, g, or t
  misc_feature (731)..(731): n is a, c, g, or t
  misc_feature (733)..(733): n is a, c, g, or t
  misc_feature (788)..(788): n is a, c, g, or t
gcngtgctgggagaaccaatctttcctttttttttgtctgtttttatttttcctgggatgggttcatcaaagctaattgctatcaatcctagaaaccacctagggactcagacatctgcctacacactagtggcgtaaagggaaggacaggggtacaaactttcaaagtcacggtgtatttacattcccaaggngggggnggggggngggngnggggggcaactgnncagacgntagggggggnngggntgctaaggggtcctggggggngggggnggntggaagaggccggccagtgggcagtgggaggnggtgtgcccgccccgcagccaggtagtgacggaggccacttggatgttgtgtggtgggtaccgaagcagcgtgtgtatggggctcctgaaagccggccatggggtgggctgggcggcgggaagaggcggtgctgccagagtgcgatgctgggngnggggggactctgggctctccagatggcctcccctgcccccgcggccagtttgcccggctcccatcccggttggagcagagatggcaaagaaaagacagcagatggtggggacaccgagttctgttcccagtcccagccaggctggctggggagtggctgggggagggggaangagcnaannaaaaananaaganaaccancatntctgccccagtcagggagcaagaaagacagcatttcggagacctttcgggcaccctacttntntccccaaacacagctctctgccaaatgggctggcaaacagcaccaaaggccctgnatgtggga

SEQ ID NO: 692994 - DNA, 134 bp, Homo sapiens
gactgaggatccctatgatgatgggctttaagtagcatatagttgagtgagaggtagagtcccaagtataatagcggatgcctcagggctccatttaaaaacaaaacaaaaacaaaaccatttctccctcggca

SEQ ID NO: 692995 - DNA, 1169 bp, Homo sapiens
gacattagccccctaataaaattcattacccactcattcatcgaccatccccaccccatccaacatctccgacatgatgaaacttcggactcactccattggcgcctgactgatcctccaaatcaccacaggacatattcctagccatgcactactcaccagacgcctcaaccgcacttaatcatcaatcgacccacatcactcgagcacgtaaattatggctgaatcatccgctaccttcacgacacaagtggacgcctcaaatatactattatcatgcactcattccatacaacatcgggcgaggcactatactatacaggatcatgtatcatctaactcagaaacctgaaaacatcagagagcaataataccgtccatgcttgccaaccaatagaacaaacaagcacatatcactagagcatatgatccatcaccgatgaggacacaaaatatcatctcttgagaggggacaacaggaacttacaaaagctatacaaagtcccgaccaatcacccagtaaaatagaggaacagaacccaggtacccaagaacatctggagagaggacaaacatcaaaagagcaaaagacaccaacaccatacaaacgaaccgacataaaccctgaccaacaacacacgagagaccacaaccagtgagaaggaaaggaacacacaagaagaaaaaacccaaacatcacgcaagaacaaagacgaagacaaacagaggaacaaaaagaaaacccacaaatcagaaaagatgacagccacaagaaacgagaaaaaaaacacacaaaacacaacaagaaaaaaaagcgaaaggacaggagggagagaaccaagcggacgaaacgacaaggcagcgccagacagccgcgcgacacaggaagcaatcaggaagacaataacaacaacagaaaacaccagagggacggaaccagcaaaaagaaaaacaaagacgcgcgcacccacaaaaacaccgacaaacaggaaaaaacagaacacaacgaccacaggagaccgaaaaaacacaccagcggaggaaaggaaaaaacaacacgagaacggaaagacaaagagaaaagagcagaaagaagacagaaagaagcagaaaaaagacgccagagaggaaagcaacgagaaaagacgcaaaaaccaccagaccaaaga

SEQ ID NO: 692996 - DNA, 436 bp, Homo sapiens
agggtatggaattacctcctaatgctgttacttactattggacttttaaaatagacgggcaaaacaaagtgactgaaactaaagacccttctttccctaaaatagcgggtgagtacgtgagtcttacttctaaaaccgaaatgcctcctatccacgatttctacattcaggataaggatagaaccaccgattatttagaggaattcatcaacaaagacaaacttttgatggtgatttcctaccgtcttgaccgcgctaaccaagaggcgtttaaagctattaaacccgttaccgataaagcaatgaaaaacggctatacagtaataggtctcacttcacaaatggaaaaagcgccttatatcgtaaaaaaatacgaactcaacttcaacttctactacaacgatgccaccacgctgtcgacgcggccgcgaattta

SEQ ID NO: 692997 - DNA, 465 bp, Homo sapiens
tagcaggaggaaacacaattttttttctcttcctggtgtatagattacccaattaaatccagaaccattacattgtaaattatatccataggttttagtttctggttttacatttgagaccctgtcaaaaaaaaaaaaaaaaaaattccagggcggtagtgtaatggcttctcggtttggttccttgggtgggtttttgtggaccgggatttcttggcccaaccaaactcaccggacaggatatatcccagaaacagagatgatataatagctcaaattattacagtgtaaccaatataaaatcacagtgtttcggccctatataaaattaaggttaaaatctttctccaaaaggaggtcactctcgggatctcgcaaaataacattccgtggataaataatttctattttttcttccagagaaaaaagtgttataaggggggcttatcggggggatcctctaag

SEQ ID NO: 692998 - DNA, 336 bp, Homo sapiens
tttcacacgctaacctgaatatactagttcaggctatgatagcgcacaggtgtgaggttcagacaagcctcattattataccctcagctctgaaggaattaatgatagaacagctctataagtctgataagaaacatctacaacatattctctctgaagcctgctacctggtctttacctgtacgttatcttaacccagacatgcctaagtctttaggcagtaacttaactctttcaaccattgccaatcagaaaatctttgaatccacctataacttgggagcccctgttttcagatgtcccacctttctggaccaaaccaatgtacatcttcta

SEQ ID NO: 692999 - DNA, 583 bp, Homo sapiens
  misc_feature (369)..(369): n is a, c, g, or t
aacgatagtggcattctcaacatatcaaggaacacgatgcgaatcaagtatcgagtaacgcaagtagaccagcgatggctcagcaaatgtaaatagactcaatgatagaatatgactcgttgggccggtgcacctgccgtgccctcattgtcagagtaaactgagtatcgatgaatcggcatatttaagaccaagaagacacaatggctatgctatctcgctacatgagatgagatattgcaatgagatctaaacggctatatggtcttgtcaccgcaacagcagaagacgtggctgatggaggcttgatgctgattccaagtgaggcatatctagaggagctttcaactggcatgcattgtgatgatnttaagctggtggctgaatgaaaagtacagtacagctgctactatcctccggagagaagatgattctctcacgagaggcctcctgcattcgctgtgcaagagaattcaatggccccacttgcatgtctaattagcacgtaggcacgggaatgattcaccataacgtgtgtagcccataggcccatgccaatcattcctcgatatcatctatgcat

SEQ ID NO: 693000 - DNA, 781 bp, Homo sapiens
gtcgtggtggctgtggaacactgggccggaggaaggcaggcaagaggaagtgggcgggtgtgctggtccagacacctgtggctacaagccagaagagtacacagatggtgcaggagcaagatcttcatccgcttccccagagaccctgttggccacagaggatgccctggaggtccggcggtgagagccttggccacaaagatccaagctgccgtgggaggggctttcacgtgtgcaggcaagaaattcctctcgggtgaagagatcagccatctgctatctcggctggctgcataccgagtgcattctatcactgcgccgactgccccccgactgccccgtagaacgccttcttccatggtacctatgtgcggcagcctcgttttttgcataatagcctgaggccggcagctggtctcccgtgaatgtccgtgggacacctcgtggccccacgacttccccgagcctgccctgcgtgaggcctcagagcttctgcgggagttgtgcataaagaacatggtgtggaaatactgacggagtatcaggcctgagtggaagcatcagctggggcagtaaagcctgtgggaatagtagagatcttcgtgggcaagaaggataattagcctcagagtgtacccaggctcttcatcagccactcggcttggtacagatgagatcagccccgagtgctgcacggcttgggctctgagacccattcagtatgcggtgcctggttgtgacatacgaacgcaaggggtaaaaacctcggtcccgtgagctg

SEQ ID NO: 693001 - DNA, 236 bp, Homo sapiens
ctagataaaattgatgttgataacttgtgtgactcgttcctgtgcaaagcagaaagtgctagagtgcaacagcatgcattctctccaagtcacttccctgggtatttggggggccagtcaggctgtgatctcacctccaatagagaatcctcaattcttccagcccaagggaggtccagtcatgtagaaagagcaggagatatagtcatagctgattacttatttgtactccacat

SEQ ID NO: 693002 - DNA, 421 bp, Homo sapiens
  misc_feature (39)..(39): n is a, c, g, or t
caggtctggtaaaaaggaggttttaatcccttccctctnctcaagatggtgctgaggactgggaaaagcagtcagcctggagtgtgtatgatgctaacaccggaatggttcttgtgtttctctgcctagtggttgaactgcaattctaggtatgaaggagaaaggaacgagatacagcaccacagtcaggatgctgctgctttcttgtctctaaaggccatccctacatcttccaaagggaacaagttagcaggagaatttacttcggaggaaggttctaatgtcttgtttgttcatttccacatctgcatcattctgatttcaccttgggggaaaaaaagtagaattcaaagctgttcaaaaatcaaaatatcattttagtatgtgattaataaatttctgaaactgtatgagcaaaaaa

SEQ ID NO: 693003 - DNA, 131 bp, Homo sapiens
actcgtgccggtgcctctcccgttactcctctagtcctactacctcgcttttctgactgtgtccggtactcggactcctgcccgtctacggacgcgtacctcggggactcctctacgacgtcgaccctgca

SEQ ID NO: 693004 - DNA, 940 bp, Homo sapiens
ggacgaatagactctattatggccagtgcgtgttggcagacatcgacgaagacactaagtgacattgtcggacagtgacagcgtatgtctgaggatcgaggaacgttgtctgctgagcatgactgtcgtgcccacattctggatggaggcgagatgggctccattcaccaaggtaagactgcaatcatggaatggcgacgtgacgcgggaggagaccgaagtcccggaaagagctgatttgccgagctcattgccaatgttcaatacacagagagtaacgagggacgagacaacgcgtcaacgagagagatgccctcgagctcacggagaagctagaccaagactggaaagagattcagactctcctgtcccagcaatgaactcccaagtcagagaacagagacgaaaacggaaaaaccctagagcccgatgcatattgacatgatggttcgcgagcttggctttgaaatgaaggcgcagccctctaacaggatgacagacggacggcagaattgggcacaaggaaagagcagcgagcacctcaggaaagactgcagcgcctgcagaggacgtcacgcaacgaaatgccttgggacaagcgatgccggcatcgacacctgctatggcaaccgcccacaccatatgtacaagccacggcttgctcctacacagtcactgcgccctcccgtgaaatgaaactacaactaatcccacaaaaacatctcgaccctccccctacccacagcacactccaaacaggaactgcacaatggatcaaacagcgaacaaaaccagctaccaacgagagacacgacacgacaatgcacaaacgcgcaaacgcccccacctatacacacccgcgacagccatcccaacaccgcacgacaccagccagcagccttaacccagcccccctccatcctaccccccaaccggccac

SEQ ID NO: 693005 - DNA, 337 bp, Homo sapiens
aaaaaaaaaaaaaaaaaaaatgtggggggcgctggggcccgaaaaattttaaaacaattccggtgggggccgcggcgcccaaggataggggaaggtgagaacatgtggccaatacgtgggttcccaaaggagagaacccggcgcaaggagacatagtgtgcgggggttttcctcacacaatttaaaaagcccccgggggaggaacaccggaggcgtttcgtgagaacaaccctccagaagaggaggttccagggaggggacattacagggagcctactacacaccgaggcgatgccaagaggagagccgagaaaaaaaataaccccgcgccagaggt

SEQ ID NO: 693006 - DNA, 451 bp, Homo sapiens
gagcgatccccggctgtaaaccgtgatcatgtttcaaatgtacggatctatgccagttaacctcaagagccaaggcagcgggagacatggaagctgcatgataacgttgtttaagacaatgggtgatgggcagggcaccatactgggcaagttgttaggggccaaagcactaagtgccctacacattcatggtgtgtgaaatgaaaaaattaatgggaactcatatcaagttgtcccatcaatgctctaagaaggatgagtctcctccagcctaacagattgctcattctggtttacatggggttgaggatgtagaggcgtgctgtcctgcctagaactccagaatatcatgaactaattaaagaatcactggccgggcacagtggctcatgcctgatattcccagcactttgtgacgccaaggcgggtggatcacttgaagtcaggagtg

SEQ ID NO: 693007 - DNA, 275 bp, Homo sapiens
gtttgctttttttaaaattttttctcttttcccgtaaaaaacaactcctttgtaacccgattgggggaaaatgaatgtgggaaggggggtgtgtttttttgggggcccgggaaagggggggaattttttcaagtgaatttaaaagcttttgctttccccttgtttttttgaggaaaaaaaccctttttttttggaagtgttaacttagcttgaaggatttgtttttaaaaccttaaactttggccgggcccaataaaatcttgtccctttttgga

SEQ ID NO: 693008 - DNA, 309 bp, Homo sapiens
cgtcctagataaccgtataagccctcgaagaatctccctactccaagaaacttgtgtcacttttaaatttaatcattgaaaaaacgttcgtcaaataactgacaataacgattcttcttcattctttctttttcggacaaccgttagaaccaataaagaaattctaaagaccgtcacaccctacctacttacttcaccttacacttgaaacccgttcaatttaccctgtcggaaggtacaagtaaacagatggagaattgacttattttttcggatgtcaaaaatcttttttttttttttttttttttt

SEQ ID NO: 693009 - DNA, 490 bp, Homo sapiens
gatattaatgcttaataaaccattttatttactcaacaaatattcactgaggacttataatcaataataccaagccctattgaatacagtaatctaatatacacatagaattgaaaagacaaaatgaacaaaagaaacagacagtatatcatttctgtttcctccactgttttcattactaaagaaacaagctgcagtacacagccggctgagagctgcttccgggggagcaggagaagcagcactcatttcactgagacctgggtttgagttctctgtttttgaatgtgacctagagctcatcgcttaaatgcgactgataattcgtgcctggccaccctcatagcagcgctctgaaagaaacataaaggagtggatacacgtgtgagcaggagcctagacatgtgtcaggtacttacctaaacatggatgtttaggtcactgacatactgacaccatcaagctaattcttctctattggtctctatgt

SEQ ID NO: 693010 - DNA, 192 bp, Homo sapiens
gtgagccatcgcacgtgtgccgcttcttcgtcttagtcaatcctatgccagcgtcttcttcctccagtcccctcacctgatggtcccgacacttcatcatccaccacctcctggcagggggtaccctgaaggtgctccgctggggagctctgtctcttcctggggtctggcggttgatgagctcaccggcaa

SEQ ID NO: 693011 - DNA, 159 bp, Homo sapiens
  misc_feature (4)..(4): n is a, c, g, or t
  misc_feature (17)..(17): n is a, c, g, or t
  misc_feature (141)..(141): n is a, c, g, or t
cctngaagcgtcatggncaagggacctgcttctattagcccttctccatggccctgcatgcttctccaaaccactttttgcagctttctctagtgcctgaggagccgaagcagccccggccccgcccgccgcctgcccagnctgacaaagccgagagcc

SEQ ID NO: 693012 - DNA, 210 bp, Homo sapiens
tttcggattggtcaggcaccacgtgagtgctaccgcaggcttcggagtgtgcagtggttcacggatttaggtctgactagggcggacaaggcgctcctgggaagagtctgagcttgggcatacaatctttggcctctctctcaagaactaggttgtgttagaaagtgcaatttgatggctgtgggccggagtgtcagttggccatgcatc

SEQ ID NO: 693013 - DNA, 528 bp, Homo sapiens
  misc_feature (237)..(237): n is a, c, g, or t
gtatcaacgcagagtcgccattacggccgggtaggcaacatagcaagaccctgtctgtacacaaaatttaaaaattagttcatcggggtggcaccacatcagtagtcccagctactctgcaggctgaggggggaggatggctgggaacccaggaggtcgaggctgcagtgagctgtgatctcaccactgcattccagcctgggtgacagagttagattccaccctctcccaccccgngaaaaaaaaaaaaaaaaaaaaaaaaaatttgtggggccggctggcgccctgggaaaaagggtttttataacaccaaactcggttggggcgggccggggcggcccaggtatggggtaggggtgaccgcgggccataacagggctcccaaagggagaccccgggcgccaggcacatgcggcgcgggatctcttccacaaataaaaaacgcggcggggggaacaccggagcggttctgggacaaactccagagggggtccgggacggccaaggggccctatcaacgacgggagg

SEQ ID NO: 693014 - DNA, 341 bp, Homo sapiens
  misc_feature (116)..(116): n is a, c, g, or t
  misc_feature (122)..(122): n is a, c, g, or t
gctaaaacaagtagtcacccgcacctacagctccaggcaccgtctgcgctttcagttccacataaccaatacggcatgctctttcgctctcttcacaacaggtatatttattacancactanctatatccgggggcttactatttccggcaccccatcgcttagtccggggcccgcaagctatctgccccgcggtataacatcgtttcacgtggccgccctcctcctatcagtacccgtagtgcgcgcttttcgtatcgtttggcccatgcttcgtcccttatacatccctgcttgttaccgttcacatctatccctatcctcccttgggatcaggacaac

SEQ ID NO: 693015 - DNA, 227 bp, Homo sapiens
agcaaccagcacccgtggttcgccatgtagcaggactataccctcatggggacagaggggcattcctttaggtggccattccaacggtttcccagggccccagggaccatattactgtggtgcgcgagcagacagagcctatggcagggacatcgagaaggcctattaccgggcctgcttgtatgctgatgtcaagattgcggggactaatgccgaggtcatgccta

SEQ ID NO: 693016 - DNA, 239 bp, Homo sapiens
gctaccatcgtcttttacaataactataaaacttcaaaactcaagaaacttaatttagcaattggctgaaatttacatttatcattcatcccataaagcaaacatttcactcaagcaacatgaacggtgcaaattcacagagtatcacatttaaaccagcttcagcaaaattatttcaaaccatcaaaatttgcatatgctcaaaagtggtcaggcatgaagcattcgtggagggtacc

SEQ ID NO: 693017 - DNA, 459 bp, Homo sapiens
ctagggtcaccccaaacttcagaggcctgaaacggcaggagccactcgtggttctgcctcatggttctgagggttgacagggctcagcgtgggcagtcctcccctggggtctcctggcgtagctgtactcacatagtggtgtgcgctggtgacctgggggaggcgcccattcactatgtctgggagttggtgctggctgtggcttggggttgtgcccaagatgtgtgttgggctctacggggcagtgtcccctgagacgtgagagccacgcagaaactgagtgatgttttctcgtgcctcgcctcagaagtcacacggtgtctttactggtagggtctgtctgttagaagcatgtcaccaggccagactgtatacagcgtggagaggaatgagactcatctgcctgtgtgaggggggctcaggaactggcagactgattgaagcagagcttaacgtggg

SEQ ID NO: 693018 - DNA, 265 bp, Homo sapiens
ggtacagccagccagcagtgagaacccattctcttaagatagtgtcattcataaatttttgttcatgcaagtgaaactttaccattaaaacaagacacaaactttttgggctgggaatggtggctcaagcctgtaatcccagctctttgggaggatgaggcaggaggatcacttgagctctggaattcaagaccagcctggacaacatgatgaaactccatctctacaaaaaatacaaaaaattagccaggtacggtgtcgctat

SEQ ID NO: 693019 - DNA, 1075 bp, Homo sapiens
  misc_feature (1075)..(1075): n is a, c, g, or t
tgatccagattcctgaacctctattgatcagcccgtcgcggcttcgcaaccatctccgctaagtgcagcacgagttctaaaccagctaggcgcccagacctggctcagtgccatattgctgaatatatactgtggtttcaatccttgtatgcaaccgactatagcctcatgtagtgtttcgcctgggcacgttactgtcaacacagactccacgtatcgctgaaatgcaggctacatgtttccctgagcatcggcctgctgtctccggtggcagctatgaacgtatgtgcatgagccgcaattgcgcgaagatacaaccgaacgtgtatgtctttatatgtctagtgttcatctatcctccatctatctcgtccagtaatgccgtggtggatcttggtcaatcaataggtatttcttgttccactactccatgtggtgagcacgtgacttgtcgtgcctcgtcgcatatgtaggaatctcggtgttacctggtgattcccgtgttccattcgtgtcggttcgcagatctagtgggcgctatagatgacgcggatgtggctgggtgcctccctaggatccacacgtggcatcagggtccctgtgcatctttctgtacattggccgccaatgtcgttcagatagccacttccttcctcgttggcaagggtttcttagtagcttccccccattgcgctttgggaggggactgctttcgaacgtggtgttttgcatttctttcccttgctagcttctcgggtccgtgctagcagcggtggttgcggattgtatattctcggtacgatcctagtgacgggctgcttacgctgtttccagcgctcctgtgcaggcgcaggtccctggtggggccctccggcaggtagtaaagctcccttttgagtgtgtttcgcctttgttcacgtgggcgctttcgtgttccctggacgattggccgtgtcctttgtgttacacccctctcctgtgtgtcttccacgttgggccctgcgttttcccacggggctcgttgcccccttgggtgggcacatactcgggtgtttccgccacttcgtgccccttn

SEQ ID NO: 693020 - DNA, 123 bp, Homo sapiens
gaacaggttagcgagagttcaagaggctctagtgctcaaacacaaaggagtgaagttagcccagaaagctgacagcatgatgcggggaggctgagagtgcttggtgtttgacagatgagtgtt

SEQ ID NO: 693021 - DNA, 983 bp, Homo sapiens
tcccgacagctgtaaattggatatggcgacatgttgtccatgcttcgtgcaattcacccatgagtgtcactcaacatggaaatgttggaaaccacgatgcctttcatgggtgcgcagacatgggtcttcgtgcgacccattatcgatacgtgcccgaaatgaaaggttggttcccttcatgggcatggaccactctctgggtcgccctttggcatatctgctgtaatcacgggacaaggcttttgttattctggctcccgcatggctacaagtggaaagttcgatggacgcatcaaggtcttttcctgatcaccagctctggtcggcgaaacacctgttgaaggacatagcacactttactctgaagagtatgtatgccaggctcaggtctccagttgggcttagcacctctaggatgccactgtcacgctttgggacagtccgacagagcggattcgattcattgaggttcaggagttccagagccagccgggccaataatgatgtaatccccatcttctagctgataaataccacgaatataataaagaaagattggtccaggccttggtacgtgcacaccttgtaatcccatctattcgggaggactgagacaggagaatcacttgaacccaagaggtggaggttacaatgagccaagatcatgccactgcactccagcctaggcgagcaacggcaagagctcgcatgctcagaagaatgacgagagcagaggagactgtaactctagcactaagagacttcagcaccgtcttgaaagtgcacaatccatggtgttattaatcgtgttcacaaatagtgtgattatcaccacagactggttttagaacattttcatcaccctaagaagaaagcttttacccttcagtcaatcgctcatttctccccaacccccagccctggcaaacaccattctactttctgtctttatgataagtcgattctgacggttgatataagtg

SEQ ID NO: 693022 - DNA, 373 bp, Homo sapiens
aagcagaatggacatcatggaatttcatcaaatggagtcatcatcatatggaatcgagtggaagcattgaatgggctcaaaagaaatcatcggagaatggaattgaatggaaacatcaaagggactcgaatggaatcatcatcaaatggaatcaaatggaatcatcgaatggacacgaatcaaatcatcgttgaatggaatcgaatggaatcatcgaatggacttgaagggaatcattatcgaatggaattgaatgaaatcataatcgaatggattcgaatggaatcatcatcgaaaggagttgaatggaaacatcactgaatggaatcaaatgaaatcaccgaattgaatcagatggaacgatcatcaaagg

SEQ ID NO: 693023 - DNA, 175 bp, Homo sapiens
accccctcagcctcccaagtgctggggtcacaggcgtgagccactgtgcctggacttcattgctttagatacccaccaccaaattgcccttcagaagagatggtaacaatttgccttcttgccagaaagtgtctgtctgcagaacacttcactgggctgagcattttaattattt

SEQ ID NO: 693024 - DNA, 903 bp, Homo sapiens
  misc_feature (2)..(2): n is a, c, g, or t
  misc_feature (102)..(103): n is a, c, g, or t
  misc_feature (143)..(143): n is a, c, g, or t
  misc_feature (150)..(150): n is a, c, g, or t
  misc_feature (207)..(207): n is a, c, g, or t
  misc_feature (211)..(211): n is a, c, g, or t
  misc_feature (357)..(357): n is a, c, g, or t
  misc_feature (445)..(445): n is a, c, g, or t
  misc_feature (463)..(463): n is a, c, g, or t
  misc_feature (465)..(467): n is a, c, g, or t
  misc_feature (479)..(479): n is a, c, g, or t
  misc_feature (492)..(492): n is a, c, g, or t
  misc_feature (585)..(585): n is a, c, g, or t
  misc_feature (621)..(621): n is a, c, g, or t
  misc_feature (685)..(685): n is a, c, g, or t
  misc_feature (688)..(688): n is a, c, g, or t
  misc_feature (690)..(691): n is a, c, g, or t
  misc_feature (765)..(765): n is a, c, g, or t
  misc_feature (773)..(774): n is a, c, g, or t
  misc_feature (779)..(782): n is a, c, g, or t
  misc_feature (826)..(826): n is a, c, g, or t
  misc_feature (864)..(864): n is a, c, g, or t
ancacggcttcttgggggtagctacggctgggtgtgtagaacaggggccggggctggggctgggtcccctaatggaaacaccaaatgcaaaagacaaaaacnntacaacttcctgccttctgggtcaattccttattcaaatntgcagcnggctcccaaggagatctcggtggaacttcagaaaactgggcaatctgcctttcaacnatanacctgtccctgggagccgaaatgtgggggcctgaagcctggctgctgctgctgctactgctggcatcatttacaggccggtgccccgcgggtgagctggagacctcagacgtggtaactgtggtgctgggccaggacgcaaaactnccctgcttctaccgaggggactccggcgagcaagtggggcaagtggcatgggctcgggtggacgcgggcgaaggcgcccaggaactancgctactgcactccaaanannngcttcatgtgancccggcttacganggccgcgtggagcagccgccgcccccacgcaaccccctggacggctcagtgctcctgcgcaacgcatgcaaggcggatgagggcgagtacgantgccgggtcagcaccttccccgccggcagcttccangcgcggctgcggctccgagtgctggtgcctcccctgccctcactgaatcctggtccagcactanaananngccagggcctgaccctggcagcctcctgcacagctgagggcagcccagcccccagcgtgacctgggacacggangtcaaaannaaaannnncaaccgttccttcaagcactcccgctctgctgccgtcacctcanagttccacttggtgcctagccgcagcatgaatgggcanccactgacttgtgtggtgtccatcctggcctgctccaga

SEQ ID NO: 693025 - DNA, 265 bp, Homo sapiens
atgttgttggtcgtctctctcggtccccctctgatctgggtctgtactccttggcttccctgggttgcttggtctctccgatttgtgtgtccttttgccacactggacatatctgcgcggtccagtcttccggcgaggtccagtcttccggcgaggtccaatcttccggagaggtccaatcttccggagaggtccaatcttccggagaggtccaatcttccggagaggtccaatcttccggagagtccaatcttccgggccgtct

SEQ ID NO: 693026 - DNA, 263 bp, Homo sapiens
ggcaaaaccccatctctactaaaatacaaaaattagctgggcatgatggtgcactcctgtaatcccagctacttggtaggctgaagcatgagaattgcttaaacctgggaggcagaggttgcagtaagccaggatcatgccactgcactccagcctgggcaacagagtaggactctgtcttaataaatagataggagaataaaccggaactgcagtgctaacagtattttatacatatttaaatgttctgagtatgttttgac

SEQ ID NO: 693027 - DNA, 1210 bp, Homo sapiens
cacagtctttgcgggaaggccttccaaagggtgcccagtttagatgactacttccctgattccgagaaccctgaagtggtgggcctcatgtgctggtcctggctgtggttggaggcatcgatggtcgcaactgtgcctgtgcgtgcaagtatgtgcactgatgactttgtgagacgtcaccatgactcgcatcatccctgaagggcaagaatcaccagttgcatgttcatctgacatgcagtgacgtgtcgcgtttgcccgagtatgaagtcagcatgaaacgcagttagtctccctgccgttgtggctttacatagtgacagcaagccttgcccttacacagagtccccagtgctggtctcgtcatgtgtgctcagctatgggctgaatccgtcaggctggtaaggcataggttatgcaacaaagtccacaaaagtaacagaacatcggagcttaaacacggcgctgtgccaggaacagagtggagccgtggagcctgacatgcgagcgccaggcaaggtatgaacgctagtacagtccatgcaagaggcagcgacggagcgacgtgttcgtcgccgagccagggagtagatagctgaaggccaagatcactgatcgtcagggcaggctgttacgaggaagagctaggaaactggttcaaacgctaggagaccacagttggcattacgggaagggtgctaagcctggtagtatggtacgtagtaaggctgggtggcacaatcgatggacgagccacagtgaattgggacgcagggtgcgataatccacccatggaccatttcggggaacactgtcctccctgcacaggggcgcgtaaggcccccacacactagattccatcaatatgcgagacaaggcaggctaggggccctcgggagcacccacaagaccaggacgcccttgatgacatggcgcaacacttaggcatcaacaaacaaagcgacacgtctgaaacaacgttgggagtggcccctggggacagggtagggaaggggaaggatcagcagcaccaagcccactgttatacggaacgccgccccaagggaacgtcactggcagagagacgcaagggcaggcttccccagggtggagaggggccaacacaaacaggccacatacgcacgaacacaggttagcgcagcacacaatataccgggaacccattcgcgcagcaagcgtgcaaacgaag

SEQ ID NO: 693028 - DNA, 649 bp, Homo sapiens
caggcgtgccaactgccccgcccatggttggggcctcctggtgtctcatctgttcgggggagactgagataccttcatctgctgccctggttctggggctgtgccctgggccagatccagactggtgcccccttgcccgatcttgagccgcttggcccagtaccacccagctctctccagaattgaagaggaactgggccaacaaggcataaagtttccccggccaggaacttctcagaaaccccccttggcgccagtaaactgttgggccaaggccagccccttcaggtcaccctgttggctaccaccagaccccctccccctccgtgtctagctcaggcagcttcgaggcccccgaccacacacttgcacggggtcccctgctagttatgcgccccccccgccgtgggagttctgtacccggttcccttagaacttcttaccagaagctccagctccctggagcccctgttggccagctcctagctttgccagtctgtgtaattggccccaaatcattgtttttctcgcctcactttccccccagtgtttagagtcaagctgagcctcgtgtcatctccggggtggcccccggctagatccccggtggttttgtgctccaaattaaagcctccgtgacccctgagga

SEQ ID NO: 693029 - DNA, 760 bp, Homo sapiens
  misc_feature (344)..(344): n is a, c, g, or t
cgtgggtctcgggccgcattgtgtcgtgaagaagcgaggtaggggtatggagaagtggtgaatcccctgtttgagacgaggattaagagttatggcatggcgatctacggacatcctacggctcatcaatcgaagactcgtcgagcaacgcgcgtgtgggtcgagaaagtggccccggcatagtctcgaggttgcgacgcggcatgagaggcgcatcgcgtcgtagtaaggcgggttgaataggctcggctcgcttgcggatctatagcgatgtcaggccaggcgcgctggggactcgcactggacgcagtccttacatcagaggcgtgcctctaacgcttggnctcctcaccagagcttaccagcacctcaggaagaacgcccatgccagagagaagaaaaagcagagccagcaagtactttgctctgagtgcccttgggtgcgcacgagcgacagtcatcgggccgtggcggtagagccttcaatggggggtgcggacacgagcttcgcgccgtaaatggtgataaggtgaggaaaccccccaccaccaatgagggtcccacaatttttcctggaccaatagccccaatgtggccaagagttctataaggaacccaaaaacgccccagggcgttcaaaaagccccaaaaaccgctctgtttttgtgagggcttgtggcgtgtcccaatgtttaaaaaaacccaaaaaacgcgccaaaatatagggcccgttcccaaaagacacgttggggcccttggg

SEQ ID NO: 693030 - DNA, 839 bp, Homo sapiens
gctctggtgccgctggaagacggccagagatggttgagctcatgttcccgctgttgctcctccttctgcccttccttctgtatatggctgcgcccaaatcaggaaaatgctgtccagtggggtgtgtacatcaagtgttcagcttcctgggaaagtagttgtggtcacagagagctaatacaaggtatcgggaagggagacatgcaaagatgctgagtcagcagaggagcctcgagtatatttagcttgccgggatgtggaaaagggggaacttggtggccaaagagatccagaccaagaagggaaccaagcaggtgttggtgcggaaacgtggacctgtctgatactaatgtctatatcgagcttttgcataagggcttcttagctgagggaaaaaggcacctccacgttttgtgatcaacaattgcaggagtgatgatgttgtccgtacttcgaagacagcagatggtttgacgatgcacatagggagtaaacaattgggtcattacctcataaccatttggctgattagagaacattaaagggaatcaagcccgatcagggataggtaaattgtgtcttccctcgacaatactggaaggtcaagtccataacttgagggtgagatattttacaatgcatgggtgggcatagtgtaaagcaaggtaagaagatacttttaccaggagtggactgggcataaaaaggctgaggtaagcagtattctgaaacctggatagcaattgatggtggaccatttcagcaagggtgggggtgaccaagtaaaaaatatagggcgacagagagaagagtctcaaagaggaggagacagggaactg

SEQ ID NO: 693031 - DNA, 330 bp, Homo sapiens
aatggcttgatcatggctcactgtagctcgactcccagactcccatcccggctcccatccggcttctgaatagttgggcatacaggtgcatgcaccacgcctggtaatttttttaagtagagacagggtttcactgtgttgcccaggctggtctcaaactcctgagctcaggcagtccacccgtctcggtctcccaaagtgctaggattacaggcatgagccaccacacccggccacctggctacttttttaaattttttgaacagatggggtcttgctgtgttgctcaggctggtctaactcctgagctcaagtaattctcttgcctca

SEQ ID NO: 693032 - DNA, 299 bp, Homo sapiens
cctgagaccctttaaaataccaggatgtttccccttaagggggcccgggccctgaccttaaagcctcaatttttccctaaaggcccgtggccccaaaatgaagagaaaattttttccccttgccccgtttttgaaaggggtttttcgggaaaaaaaaaaaaaaaaagaagggccaaaaaagttatcatgtagttgaagtctgtggagccccctgttatgaaaagggttaaccttgaaccccccaattttaaaaattatttggtttgaaaaggttttcctttaaataaatgttttttgta

SEQ ID NO: 693033 - DNA, 1001 bp, Homo sapiens
  misc_feature (998)..(998): n is a, c, g, or t
ggtctgtccgtgttgttggaaagacaggggtgatcatagatgaggtgagtaaagaaactggacatgaatctgaatgaggacatcagtaccctgtccactgaagagcttcgtcagcgtgtccatgcagcagtggctcagatcgtcaacccaggccgagtcaaagaacagttggtaagagcaactgaacactcagatccgagatcttgagatgtttatcaccttcatcccagagatgaagtgggaagccccttgcagacaggtggtggagcgagcggtgagctgcaaggcggtgggaagacaggaaatggctgcctaagcagaacaggcagaggacagaacgcctccaggaaacagcaaaacaacaaggcagaggatgtgaagaaagtccgggagacgtgtggctgcacctgatgcggcgagcgctggcgtgctccagatctatgcgtgtagccagtgttggtggtgccacagggacagatcccctccaaccctgtggcatgagggtccaggcttgacagagactactctcccttgctgaagaggctggaggtgtcagtggacagagtgaagcgagctaagccttgagggagcaggcacatgaccatgtcatcagctctgggcaacctccaggactctctctgggacggcagatgagctgactatgggtgtgcggaaggagctaacggtggttgtgagggactggtggcccatggagtgtatgctcctcccaggggataagctggtatggcccgtatgtgtctgtgcaggctttcagtgggccagatgcatgcgccgtggagccttgaaagtcaacagcagacggggccacgtggatcccaccggagctcaggctcctcggaggagacggggaccacactggtgcacccgtgtggaaaccttagggagccaaagctgggtaaacagggtggaacacaggcatacaacgaaaaggagacatcgctacttggcttctcttttggtgtgtgtgttgtgtgtgnagc

SEQ ID NO: 693034 - DNA, 106 bp, Homo sapiens
ctcgctgtcgctgggtcacactatatggactcgggggacacaaagatgcctgtgacactttggtgtagccgagttagtcaacaattattctgggaaaaagcagaat

SEQ ID NO: 693035 - DNA, 419 bp, Homo sapiens
ttcccagatatcactctagtttttacaatctttgtttatgacaattagggctgtaacattggctgtagacatttgttgcatcaaggaactcagcttccactgaagttctgaagttaatcagtttctgatcttgttctgcaactctctgcaagaagaaaaatcaccaggaaatagtgcatcctgaaaggagtcaaagtttccttatccagctggagcagtgtgatctcggaccagagtcaattccttgcccaacagacttcacattgagccatgagaagcagcctacttacccttacctggacacttctccaaaacctgtgaaatggcctctgtcactgcctcaaagcctcatccttggtgggcaactcacctggatcctgagaccaaaatatagagcttaatgaactgctaaaaaaaaa

SEQ ID NO: 693036 - DNA, 121 bp, Homo sapiens
cattgaaacattatggactcaggtacttggaactgtcatttgccagtgccgaagaaagataagccgtagcacctagggcagtatctggcccgataacggctccatcaataggaaacggaat

SEQ ID NO: 693037 - DNA, 775 bp, Homo sapiens
cgtaaacatcgatgttgaagtaggccacctgggtgtgcacgtagtcattctgcttcacttgcaggcagaacggggaggtgaaggtcaggtcttccaccttgacggtgtagatgtctacctcctttatgaggcaggcgttggtaaccagctgtttgaggtccaccacatccactagggtttccttgatggccacatctttgatgcaagatatatcgaagccataaacgttctcccaccagtggatcttgtagtctttgtactgccggtcctcggtggccgtcacatacagtgtggcccgttctgggaagatgaggctattgggcgccagccacttgtccgggcatagagcacagtgttgagcatggactcgtagaagaggcagttagcccatccacttgctgatgatgatgttcaccttttccaccgggagctctatctcctccaccttccccttggtgatggtcaccaagtggtctaacttgttggctttgacaatcttcaccgcataatcagagctactggaacactcgatgccgatgaccttgcgggcccggccttggcggcgaacatgcagaggatgcttgtgtccgagcccacatccagcaccaccttgtctttaaagaggtggcggttgtgaaacatggagttgccgaagtgggcgtaggagtcaaagtagtaatctttggacgtcatgccctcgacgttcggcttctcgctgctttccgcctggccacaggacacctccatgatgcagttcacgacctcggcggccgca

SEQ ID NO: 693038 - DNA, 760 bp, Homo sapiens
cgggttctcctgggatctgtggtctctgggactgtggttgctctgtggatattgaggaaaaggagctcaggtgggaaaaggagggaactactctaaagctgagtggagcgaccagtgcccaggggtttgagtctcaacagcttgtaaagcctgagaccagctgccttgtgtgcgactgagatgcaccgctgccttgtgtgcgactgagatgccaggatttcctcacgcctcccctatagtggtcttaggggactctggcttctctttttgcaagggcctctgaatctgtctgtgtccccgttagcaccatagtgaggaggtagagaaaccagtccacctctgtgtgtacccatagaccccccttctctcacacatgacaccgtgtgtccctccccggtgttttttttttatttaaaaaataggaaaccctgggcagagtctggcagctcatgcctgtaatccccgcacttagggaggccgaggagggcagatcacgaggtcaggagatcgaaaccatcctggctaaacaccggtgaaaccccgtctcttactaaaaaataccaaaaattagctgggcgcagaggcacgggcctgtagtcccagctactcaggaggcggaggcaggagaatggcgtcaacccgggaggcggaggttgcagtgagcccggattgtgcgactgcactccagcctgggtgacagggtgaaacgccatttccaaaaaattaaaatttaaaaattaaaaaagaacctggatttcca

SEQ ID NO: 693039 - DNA, 460 bp, Homo sapiens
tatttaaccttaagagactaccagtccattacacaattgacctagtctattcccctgaaacctaaaagatccccggtgatttggtaataaaataacatatttaaggtattttaatatacttaattgtgtacaaaatgtcccctggccatagtagcgtattttggtgattccatgattgtttcctagattggttaccttccaagatattcaaggcacgagggctctggatggcgtgataaattattcttttctcaaaccgggaggatgagaccggctttccgagtggtatcactgggtacgcaatattggcaatcggtgtgcggtaatcccggggtttctccactctaggtgcttctgatggatactagcataccaaaggaggtgatggcggtagtgttttcctttacctccatttgttaaccggggcagaattccaaatacttaatggtgctaacctaat

SEQ ID NO: 693040 - DNA, 1511 bp, Homo sapiens
  misc_feature (227)..(227): n is a, c, g, or t
cgcattgactcgcgagattgacctactgccgcgatacgagacgtgtccctatatgacaccgtcatagtcatgattctattgatgtcacgtactacacgggagagttagctcagtcaatgccctagtcgacagaggaggaaagaatcgtggctcgatgagaccctcggcctcgtggtaccagaggcgacttgtcggcgcgcatccgaacgagcgcccatgaatgcgtngactcggatcggtacattcctacgacatcgactctgtctccgagtgccttggacacaggcgatgtaccgatacggggtgcctcggcacagaagcatctggcactagcatatgaccgtcgcaacgtacgatgtgttgtctcacgcttgcgcgtgcaaagttcccgcgcataagacaccgtggatatcgaagtttgacatcgatagggtccaggaaagtatctacaatcgtttagtacccattcacttgcaaggccaattgtgcttgggcacgagacccgttcgtgtggtagattggagagagacacccgagatgatctgccgccgcgtttgagcattgaacgaacatggaaagcgctaggtccactttggccccgggtgcttagggaactccctgatagggagcccctttattagacgacgcgcctattccagtttgtggacatcctcccttagcatccctaactagtcccgaggcctatgccctcgcgaagttggggcttaaaacgtaagacgtgcgacgtgctactgcagtgtcaaaagtgggaagcaccacgtgcgttggcgcccgcaactcgatacaatgggtgacgggggaggctttggggtttgagcgttcccaccataccttacgggtggaaacccgcgaaagaatagaaggttcactgttgattcgatcgcctaggttgggtgggtaataagcgcaagttcaatgccgcaaagacttcgcagatttgcccttcgcaatattcgccattggtcaagggaccccgggggcggacttgttccatctggctggtgcacccgcaggcagatcggtgccaaacggtcccacttctggttcctcacctaatttgaccttcagcatacgtacatctgtgacgaagaacaattctagcgccacacacacacggtgagcaaacttatgataggagggccccgaaaagttagggggccttaaaaagcgcgcgtgggcttttccccccaaagaacgtggccgctgaacactctatatcttattcgagaccatcaaacgtttgctgggaccccgtgaaggaaggtaaagggccgatagtctcctatctgccccagtgatataaaaacacacccagagacaacattatggggcgaacggccaccacaagtcacagaggaaacggaacactagactgtagagaagacacacaaaactaagagaattcacagcaaccacaggaccagagagcaccacaagctgtagaacggaggcggcacccacgtagtactattcgaacacacacaacacac

SEQ ID NO: 693041 - DNA, 180 bp, Homo sapiens
ggttacgccactgctgcagtgttacgcggcaggatgaggtgctgcatgcactgggcccagtgagctgcagaaatgtgcagtcagctacagcagcgagagctgcccgcgtaagttggggagctccagggccgtagtggcacagactgtgaagtcggagctgcgcccagcctggaaagagca

SEQ ID NO: 693042 - DNA, 695 bp, Homo sapiens
  misc_feature (4)..(4): n is a, c, g, or t
  misc_feature (89)..(89): n is a, c, g, or t
  misc_feature (108)..(108): n is a, c, g, or t
  misc_feature (111)..(111): n is a, c, g, or t
  misc_feature (114)..(114): n is a, c, g, or t
  misc_feature (116)..(117): n is a, c, g, or t
  misc_feature (119)..(119): n is a, c, g, or t
  misc_feature (126)..(126): n is a, c, g, or t
  misc_feature (164)..(164): n is a, c, g, or t
  misc_feature (179)..(179): n is a, c, g, or t
  misc_feature (281)..(281): n is a, c, g, or t
  misc_feature (318)..(318): n is a, c, g, or t
  misc_feature (331)..(331): n is a, c, g, or t
  misc_feature (336)..(336): n is a, c, g, or t
  misc_feature (338)..(338): n is a, c, g, or t
  misc_feature (342)..(343): n is a, c, g, or t
  misc_feature (390)..(390): n is a, c, g, or t
  misc_feature (447)..(447): n is a, c, g, or t
  misc_feature (451)..(451): n is a, c, g, or t
  misc_feature (533)..(533): n is a, c, g, or t
  misc_feature (579)..(579): n is a, c, g, or t
  misc_feature (606)..(606): n is a, c, g, or t
  misc_feature (611)..(611): n is a, c, g, or t
  misc_feature (620)..(620): n is a, c, g, or t
  misc_feature (622)..(622): n is a, c, g, or t
  misc_feature (683)..(683): n is a, c, g, or t
agcnctgtgtggtttttacaaagcgaggtggtgttttctacccacagttgaggggtccagggtagacagcaaacacaaaacttgtttcntttttgaaacaaaacagtnttngtngnngngaaacanacaaccacaatctaaacgagcggggggggaccctttcntaggtgggaaggggngtgtgtggggaggggttgggggtgaaaagggtgggggggtgggtgtgggagacccttgaatgtggtggacagattgaccaggtcgaagggggggtgtgtttncaaaggacctggggggggggggtgtgtgggggaaganagtgactggtggnagagngnatgnnccgcgggggggggggatcgaaatgggtccatggacagctggggcctngcgcttctgaactgtggctgatgtggctttgttagagtgttgggggtgaaaggtgtnaganacaggagggagcgtggctcaagtggggccattcagtcgggcggccgggtgtcgggggccttctcctggacttcatcatactncggtggaggagtcaaaggctctatcgagggaggagggacgtttttntctgggaggttgatcctaaagtctttnaggtnttttttttnanatttaatccttcgaactttcagtggtttcagtcgtttggccaacttagagttctgcctgtnaggggggttccc

SEQ ID NO: 693043 - DNA, 166 bp, Homo sapiens
cgtcggagccttcacctctcactcgcatgctgctgtgcccatgctctggggctgtcgggtgctgtacacagcagtgctcatggtctcaacacacactgcgcatggcattctgcactaaacaagcctctgtgaacggcaccgtggagactatggcagcatgagccac

SEQ ID NO: 693044 - DNA, 191 bp, Homo sapiens
  misc_feature (111)..(111): n is a, c, g, or t
gaggggcaggccaccatgtcaccggtcagtgcctttgggaactgtccttccctcaaagaggcttagagcgagcagagcagtctgttatgagtgtgtgtgtgtgtgtgtgtngttttttttttttttttttttttttttttttttttttttttttttttttttttttttttttttttttttttttttttttt

SEQ ID NO: 693045 - DNA, 467 bp, Homo sapiens
gaggatccccggcctgcatgcaccagggtcatgatgtgaacgtgttcctgagggtttcctgagctgcgctttgcctccgaggcgtccggcagcgtatgccagaactgcagctgcagggttcaggctgtccagatcgtgggggatctgtgaagactaaggagggatctaccagtgagtccacagagctttgaaagtgatgttaggaaattctgaatcaggccgggcgcggtggctcacacctagaatcccaacactttgggaggccgaggcgagtggatttcctaaggtcaggagtttgagaccagcctgagcaatgtggtgaaaccccatctctactaaaaatacaaaaattatctgggcttggtggcgggcacctgtaatcccagccacttgggaggctgaggcaggagaatttgcttgaacccggagggtgaggctgcggtgagccaagatcatgccattgcact

SEQ ID NO: 693046 - DNA, 270 bp, Homo sapiens
  misc_feature (75)..(75): n is a, c, g, or t
gccctgtgtagttggagcaggaatcaattctcaacacaaagtggctgccaaccatccacccccggggcgagggtncagattttttcccaaaaaaaaattaagaaggttctcgcagaaaacaccacaaaaaacgtgtacacccaacaatcttgatttttgctgtttttttgcttaaaacgttaacttgatgcatcattggaaaggtgtttctctcatctctgtcctaaggcttgataaagtcattaaaattgtgttcttaagactaaaaaa

SEQ ID NO: 693047 - DNA, 445 bp, Homo sapiens
ccggttccttcctggaggcctcctgtcctcggggacccagcacctcattcatcagcattgctggagccaagggcctctgagcccaagctaagccatcatgtcctctgtaacctgcacgtacacatccagatggccggttcctgccttaactgatgacattccaccacaaaagaagtgaaaatggcctgttcctgccttaactgatgacactatcttgtgaaattccttctcctggctcatcctggctcaaaagctcccctactgagcaccttgtgacctccactcctgtctgccagagaacaacccccctttgactgtaattttcctttacctacccaaatcttataaaacggccccacccctatctcctttcgctgactcttttcagactcagcccgcctgcacccaggtgaaataaacagccttgttgctcaaaaaaaaaaaa

SEQ ID NO: 693048 - DNA, 841 bp, Homo sapiens
gggtacctgcgtgcttaggatttttgtcttagtgattaactgactttttaacattatgaaatgtccttctttgatgtttatagtattctttgttttgggaaattaatactttgatattatatgtaaacattctgcttttttatgattagtgtctgtgtggtgtatcttactatattcttttacttttaatatgcctgtgtctttatatttaaaagtgaatttctcatattcagcatatagttgggccatgttattttttggtgttatattttttcttaatccagccttgaccatctctgccttggtcatgttatagaccatttagtgtaattatggtatgttgggatttaaagtctatcagtggatggcataattaacttttcgcatattttgggcttagaggtcggattaccatccgtggtttacagtgccctctttctaagcttaccatctatgaatctcacaggtttagactccatattaagggggtacatacagaaataatccacactaaactcggggcagaagcgcagggaaccttagggggttccacacaacacagtccacactcctacattaaataggcagctccacttatccgcatcgcacatgggcaccaatcacggggtcataaacgtcaggcaacacttacaacagcacccaattgtggtacagtgtgacaaagcccctgacgcgagacagaggcccaacaggaaggccaacagagcaaagcaccccacaaaactggctaaacacgcccaccagagcacaggggaacaaccgagagtaaccaagaatacaacaactagagcgcgacatcacgggccggaccacaggaaac

SEQ ID NO: 693049 - DNA, 352 bp, Homo sapiens
  misc_feature (68)..(68): n is a, c, g, or t
  misc_feature (105)..(106): n is a, c, g, or t
cccccacagttaaggctggacagtgtgggatggtgttgcaatctctcctgcagagctgtcagtcgccngtggctcgggtgcgtgactcaggctcccggtcctggnntctgcgctccgccggcgtactcctccacctgtctgcagcagggccgaccgctccagttctaaggtaagcatggcctgcttcagtttgctctcactgctcaggagcttctcaatggtggcctcaaggctttggatcctaccattttgccacctgcaactgttcaagggaggtcaaggttctgtttgcgcgtaaagggctgctgttgggtttctctaatttatccattcttgggttgtacactgaaag

SEQ ID NO: 693050 - DNA, 106 bp, Homo sapiens
taccgattctcgagtgaatcatgacgtgtcttgacgttcgcaatgtgcagtgccggatcggtgatcgcgtcatcgtcgacgacgtgagcttcacggcgggagcggg

SEQ ID NO: 693051 - DNA, 677 bp, Homo sapiens
  misc_feature (61)..(61): n is a, c, g, or t
  misc_feature (98)..(98): n is a, c, g, or t
  misc_feature (108)..(108): n is a, c, g, or t
  misc_feature (132)..(133): n is a, c, g, or t
  misc_feature (141)..(141): n is a, c, g, or t
  misc_feature (159)..(159): n is a, c, g, or t
  misc_feature (166)..(166): n is a, c, g, or t
  misc_feature (170)..(170): n is a, c, g, or t
  misc_feature (263)..(263): n is a, c, g, or t
  misc_feature (266)..(266): n is a, c, g, or t
gctcctgttcgacagtcagccgcatcttcttttgcgtcgccagccgagccacatcgctcangacaccatggggacaggtgacaggttcggagtcaacnggatttggtncgtattttgggcggccttggttcnnaccagggncttggcagttttaactanctgggtnaaanaggttggggaactttaactttttgggtttttggcccccaatttcccaaatttggatcccacccctttacgaattttgggaccccctcaacttnacnagtttggttttaaccaatttggtttccccaaagttattgaaatttcccaacaccccattggtggccaaaaaaaatttttccccccaaaaatttgtgggggggcggcgcccaaaaataccccacgcggggggtttttcccaaaaaaaggcgggggcctctttggggaacggggaaaaaacccgggggggggaacaaaagggccattatttggggttccaattttcccaagaacgctgggcgggaacaagagattccctccaatgtttcgaaccccaattttccttttcccccaaagggggaccggcccggaaccggaatttcccccccgtttccccaaataaaaaaaagtttcccaaaaagggtctttggggggggcggcccgggaaatggcttggggcagcctgaagttac

SEQ ID NO: 693052 - DNA, 187 bp, Homo sapiens
ctagaggagcctcccaagatccaggaaacctcatttgtttgtccagcctgggtaacaagagcaaaactccatctcacaaaaaaaaagaaaattaaaaattaagtggtttttcggggggtgtaccattttgatgcccttcttcttcccttctcaatatgtgaaggttttttccttagtggatatttcc

SEQ ID NO: 693053 - DNA, 104 bp, Homo sapiens
tgttccgaccagtcctcctgcctaagtctcctccctgaccagtcctcctgccctaactcctcgcgaacgtgttatccccccactgtcgggctagtcgggggggt

SEQ ID NO: 693054 - DNA, 101 bp, Homo sapiens
atgattatagtctcctgactttcaatgaggcttccataggacaagattgattcaatgttgtcccagacaattgcaccttgctatcgattatgtcttagcag

SEQ ID NO: 693055 - DNA, 465 bp, Homo sapiens
  misc_feature (14)..(14): n is a, c, g, or t
  misc_feature (164)..(164): n is a, c, g, or t
atctagaggatccntttgcggtgcctttcccattccccctaaaaagagaatctcttagggaaaaaaaaaaatccaagattggaatgaacaaaagactccaatatcgctctctacggctggggttcccttttctccaactggatgctggggggatgccgctgggngctgcagtcactgtgaggcaagatggagaaattcacgggttggatgggtgaggctggtagagccactgggagaatgtggggcagtgaggggagggacatcttcctagcatcaccagcatcctgagcttggtctggtgtggggagtcccacaagggtgggggcaagggtaagcagctggtactggaaccctaaatcccggggtgggatgtggtctctggtaccttaagagcaaatggtcggggatgccatgcacgggtggccagaggttgaaaggaacaggggtctacggaggcgccaggcc

SEQ ID NO: 693056 - DNA, 423 bp, Homo sapiens
  misc_feature (342)..(342): n is a, c, g, or t
atttatcagctagtaccccgctggcgatcacatggtcgtgcggcggaggaagtccctgtgtgggaaggtgctcacacagctgcacatcaacctcagtggacagaaagacagtggcatcagtctggagaatggagtgtatgctgccgctgtgctgcctggaagccctgccgctaaagaagggtcccttgctgtgggagacaggatcgttgcgatcaatggcattgcactggacaacaagtctctgaatgaatgtgaatctctgctgcggagctgccaggactccctgaccctgtccctcctgaaggtatccctcagagctcctcgtggagtggccagaacatntttgaaaatatcaaagactctgataagatgctgagttttcgagcccatggcccggaggtccaggctcataacaaacggaac

SEQ ID NO: 693057 - DNA, 222 bp, Homo sapiens
  misc_feature (218)..(218): n is a, c, g, or t
gctttttccttttttccccccccatttccccaaaattgcccattattaattaacctctttttttggttggaaccctggcagttttgctcccttcctaggatttgcccctgcattgtagcttgcttaacggagcacttttcctttttccaaaggtttacattttagggggtgggctgagtttttttgtaaaaaaatgaacgcaatgccaataaaattgnccca

SEQ ID NO: 693058 - DNA, 1601 bp, Homo sapiens
gacccgacgcgtccgctgcacgcagtggcgcataaatattatactagcatcgacgcagtgctcgacttgctagtgaatactagatatagtcagcatcacgcgcatcagtatccatcccttgactagtgccgtagaaagtgaaagtaattgactagtcgtcgtgatctgcatgtattaggcgtagcatcgtgcaataagcacccatcaaagtaacgcacatcctctcatgaggccaatttgattggtggcctatgggtccggtactaggtccttatgggcggcctggcgaacggcgagacggatggggaccttagctccatatgtgagatctcagagtactcacaagaggactagtaatgggacctacgaggtacggtaccaataaatgctgtagaaccttgagtccaagtgcttaatggagctaaattcgttccgcggagcaagtataatagtttgacataaacccaacgtgggacgagtggaagcttttccccgagataaaaccaacagttagaatcttgggaataccgaagattcaaacaccagtcccacgaggcgcgtagaaattcacttgaaggcaatcgaatccgccccgtaacgttactcctcggagaaaaccgatacaatcaagcacacaaagcggtaaattttggaaagcctgttccgccccaagagggcttgtgcccctccggagaccgcgctagaacacaacgcgcagcctcgcttaggtagcaataagcttgaggccttgagcttccctacccccgtcccccggaaccctgggccggaagcccggggaggcagcgataataccggggtgaaaagcagttggtaagcggcagcagaaaccccggaaaacccccagggatgaacaaggaacccgccgcggaacacggggccgcgccaaagtgacacattcccacgcgccccaggccaactcccgcattcccgcgggccgtctgccccaaccccccaggtcaccaccccgggggggacaacacacccgagggacaccaggcagacccacgccaaacaagcggggccaccccccgcgcaccacaagagggcgcacccccgcaggaaacaaccccgaggggagcccacgcaatagcaaaaagagcggggcgaaacgggcggcccggcaggtaccataagcacgagtgacagacaggcaagagactggacctagcgcacggaacagcggaccgcggggaaccaagaaacagtccagaggtaatgaggtataatttgcgctctattacttcttgtgcacttctggatcgagacacgaccaagaccacgaccccaccacaccaccccaagcaacaaccaccagcgcaccacacacaaccgaccgcccgacacacacccccgcacccacacacgcgacacgccgaacaccggaggagcaggccgccggaacggagcgcacgggagaacggaggcaacgcggcgagagccgaaccagcaggagggaacgacagaacacgcggggagaactacgacagggaagaggaaaagacacggagaaaagcagggacgagacgcaggagacggccccacgacagaggacggggacgagaagacaggggacgaggcgc

SEQ ID NO: 693059 - DNA, 311 bp, Homo sapiens
caacttctacatgtcatcctgtacctcatggtgatgattggaatgttctctttcatcatcttaggcttggagggcctctcgctcagctgtcgtgttctcggcgcccgattgtccatatgagtgataaaaatccttcggaagacgtcttccagcgtctgtgtgaaattggataaagtagacatgcttccctcctgctatgcagtgtgtgggcaggatgaaattcctttccaaagccaggctgttctgaaccttcttgctggctgttagcgagctctcttctgggttgcacaccagcctcagcctgctgggca

SEQ ID NO: 693060 - DNA, 220 bp, Homo sapiens
agacggcgaggacccggaaacggcttagcagtaggaggactaggctcattataagagttcttacagcaagaaagacggttaaaaaaaataaaaagactcatggtacctgtgagaagaattctgggatgcccaggctgggtgaagaaggggatggacaatgggaccagtcttcctaaggaactcccaaagtaaacatatttcacggacatggtatctggct

SEQ ID NO: 693061 - DNA, 128 bp, Homo sapiens
ctgtgaagcatctcattagaacacatgagcgagtattggcccttcctgagacattacgccatctatctaatctcgttcatccgaatgtcttaagaagcagagaacatcatttatcattctagtatcat

SEQ ID NO: 693062 - DNA, 475 bp, Homo sapiens
agcggtcgcttatttggcctggatggttcaggataatcaccgtgagcagtgaagccagctgctccattggtgggtcattagctgtcaccagaaggttgcacgacgaacatccttgacagacacattcttgacattgaagcccacattgtccccaggaagagcttcactcaaagcttcatggtgcatttcgacagattttacttccgttgtaacgttgactggagcaaaggtaaccaccataccgggtctgagaacaccagtctccactcggccaacaggaacagtaccaataccaccaattttgtagacatcctggagaggcaggcgcaagggcttgtcagttggacgagttggtggtaggatgcagtccagagcctcaagcagcgtggttccactggcattgccatccttacgggtgactttccatcccttgaaccaaggcatgttagcacttggatccagcatgttgtcacca

SEQ ID NO: 693063 - DNA, 222 bp, Homo sapiens
gggaggaatttcacctcaggtggcggcagatgtgtcctggtcggtggcatctctgctgcacttgagaagggttgttagtgcgggtggtttagagctggtgggcaatgtaggactacctaacctagtaggtgttctgtgggctgggtgagggcgcagttgtcggccacctgatgtgtatactacttggccacctgaggtgtatactacttggggatccgtgcg

SEQ ID NO: 693064 - DNA, 462 bp, Homo sapiens
  misc_feature (17)..(17): n is a, c, g, or t
  misc_feature (27)..(27): n is a, c, g, or t
  misc_feature (34)..(34): n is a, c, g, or t
  misc_feature (56)..(56): n is a, c, g, or t
  misc_feature (65)..(65): n is a, c, g, or t
  misc_feature (76)..(76): n is a, c, g, or t
  misc_feature (78)..(78): n is a, c, g, or t
  misc_feature (103)..(103): n is a, c, g, or t
  misc_feature (107)..(107): n is a, c, g, or t
  misc_feature (139)..(139): n is a, c, g, or t
  misc_feature (142)..(142): n is a, c, g, or t
  misc_feature (154)..(154): n is a, c, g, or t
  misc_feature (165)..(165): n is a, c, g, or t
  misc_feature (183)..(184): n is a, c, g, or t
  misc_feature (189)..(190): n is a, c, g, or t
  misc_feature (200)..(200): n is a, c, g, or t
  misc_feature (220)..(220): n is a, c, g, or t
  misc_feature (253)..(253): n is a, c, g, or t
  misc_feature (257)..(257): n is a, c, g, or t
  misc_feature (260)..(260): n is a, c, g, or t
  misc_feature (270)..(270): n is a, c, g, or t
  misc_feature (272)..(272): n is a, c, g, or t
  misc_feature (292)..(292): n is a, c, g, or t
  misc_feature (294)..(294): n is a, c, g, or t
  misc_feature (297)..(297): n is a, c, g, or t
  misc_feature (307)..(307): n is a, c, g, or t
  misc_feature (315)..(315): n is a, c, g, or t
  misc_feature (318)..(318): n is a, c, g, or t
  misc_feature (337)..(337): n is a, c, g, or t
  misc_feature (339)..(339): n is a, c, g, or t
  misc_feature (341)..(341): n is a, c, g, or t
  misc_feature (349)..(349): n is a, c, g, or t
  misc_feature (369)..(369): n is a, c, g, or t
  misc_feature (379)..(379): n is a, c, g, or t
  misc_feature (394)..(394): n is a, c, g, or t
  misc_feature (401)..(401): n is a, c, g, or t
  misc_feature (457)..(457): n is a, c, g, or t
tcagggggaaaaaaatntttatttttnattaatnttttgaaaaaaaaaaaaaaaantttaaaggnttagtttagtngngaacttcaaaaaaaaaatttccaanagtncaaaatttcaagggtaagcttctgattaaagnatnagggttaaaaangtaaaaaaaanggggtttttaaaaaaggnnaaaannactttagccnctaaaaaaaaaaaaaaaaanggaaaagggccagggattaaacttagtaaaaanaagnacnctttagtacnanagcgggaaaagagatccccncnagngaacagaaanaagccccnctnttttcttctatgaggggtntntntggggcangggcctgccagtttgaatangggaatgggngaagcccgggcaaanaaatgcngccaaaggggcgggggggggggggggggggggggcggggccccagcggggggcccnccccc

SEQ ID NO: 693065 - DNA, 572 bp, Homo sapiens
gtcccaccatttatgcaggtttgatgtgtatactatttatataaaactaataaaaatcaagataatgatcatgtgtcacccctgtaaagtttatcttatgccagctttaaagtccttctctcctctctctgcccctaatcctatccctataaaagcactaagctgctttctgtcattaaggattggtttgtattttctagactttgaatataaatggaatcacatgatgtattctctcttgctctctcactctcttttggaaaaactctaaaaccatgtttttcctctgctctcacaccactacaacaacaatcatcaccacagaagacttctagtgaccaaatgtgtggagatatctccccaccaccaagcgaccaattaattctgcagtaggtatcagctaggtgtcctccaaatcaattctaacactatctacctggaaattatgtcagatagtgtcagatccatttaagtgctcattcacaagactgacccccgacgcacaccagttgataggcttcatgtcggggtacccatgaagccctctacgggttcaatgacttggctggaac

SEQ ID NO: 693066 - DNA, 168 bp, Homo sapiens
gacccttgtgaccaggtttcacacttggccaaggtcatctatgtccatccgcagcaagctgcagaacaaggagcatgtcattgaggccctcgcctagggccagggtccaagtttcctggccgccagaagatccacatctcaaagaagtggggcttcaccaagttcaat

SEQ ID NO: 693067 - DNA, 176 bp, Homo sapiens
tccaagtgcctttaaacgtcttagaggcctatcgctggacatcgggatttgtacatactaaccaggacagtaaaaattctcagtaaacttctagattgttatgtgtgcattctactcacagagttttaaccttactttgcatagagcagttatctaacactctttttgtaatatgc

SEQ ID NO: 693068 - DNA, 390 bp, Homo sapiens
taattgggagcacacgtatatcagtaggaactgggtagggataggaagtactaggcagggcagcagcaatcttgcggtgtttgatataacatgcatccttgggcaggttgcccttacatcttcacactggggtgcacgggcatgtatgttttggtcatgctgccagtcagagtaggcagtccttagtcctctggtggtccagtatatctaataagtgtcttccatattcattccacgtcaagggaaatacggtagtacttttctttttatatttctatgcttacaattctctttcctagtcacaaatggcccaaatctgtgttggcttacggctggctacattggtctcccttacttttcttgagctaaagacaggctttttccaccggc

SEQ ID NO: 693069 - DNA, 337 bp, Homo sapiens
caacacactccagctctcaataacacactccagccctccaacaaccaccatgaccacccctacaccaaacaccacccccagctctccaagtaaccaccacaaccaccccttcctcaactaccactcccagccctccaccaaacaccatgaccaccccttcaccaaccgagcactcccagccctcccacaagcagcaggaccagccttccaccaaccaccacttccagccctctaacaactactcctctacctccatcaataagtcctcctacattttcaccattctcaacgacaacccctactaccccatgcgtgccatctctgcaattggactggc

SEQ ID NO: 693070 - DNA, 333 bp, Homo sapiens
  misc_feature (139)..(139): n is a, c, g, or t
  misc_feature (329)..(329): n is a, c, g, or t
acccatcggtggcatgatcactaacgccgcatcggaagaaatgtggctgaaaaaagcaataaacagcaccatataactggcgtaggggcattaacatgcgatgccattttaaccattagtgctggcagtaagccgacgncgtccgccagaccggcacctaaaaccagcgccaggatcgcaccaagtggagcaaaaccgctaaagtttttaataacattggggtaaaaaccagtgtaatccttccacactgagcaggtttttcaccacgaccggcgtaccatcgggtcgggtttttcgcactgacgccaaaggccgacaaaattgccgtngtca

SEQ ID NO: 693071 - DNA, 355 bp, Homo sapiens
cgacttttttttttttgagacaggtctcactctgtcacccaggctggagtacagtggcctgatcaagctcactgcagcctctacctcccaggatcaagcaatcctcccacatcagcctcctgagtaggactataggcatgtgcaccatgcctagctgatttttaaaaatttttagtagagaagggggtctgactacattgcccaggctagtttcgaactcctgagctcaaacaagcctcccacctcagtctcccaaagtgctgggattacaggcatgagccaccaggcccagctagggccactactcagtgccaggccccagccactagggatacacacagaactgatgggcggg

SEQ ID NO: 693072 - DNA, 135 bp, Homo sapiens
  misc_feature (53)..(54): n is a, c, g, or t
cgcagtggctcatgcctgtaatcccaaagtgctgggattaggggcgtgcgctnncgcccagcttgaattttctttaaagttgaaaaaagcatcatacaacaataatatgagagtttggaattgctcccttatttg

SEQ ID NO: 693073 - DNA, 388 bp, Homo sapiens
gcaactaccagtatgtaaaagtcccgggaagacccttatcccagcaaattcgcttacaacagcagcaagcccagcagccataacagcagcagcagcaacgcaatgcctacacacggttttaaccagggaatgaatgcacggcagactctcaagagatcaatcaaatggccagaaacggttgggtttttcatatggaataagtattaaagttacagggtagttcatttatgcatggatttgggtaatgtaatatgcggcaaaaagtttggtttcctaaaaaattgggtctgacagcggggcgtgtttgctcacgctggtaatcccagcactgtgggaggctgaggggggcggctcaggaggagatcaagaccatcggggctaacagagg

SEQ ID NO: 693074 - DNA, 431 bp, Homo sapiens
agttaattcgactcgcgtactggaggatctctaaatgaccagggtccagtgcttaacgatatttggaggtcagcacggatgctcacgtgtcgagggaacttgtacggggaggcatgcaccgtagtggtgaatacacgtcgaccaggctccatgtttgcgatctttggaagtgatcgaaggtgctcatctgtgtcgagcgtgaacttgtcctatgaaggcatgcaccgcagatggtgaatacacgtcgatgcctgcgtggctatcttgcgtgctcgggatatctgaacgatccgctagagtcgatgcaggctccagcttagcgatatttggaggtcagcacggtgtcacacgtgtcgacggaacttggtctgggtgacttgcaccgccagggtgactacaggtcaagcatgagatccatctattctgagttt

SEQ ID NO: 693075 - DNA, 293 bp, Homo sapiens
cccccctgggggcaaaggttttaaaacccaccccccccccccccccccaaattgggccgaggggggtttgggcaaatttcccccccccttttttaagaaacaacgggaaaggagttttgggccccccccactaaaagtggtggggcccccggatttgggttttggggcccttgggcccccctttttaggaacccccggctcgggggcccctggaaaccaaacgggttttagactgaaatttttttcccccccccccgggggggctcccgtgggggtttttgtgtaaatgggta

SEQ ID NO: 693076 - DNA, 224 bp, Homo sapiens
cattccattgagaaagctgacaacggggatagggaggggataagataatagagggggtcaaattctggtgggaatgtgaacttgcctagtaagcacttggtctctgttcactacggcgatagaggaaatctatctccctatctggggtccttgaactacagccggcggtcttacaccaggggagctaccctttaaatgtacaaattactggtatgctcagcgcg

SEQ ID NO: 693077 - DNA, 447 bp, Homo sapiens
  misc_feature (111)..(111): n is a, c, g, or t
ttccgacacctccaaattatggaaaatactgtgtgagacctaaaaagccagcacaggaggccctgataaactacagtcgacgagggaaaggtgtcctaaagcatcttcatngacggtgcaattctgaaagcaaggtttgctcatctgaggattcagaagctgatcgatactccgattatggctggggaggaccctcatcgccatttaactgagttggaaaatgaagccacaaggctggaggcgtggagtttgcttaataaacaactttgaggtatggggccctcccaacaccctccccccacccgccccgcccaggaacgtctggaccctggcaggttggctttctgggacaattccatgggcttcatttatcagttttttccctttttaattggtggagagagacaaaagtttttataatctttattaaattttcctttttaaata

SEQ ID NO: 693078 - DNA, 817 bp, Homo sapiens
  misc_feature (24)..(24): n is a, c, g, or t
  misc_feature (35)..(35): n is a, c, g, or t
  misc_feature (64)..(64): n is a, c, g, or t
  misc_feature (67)..(67): n is a, c, g, or t
  misc_feature (619)..(619): n is a, c, g, or t
  misc_feature (728)..(728): n is a, c, g, or t
tttgaaacacccacctcagcctcntgagtagctgnaataaccaggcatgcgccacaacgcctgnctntttttgtgtttcagtagagatggggtttcaccatgttggccaggctggtctcaaactcttggactcaggtgatctgcctgcctcggcctcccaaagtgctcagattacagacatgagccaccgcgcctggcctacattgtattttttaaagcaaaaaattttaaaacagttagggagcatggataaactaaatgtccatgaacttcagaaaaaacacattatcaatattgttgaaactcccaaagaagtttacttttcataaacaaaaataatgaatttttgtttaatgtataggttaagtacagccatcgagtaaatttataatatgaaagaaggatgtcaccatttttactcctggccaaatatacatatactagatccttgctttgaaattttctcttgaagtaaaagaagtttacagttgcttaccaagtttgtcccctaccacagtcacctccgttgcctctgagggctcaccaactcctgcagaattagaacagcggacacggaaacagtaggatttcccctcggccaagtcaaacagagcaaagnggggagacttcacagggagctccgtgttcactcgctgccagttttctgttcctgcctcacacttttccacaaagtacataatgccctcatgaccacgctggccaggggncttccagctgagcaccacatagctccgggtggcctcagtgacagagagtttgtcggggggccaggcacatacctctgagggtctctcag

SEQ ID NO: 693079 - DNA, 87 bp, Homo sapiens
acggccgtgtattactgtgcaaagagacactatggttcgtcgcattctttcagtcttgactactggggccggggaaccctggtcacc

SEQ ID NO: 693080 - DNA, 407 bp, Homo sapiens
tggaccagcatcttggaactggataagggcagagatggaagagttggagcgttcagaagttgatagcaagatgaaagaaagttggaatttctggagactaattaaatgcttgagacaaaaatgctggtagaaatatgggatgccaaggtgggtggatcacttaagatcaggagtttgagaccagcctcaccaacatggagaaatctcatctctactaaaaatacaaaaattagctgggcatggtggtgggtgcctgtaatcctagctactcaggaagctgaggcaggagaatcacttgaaccagggaggtggaggttgcagtgagctgagattgcaccattgcactccagcctgggtgaaaaagcgagactccccaaaaacaaaacaaagcaaaaagaaataaaagt

SEQ ID NO: 693081 - DNA, 707 bp, Homo sapiens
ccgggcctggggcacggagagagcctgagcgccgcagcctgtgagccgaatagagcctgtgagagacccgatgtatgacctggagaagcccagtgcctggcctggaagatgtgatgcctgagctgcggccggaaggaacctgagccctgtcctgaatgtggatgctggagctgcatgcctggcctgtgtggccctggtctgatgccctgctgccatggctgtgcctgagtgcgacatgcttgtgtgccgtgaagctggtggctgttgtgctgtgctgcctgtgccaaatgacgtgcttgcatgcagtctaagtgcccgtgacactaccccaaaacggctgtgcgcgcctcgtcgctgtcgctgtgacgccgatgcgcctgagcctaccaatggttgccgggagtacttgggctggggcctggctgccgagtgcagcccgaggagctgagggtttaccccgtgatgcggaggcctcagcaacctgctcttcctgctgctctgctcccggaccacctgcccagcgtttggcgaggagccccgggaggtgcttcttgcggctgtacggagccatcttgcagtgttgttggactccctggtgctagaaagcgtgatgttcgccatacttgcggagcggtcgctggggccccagctgtacggagtcttcccaggagggccggctggaacagtacatcccagtcgtgcattga

SEQ ID NO: 693082 - DNA, 930 bp, Homo sapiens
  misc_feature (145)..(145): n is a, c, g, or t
  misc_feature (229)..(229): n is a, c, g, or t
  misc_feature (250)..(250): n is a, c, g, or t
  misc_feature (258)..(258): n is a, c, g, or t
  misc_feature (337)..(337): n is a, c, g, or t
  misc_feature (349)..(349): n is a, c, g, or t
  misc_feature (435)..(435): n is a, c, g, or t
  misc_feature (657)..(657): n is a, c, g, or t
  misc_feature (659)..(659): n is a, c, g, or t
  misc_feature (662)..(662): n is a, c, g, or t
  misc_feature (697)..(697): n is a, c, g, or t
  misc_feature (700)..(700): n is a, c, g, or t
  misc_feature (705)..(706): n is a, c, g, or t
  misc_feature (709)..(709): n is a, c, g, or t
  misc_feature (726)..(726): n is a, c, g, or t
  misc_feature (729)..(729): n is a, c, g, or t
agcggagtatggcatcgaggagaatggagaccaaacctgtgataacctgtctcaaaaccctcctcatcatctactccttcgtcttctggatcactggggtgatcctgctggctgttggagtctggggcaaacttactctgggtcnacctatatctcccttattgccgagaactccacagaatgctccctatgtgctcatcggaactggcaccactattgttgtctttgngcctgttatggatgctttgcntacatgtncgtggtagacccatggtatgctgaaactgtatgccatgtttctgtccctggatgttcctggctgagctcgtagctggcnatttcaggggtntcgtgtatcgtcatggagatcaagggactaccttcctgaggacttacacggacgctatgcagacttacaatggcaatgatgagagngagccgggcgagttggaccagtgtgcagcgcagcctgagctgctgtggtgtgcagaactatcaccaatctggagcaccagcccacttacttcctgggagcatggcatccccccccagctgctgcatgaactgaaactgattgtaatccccaggatctacaagaatctgactgtggccgccaccaaagttaaccagaacggctgtcatagatctggtaacaantntcntggagactaacatgggaatcatcgctggagtgcgngtnggaanncgnattctcccagttaattnggnatgctgctggcctgctgtctgttccccggttcactcacgggccaatcaagtatgaaatggcgctaaggaagaagatctgtcagcaatgacgggacttaggagcaccgtttctacaaggcgactggcaggacaccttggacaggaccttccgagaatgttaagccagacgtttacactggcctctcccttaccctataccca

SEQ ID NO: 693083 - DNA, 865 bp, Homo sapiens
agcaagaacggctcgtgagggcggggcgtggggggggtgtagtggggggaagagttgtcgcatgggcgccggagtggagaggggatggagacgtgaggaggggacggggcgcacgcagggcatgcctaaagggacacggccagtcaaagcccttcccgaaaaggtgataagtgacaggccgaaaaagggctaaaatccgggaagcagagtcccaaaggctcggattgcatcagacaaatctattgcctccagagacgaataggataccagagggcaaccggctagggatcgtaaggcagcccagcagaatgaggacccaagcttttaaaggttgggggtaagaatgcacggagctgaaagtaaccgagggtcaaaaccgggtggacgtatctgcctgtgggggttagggatccttatgagagcccacgaataagatggaaatactcttccctctgaatctcttagatctcaggaacaattagccagaatatacatgactcttccttgtgagggccctattccttaatcaatttaggataagtgtggacactttaagtaataaaactcaattatgttcttaaggccttgtaaaccacgttacattcgaaggggacagaaatcattctaagcaggaaaaaacagtccacttttagttttttcaagtctctctctaataactaaatgccacttatttgcattctccttgtggatttctttgtcacctaaggtaatgcagtttgatgagtgctggaaagcttcttaagtgcttacagtatgttttcattgtttgcacggatcactggacatcaaagatcattgcacttatgacaagaccttcttttcattctgtactccagctgacaac

SEQ ID NO: 693084 - DNA, 469 bp, Homo sapiens
agcggagtatggcatcgaggagaatggagaccaaacctgtgataacctgtccaaccatcatatctctcgatacggtgcggcggatcggcatccggcctttctatgcgaactcacaatgctctattgtgccatcgactgcacactatgtgtctggctgtgatgctgctactgtcggtactgatgctgactgtatgcagtctgtcggtgtctggtgactcgtactgatcagtggtcgctgagatagacaccttcctgaattacacggacgctatgcagacttacaagcatgatgagaggagccgcagggaccatgtgccgcactgagctggtggtgtgcaaactaccaactgagcacgcctatctgactgctccccacttgatgacaatgatgtatccgataaatcgagtgccacaagtacaagtgtatacgtactatctgaatactggatctctgatggtgatcatctca

SEQ ID NO: 693085 - DNA, 411 bp, Homo sapiens
tgatgtggtgctgctggggtgggcccggtgatgtgatcgaggacccgttgcgatgcctgcgcctcgggcaccaatcgagtgtgtgaagcatcttgctgtcctacggggccaaggtcaaccctcccctgtacaacagcgtcccccctgcacgaggccttgccatgagcgggcagtcccgaatgtgtgaggcttctcatcgaccatcgcgggccaatcttggaatccgcaccgatctgccatttcgggaacccctctgcacgttgcctgtgcccggggagcatctggactgtgtcaacagtgctgctcaatgcaggggcgcaccgtgaactgcggcaagcttcatgagaactgccttcaacacgcggccaggttccagaatgtatgacctccatcggaacgcttatcgagatt

SEQ ID NO: 693086 - DNA, 106 bp, Homo sapiens
tccactgctccacgccagctaggcaatcatggcaataggcacgcggtctcattttgttggttttcggcaactgcaggcccatgcattcaagcaggcagctggtggc

SEQ ID NO: 693087 - DNA, 100 bp, Homo sapiens
ttgtcgatcagcaggatccttttatgtttgcctggctgtctgacaccctttatcctcactgccccgaacctcagtgagatgcggtggagtgccttgtggc

SEQ ID NO: 693088 - DNA, 150 bp, Homo sapiens
cagattcgctcacttccaccctcagcgtccaccctcagtcatattataatatcgagacacctggccgcagcgtctgacggcgggccgcttccaccctacagtgtattataatctcgagacaccttccgagcgaaaggaaatgcacctgtc

SEQ ID NO: 693089 - DNA, 1650 bp, Homo sapiens
gaggcctgcgacacacgaccacttctcctgtccaggacttgcgcccgactggtgcagggtcgcggtgccgtccgtggatagagtccacatgaacctcttccatcttccgagcggagagaagtttcctattcctcttcttcttcctcctcctcttccacctcctcctcggcctcccgtgccctctccggtcctatggaccctgctccatggagaaggccctgagcatgtttctctcgactgactttggtcagctcttcatgcggtccccatctcggagcccctggtccttcccatgtcagctctcatcccacagtcccgctccggtcggggtcagcgtaatatctaagtacccttacgcgtatgactgccctatcgatgtttgccggttggaccgttgagatgacctttctttccatcctcgtacatgaccatcatccgtcatcctatctctctcatacctaatcccatcacttcgacgtgctcgctgcgtgctcgacgaacgcttcggctgcgctttgacctgggtcatcctgcgttcattggacaccacccttctctcgcttcaactatatcgttgcgcaatcgcaatgcctgtgataggatccgttggtgaaccacaggagccgctcggggatagaactccctcagagcgatcatagctgggagaagcgaacgaggaaaatcgcgtcgagcatcattacgcgggggggccacctggtctgttcgagcccctgtccattagacacggaaaaccaaggtgtccatgaaaggaagcacctgtacccggaagcgggggagggaatgcgttagaattcctctgattgtttggccctcctttctccctttggcctccttgtctcccctttagtccacccgcatggcttggaaaaaaggccgagggacaaaagggagacgggcgtacatgtataaattcgccccacctctaacgaagaaagggcgtcccacggggagcaattctttgtcatggccccaggaggtgttcataaaagggacgcccgaagagggaagggcccgaaggagatcccccaattgggtctggggttcgcagaacacccccactcggagagacacactacaggtgagagccaccaacctggagagggggagaaaccacaagaggggtctctccgccgtgatgaagaacacacgcagcggtggtaccgcaggaaagaggagagaaaaaaccccccaggaggactacgcaaagggggggagggaccctggctggacacattcgtgtcccacccaacagctaacatcgtggcgtgcctcgagcgagcgatccgaaagcaaaaaggcaagacacgtaagacacaaggaacaagagagataagttcacaccgcgggagagaaaaaaacaacccgcgagaatagaagagagcaccccccgggtgagaaaaaagtagaacagaaacaaagacagacaaaaaaggcctgcaagtgcgccgagcacacatcagagagaggaccgacaacagaggggagagcaaaacagaagtaagcggaaagtagaatagacagccaaccaggtgagagcaggcgagaacacacacgcaagacagcgaatgcacgagcggacggccaacacataccgaacatagaagaaaaacgcgatgactggtacgaacg

SEQ ID NO: 693090 - DNA, 182 bp, Homo sapiens
acaccttcttagaaacttgatagttggatgtgtttttcatttggcaaaaattcaatgtggcttagccgtgggatgtctgaagtgtcagaaacagcactgtagatgtactggtttcgcagagggaaaatatatatagagatgcactacaccccctagaagaacacactgtaacaacgactgaa

SEQ ID NO: 693091 - DNA, 881 bp, Homo sapiens
tctttaaacaaactttttttgagtgctttctaggttgccaggccccaacccaggcctgttaatacaaaatcttccaacaaaactccgttgcccctcaaggaccttacagtctctatacgtggggagaactgcccatttaggcaggcaatgtgtgaccccagagtgtgtttcttgtgttagttagtgccagggtgtgggggtctcgggaggagagattttacccaaagcctcctttgggaggaagctcaagtctcataagtttgagattttgacaagagaaagtacccttttcttctgtggtgcccacaaacagaaaagagaggagaactccaagatggtggacaatgtgagaagaacgcccacggtggcattcttccttgagatctacaggggacgcgctttggagcccccaaagatatgtgcaaaaaaaggcgcaattgttgattgatagacccagaagagggtgacgcagggaccaaagggaccaaccattgaatgtctcctcacaaaccccatgtgcgtgagggcggtctccaaaccttttatctccgtgagggccaaggcgggcagtcgtgaacacattgattgaggattgaacgattgtctcgatttccccccaaaagaaatcccaagaaatgaacccggcagcggagggtattgcatcttacgacgagggcaacaaaacggggacacttgttcccaccaatcacaaaaaatcacaaaacatcctcccggcggatcctttttattgtcgggttggcgggaaacaagagtctgttttgtaattgggccatatggtcctaacggtttgttcctcggcacccccttcttctgttgccccaggtgtgctaaatccggccggcccccctaaagggaagcga

SEQ ID NO: 693092 - DNA, 267 bp, Homo sapiens
  misc_feature (1)..(1): n is a, c, g, or t
ntaggcgactcctagtttgcagaataggtgggaaagatgtgacttgtactttggtaaggagatagggaacggaactaaggctattactctgaagaaagttggggggccaggtctcctattctttttgctgaggagatagaagatcaggtcttgtattccataagaatgggatgggcccggggatgcctggcataagccttgcactgtgaggtgcatgtcgaggcttttattctggtgagaggacatggactctctctctcccctcag

SEQ ID NO: 693093 - DNA, 324 bp, Homo sapiens
  misc_feature (164)..(164): n is a, c, g, or t
  misc_feature (219)..(219): n is a, c, g, or t
aaggggtcagtccatacaggccacattggcctcttggatccccagttggggggagggagcccacccagaccttcctgcattcagagcctgagccagccgcccactcccctcaaccaccagccctgaagccatatggtctttgccccacgcacaaagcagagcanccgccaagcacaggggcccccacagggcaacggagtttggaaagtttcaattttncgaattgccagttgtgacccactgatggcccacagaattaatttagtgggttctgattgggaattttaacaaaatgaaatagaataaaaaatatccggtcgggaa

SEQ ID NO: 693094 - DNA, 81 bp, Homo sapiens
  misc_feature (32)..(32): n is a, c, g, or t
  misc_feature (56)..(56): n is a, c, g, or t
gatcttcttcacaccaagctcatggttacatnccgtgaggtgtcatgaagaaagtnctgttcaataaggttttgtaatgtt

SEQ ID NO: 693095 - DNA, 1267 bp, Homo sapiens
gcagaatcctgaccccgcgcttcccagccccatgctctctgcgtggtccctccgcattctgccctcaccaccctgcccaaacccaccaggcaaagccagagcagcggccgtctctgccacagccaggaggcactagcatggacacgatcaccagcactggcaccgtgattgcacagcatacagatctatcacatcatgccatagtccatagcaaaacaccttgagccattccatctgccacttggggaggcacctaggaggagcctctcccaatggccacacctcgagcattaactcaccaaagacagctcattatcctaaataaacaacactattgtgtggcggccaaaacggatagccatagagggcaaacaccagacagcacagctaacgacgaactgggagccccctttgagcatatagtgtgaccacccaaggctagcgccacttgaccttgacacccgtcacaacggcgtggacgcaccccttggagccccttggccattccaaaccatgggcgcgcccattggcttctcgacgcgtatggaccatccaggagttccagttaacccattcatgcgcataaggcccaatactacacttgccctcgtctcgggagtctccgattaaagactgttgtactcggacaagggtacacacccgaaaggagtatcaaagccataacacggcggacaccccccagcgaaggaaatttcaaatgaggggcacacactgcaagatacatcaggccatgtgccctttaacgcgttacatccagttggatagaaacggcgtgtcaacaatttcccggaagcccatacacgtgaatcccacaggtgggcaccattggatcaaacaccccatttggagggccaaaggcactctgtttggaggcactcacaccaccgcgacggagtggaggattcatcgaacaaacagcaattattaaaggagaacacccacacaatgagagtgcccactttggaagcccaaatccgaaggagcgcaaaacgacaacatttggcaacatgaacggtacacattttgaaggagacccagcacaccatttgttccctcaggcacgagatggaccctccacaagcaccattctgacggcagatgtcacaccaacaggaaagcaacaacaacacacaatacgactgtgtcagtgacacacccaacagaaaacaccacacatttcaacacccaccaaactacgccccgttgtagagagaaaaacagacatcataggatgggaacaacatct

SEQ ID NO: 693096 - DNA, 388 bp, Homo sapiens
  misc_feature (91)..(91): n is a, c, g, or t
  misc_feature (104)..(104): n is a, c, g, or t
attcatcctgctgcacttgggcaggttgggctctcacaggatctggaggagacgggatatctgtggagcacattggcagtcacctgcagtncattgcgacagtnctccccactccccagctttcagaaacagggttcatggctccagacgagagagcttgagatacaaggatgcaacaactcacagtcagagcccatctggggacaccaggaccgaactctgaagcaggcccatacagtggacagcgttctggagtcttgcagagctccttctgaatcccggcactgcgcctcctaactgtgatcatgagcaagttgccaaactctctgagcttagtttctcatctatggaatgggctaacactcaccttacaagacactgtgatatt

SEQ ID NO: 693097 - DNA, 123 bp, Homo sapiens
ctcacctccgagagctagactttggccaggcatggctaaaaccactggttaacgatgtgacagttatgatcttggagattggaaatctttcttccacattagagtcttacctcattcctatct

SEQ ID NO: 693098 - DNA, 139 bp, Homo sapiens
agaatatgacagaagcgccctggacgccccttgaatattacatctataagtataggtaatcttcagctgtgccaaaccaaatttccatattcttgggcatcagacaaaagggaagaattactctatgtctagtatatct

SEQ ID NO: 693099 - DNA, 692 bp, Homo sapiens
  misc_feature (15)..(15): n is a, c, g, or t
  misc_feature (155)..(155): n is a, c, g, or t
  misc_feature (212)..(212): n is a, c, g, or t
  misc_feature (354)..(354): n is a, c, g, or t
  misc_feature (395)..(395): n is a, c, g, or t
  misc_feature (418)..(418): n is a, c, g, or t
  misc_feature (528)..(528): n is a, c, g, or t
agcggggaactggcngtggggctgcggcggtggggacgggcacggcgttctgtgacatccccccgctcccctcgtcttctcccggctggcggcgacggctcagctgcagcgggccggggcgtggggcctgggttttgtgacatcgtaaacatganccccaacagtgggacttccctgtggaatatgtgccggcctatggccttgttactctnacgggcctggatgtagtttataatgcagtccatcgagctgtctgggacgccttctgtgcaaatcggagagctgatcgagtaccaatttctttcaaggtgctcccaggtgaccatgagtatcccaaatgtagacccaagagancttcatatgagtggtacattcctaaagggatcttaaagacnggctggatgaataagcatctgantctggtgccagccctggtggttgtgttctatgaactggactgggatgagcctcagtggaaagaaaagcagtctgagtgcgccaccagagtggaaatagtcaggcaaagtntacaaggaagaaacacaaaagttgcagtggttctgattcagaagaaaacccctttggccccagggagaagatgtcattgcttcaggacagggctgcagctttatgcacatgcatgtgaactctcaggaaagtctaagtaagaccttgccgcacactgaccaacc

SEQ ID NO: 693100 - DNA, 1272 bp, Homo sapiens
agcgtgggggtgtgctgctctggccggcatctggcgaacggccggcgagacgcggaggctcccccgagattcatgctcgagaaccgagggcgggggccgtgcgggtgcccgtatcgcggctcgcgagggacttgaggcagccgggaggtctccggtgacaccccgggtgctctatacagaacgactgaatgggctaccctcgtggtacccacgcactaggaccacacctagaatcttgaatgctagtcaagcatgctcctgtgaggctcacggatttgcacgtgaaccatgggctcgtggaacataggggacgtctgcggtgcgtacaacttcctttccgaaaccaagtcattgcgctagcgtgttgctactcgaaagatgtcacccggtcactcatatggggagtgaaggaggaccgaagaaaccctcggaacctcaaagcaggcctgagagggggttgggcatgctctctcagctggattgagtgtttctaagcaaaccaccgtcagatatggctcgcctagtataaaggacatggcgtccacgagaatgacgtacttgtccgatgacagcgagtggcagataggctccacctccgcgcaagggtcacttgtccactacgactctcgtagttacctaggagtgcaccaaccctattggtttgcacctagtctgtacgaaaggacaaccatagtggaatctcgatacgtacatttgccacagggcactacaatttgggcggtgcgcgaagcgcctcgaattggggtcgcgtcgaaggaccactgcaagcgctctcgctcgacgagtttttggttggaaaccgtctctttcagcctaaacgcatagggtacgacagctattcggcgagcaaccaagggaacctgggccttaccctcgcagaaagaggccaagacttggctaagcgcaccaagggcgaaccgacggcaagccctaacttgggaaacggcgtggtttggtctgctgatgcccacccccttagtgagattggggtttacatacaattgtgggggcgtaggttaattcacagacaagtgaggaggggaagcgacacagagacatcaaggataaaggcacggtacaatggcggcaccccaaagacaaaggcgttcccgtaggcaaggcaacaggtattggccatgtcggccaaatcttagggggcggtaggcaaatttctcggttgattgggcgggtaaaaccccttttggagttggggtactacaaaaatggggtatcctctgtggaaaagccccg

SEQ ID NO: 693101 - DNA, 1015 bp, Homo sapiens
tcgttgacatttaaactctggggcaggtcctcgcgtagaacccggttgtcagatctgctacttccccccgagaagcggctttgagaagtgtgggaaccagcgccaccagactcacctgacaccccaccctcggctcacagggatctgagaattgctctcacacaccaacccagcagcgtccgtggagaaaactctcacgagcaactccgtttaaaataccgtcatttcaaaccgttgtggtctttaagcaacaacaggggggggggacccaaacaacaaaaaccaaaaaaaaaaaactgaaaagaaaaaaaaaacgcgcccttcaaaaatcttcttgggcagggggcccttgtgtaacaagggaccgaaaaagagagagggaggcgcctctcttataagggggggaagaggttttaaccccgcgggggggggggagccaccagtttgggttgaaactcttctcatattcctcaaacggggcgcgggtatattccccaagttatctatcaaaacccccggttattagaaacccccgggggatctaccgggaggcgcgtgcacagccaatgctcccagaattgcagacattggtccaccgcgggaggctaaaacacagctggggggtgctttggtccccacggaggggccccatggcaggacttccacccgcgggagagaaacattcggacaagactaaccacacaaggggagccccggacggggcgaatattccccgacatcgggcggggttcaccacggcgggggtcgaaacaaactccggggcagggtatctacgaagggggctccatcacacagggcaaccggggagtagcccaacggtggcgccccaaagttgtagcaaaatggccaaataagaggagaggcccccactttggtgggaaccacacgattctaccgggcggctgcccacgaacacacacgggtgctaacacagttctagccggctgcaaaacatagtcgctgctgtatatcttctttagaccaaggacacccg

SEQ ID NO: 693102 - DNA, 215 bp, Homo sapiens
ccggacgctatgcactgtcacaagcagtccacctgtacttcgtacctactagtgattatgtcactcttaaagcacagcggtttctcacaagctatatacagcagcttaaaacctcagtgtatcttttacacttgatacacaattaaaattaatttacgacaaatacttgtcacagaaatgtatgtaggcacatagaaactctacagctttactgg

SEQ ID NO: 693103 - DNA, 153 bp, Homo sapiens
agattgatttagagactaagggaatttacaactaaagaattagtcatctggtgaaaaggagacttaagaatgtttagggctggctgggtgactcacatctgatatccagcactttggaggccaagcaggcagaacacttgaaggagttcaaga

SEQ ID NO: 693104 - DNA, 106 bp, Homo sapiens
tcagagtgaatggttttcatgcttacttatactgacattagtttcttctatagggtgataaattggtccaattggcgtgtgaggagttcagtttatatgtttagtg

SEQ ID NO: 693105 - DNA, 337 bp, Homo sapiens
taaggatcccagtaagcgtagggacatgccctgcagctaacatctcatctgaggctggccaacaggagctcctgcactctcccgggcacctgggatgcgggcagctggcagaggacagggccagtgcgcccagcaggtacacacacgccctgtgatcacaaacaagcatgctgtgggcaccagcgggtacacagcggcctcttcaaaggacaaaaacacaccagaggcctccagagatgggaaagggctgagcaaaacagcctggctcaggtgttccgtggcagggccacagagcagttggacaagaaacacaacaggctcagggccccagatagac

SEQ ID NO: 693106 - DNA, 123 bp, Homo sapiens
caggcaggtttttataaacatgctctgaagtgggaggtatgggctgacagcctccctatgtatttctaaaaacctccatggaccgagatcataggatgaagccagtaaagtcatggttcagct

SEQ ID NO: 693107 - DNA, 526 bp, Homo sapiens
cgactctactctacaagagcagagtgccaggctgggcacagtggctcacacctgtaatcccagccgcttggggaggccgaggtgggtggatcagtgtgaggtcaggagttggagacgagccgggccaacatggtgaaactccgtctctactaaaaatacaaaaatgagctgggcgtggtgtgtgcgcctgtatgcccagttactcaggaggctgaggcaggagaatggcttgagcctggtaggtgaaggttgcggtgagccaagatcgcgccagtgcactccaggctgggtgacagaatgagaccctgtctcaagaagaaggaaaagaaaacatatctttaagttcctttcatgtaagaacgaggcttataagtttatctttccccatactcttgatcctcaccagagaatcttgtccaggccaaagaagagagggggggcttacatcagaccgcgggatcggacactaaacgaacttaagtgtatataagcaaaacagaagagtcgtgtacgagcagaaactctg

SEQ ID NO: 693108 - DNA, 217 bp, Homo sapiens
  misc_feature (85)..(85): n is a, c, g, or t
agttctcaacgggtgctgcaggtccaggccacgtgctgactccagagaacctaaacgcaatcgtcactgggagctcgatcccttnatcaggaatgccgcacgcctgtggcgtgaccacaggataccagccaggcagctggggaaccaaacgcctgtatctgtcttgtgctcttatcaagtcaactcaacactccacactttccgttcagagcaccca

SEQ ID NO: 693109 - DNA, 516 bp, Homo sapiens
acaccatcgttaagtttagttgtgattatgtggctctaccatacagaagagtttgttaaaagtcaaagtgctgggattacaggtgtgagccaccgcgcctcgccaatatttttattatataaaaatgtgactgtaggctgggcacagtggctcttgcctataatcccagcgttttgtaaggccaacgcgggaggatcgcttgaggccgggagtttgaaaccagcctgagcaacatagtaaaaccctgtttatacaaaaaataaaattaggtatgggggtggcatatgcctgtggtcccagttactcgggaggctgaggcaggaggatctgttgagctcaggagttggaagctgcagtgggccatgatcatgtttttatatctcagactgggtgacagagtgatactatgtctcagtactccatagtcttttagactggttacaaattctttttccttttggtagacgtgagtgtcactatgttacccaggctggtttggaactcctggttttgaat

SEQ ID NO: 693110 - DNA, 439 bp, Homo sapiens
  misc_feature (6)..(6): n is a, c, g, or t
tgcggnagagagaatgaatcaatttatatttttttggggggggagtctcactctgtcccccaggctggagtacaggggcgctatttccggtcatgggaacctttggctcccgggttcaagtgattctcgggcctcaacctcccaagtagctgggactacaggggtgcgccaggatgccggcaaatggtgttttggaaatgcagtctcgttctgtggtccaggctggagtgcagtgatgcaatctgggttcaccgaaacctcgtgcctctggggttcaagggatttctccgtgcctcaaactccgtgagatagcagggaatcacagggcgcccgtccaccaaggcccaggttaaattttgggtatttttaagttagaagacggggttttcaccacgttgtggccagagcgggctctcgaaacctccgtgaatttcagggt

SEQ ID NO: 693111 - DNA, 310 bp, Homo sapiens
gctcgacgatatgcagatcaataaatgtgattcaagatgtaaggaatcctaaagacaaaagccatatgattatctcaatagatgcagaaaagacttttgataaaattcaacattgtttcatgccaaaaaccctcaataaactaggcattgaaggaacatacctcaaaataataagagctacctatgacaaacccacagccaaaatcatattgaatgagcaaaagctggaagtattccaattgaaaaatcgtacaagataaggataccctctttcaccactcctattcagcatactgtggaatgtcctggc

SEQ ID NO: 693112 - DNA, 149 bp, Homo sapiens
agtcggacctcagagctcctgatgacctccggcctagccatgtgatttcacttccactccataacgctcctcatactagagcaggctgaggcgggagaagccacaggaacatcaggaaggtggtttcacatctgtgtgaaacctgccaa

SEQ ID NO: 693113 - DNA, 1068 bp, Homo sapiens
agtgatacgttattgtacgtacactctggactatcgtgtggggtactactatctcatctgctagtcgtgcttctagaatgtgtgtccaggtgtgtatgctacagacactggaagacgttgaaaatccacagactgacaggagttagaacctgaggtctcattcagctcctatatggtttttgggctcgccagttgaccgcagttctctgaattactatgacggtatccaaactctaaagtagcagattggacatgtgttatctacctttacgatgccatagtgctcacaatcaacgccatctactgtgtgtacttttccttgtgcctatgcttgtacgggctttcaatcgatccttattcagctcttaatctccggttggctcaaggttgctcagactcggtcatcactagagcgtacaatgagtaatgataacgcgactatcagccgtttgtgtgtatcatagggttgctcggcaatggtgagcgagtgaggacttgatctctttgagtggaactcgctttgcctcttgaggcgtaacactcgcagtcgaccaaaagtatatttaaggcctcttgagtaggaactgtagaaatgttccgtacaaagtaccaccgacaattcagggtctggatgtcagtggagtcggcgttagggattgtccgataaccagtcccgaactgaaagctcgttgcagctctgctcacgtccgggaatacaaagcagcccgtcaaccgcaactcctggcaatggggggcggttaccccaagttgcgacctacgtgccttggaagatacctcaggcgggctttgcatgaagctgttgacgatcgtcgacctgcgtactggcaaaggggccatgtctcacgggtgtaagaacaataacgtttctacaggtctcctgttgaaactctctggacaggcatcccatgattccaccacccgtcgaaagtggttctgacgaaggtcaatttcccagccacagaacttctccgaattgacacaaccccactgggatgtacacccaccacccttgcacatctcataaatcttcaagacaaggacactaca

SEQ ID NO: 693114 - DNA, 110 bp, Homo sapiens
aggtcagaagagatagaggggctcagcagtgcagtatctgtaaaactgactgatcccacaaaacacaaaccagcagacagcaccctccccctcccctccccccctggatg

SEQ ID NO: 693115 - DNA, 1261 bp, Homo sapiens
  misc_feature (1178)..(1178): n is a, c, g, or t
aaagcgtctgttcccgctgttcctttgctttgatagttcaataatggataagacaagtaatgccattccagcggttgctaaaccaattcctgccccaatctctaataccgctagtcccatagctaacatacttttagcactttgagcggcattagtcccaactgcttttgtaccagttgcagcagcagttgatgatgttgctaccgctgtgttacctgctgccattccaaacaatctagcaacaaaactaaccattcccttaccagcaccaataactgctgaacccataccttttaccagtccagtaatcttcccagcgttggtaataaatccacccaaagcagtaacaactggcccgatagctggtgctaaaccaagcatttgacgtgaaaactgtgccattgaactattactagaaccagcccaacttaatgcgctatttgtcatgtcaaggaacgcaccagtgacaccagaagatccagccatagccttgttgcttaatgcttcccagttaccaccgacttgttcgatcttagaacccaagtttttctgcatttcgtttgcttgatcttttaggaagtttgtagctgtttgcgtacttcctgacgctttatccatttctttggtgaaagcttcccaacttgtggtagcattaccagtcttatccttgacactatccatcaaaggaagaatagcagccataccagcagtaccaaacatagccttcaacgctgctgctttatcagaactagtcatcccagctgtcgcgtcaccaatttcattcaaaatttttggtaacggcttcatgtttccttgtgcgtctgtcatagacaaaccgagattgtgcatcacaccagctcctttttcacttggagcttgcatgagcaacaaagcatggttcaagtcttgtgacgcttgtgcagcactgaaaccacggttagtaagtaaaccgatagcggtagacgttgtttgcatgtcgataccagcgttgtgtgccgtaccaccgatagtagctaaagcctgttgcatatcttcgattgagccgttggataggttagcagtttgcgttaatacagcagcagcacgttgtgggctttgaatactatcaccccagatgttcatcgattgttgaacaactgacgctgtttgctgcaaatcagcaccagcagccgttgcanttgcgcaatagctgggaactctgatttaattgtcttgatagacgctccgtcacgagccatggctaccattactttcgcagccc

SEQ ID NO: 693116 - DNA, 242 bp, Homo sapiens
aattcaggatggtgcagattagatggggcgaaaggagtcaggttaggggtttatgccgtgacattagcggagagcattcagcgatgagtgatgtatgcgcggagatcgagttgatgtagagatctagtgtctaaggtgtcatcagcacgaaatgggcgcgagcttcggcagccttatattgggggaggagggttcgcgatatgccgcaccttttgaatttcccacccctatcgttattcatg

SEQ ID NO: 693117 - DNA, 1580 bp, Homo sapiens
  misc_feature (102)..(102): n is a, c, g, or t
  misc_feature (575)..(575): n is a, c, g, or t
  misc_feature (933)..(933): n is a, c, g, or t
ccccgagtgggttataatatatttcgttatacctatccaccacacgaggcggctccggctgaaataattctcttcccccccccataagtggttttgacaccnttatatctattctttcctcccgcgtgatgatattgagcgaccccctcctttgggtgggagaaaacaaaaatagaggactaattggtcttctttagacgcatatatggaagaagccccaagaatggccgctttcctcctatatagggtgtttatatattctgcggtggggcaccaccccccccgcgaaagataagtgttgccacacgtttgggggatatattatgatcccgtgatgacacctcctctccggggcgccaataatatgctttttcaccgcccccctccgtcgtttgttcccaacttaacttttctctttcgccgtttattttcccccgcacacccgggccggttccaaaaaaaggttaatttttttatgtccgttggaccctttctgccccaccaacccaccctgtcccaccccgggggtaggccgacatattatttgggaagaagttgagtttcttcgaccgtgngcccaagagtggcctttcttgggaggcgcccccttaatgggggagttttccaactccgttttgtgcgttgtgttttcacacccccgctaatggggtgggggcccccttcgtagacctcggcacaactcttgtgaatatttagcggccacaaagccttccacttcccacactagtggagcacacttcgccggtgatgctatatcacgcggagacaccccgcgtgatacattataacgcctttggtaatggcccgcacacctctggcccacacgtagatgggtgtcgcgtaggatgcacaataaggggagaggctcgttatatttttggccacacctctcaatataggaagagggtcttntacacatgttcacgctcgagattttttcgccgctcatattttctctcacaggggttatacacacgcctatggagtccccacaactctatacgcccccacagaagtcgcactctgtcacactaatacactaatttcacattcgcggcgctataaaatttctaaaaactctttcttctgcgccacacacacacacactctttcttcgcgcgcctcatattcccgcgagaatgtgccccgcagcacgctttatatctctcgcgagactatatccctcgcagatggcactatacacccacacactgtgaacacactccctcattacacattctcgttatgggctcacattgcactgtgttcttctataccacgccacgctataatatattataataacatgttttactgagatttgaggaagccctttgcgctttcgagaagcgcagaaaggtccctaaatagtagagagaaccctcccactaaaacctcggaggtgagactatatgggagtgccccccacccctcaccaccaccacttcgagagaaacccgtataacactataaattctagagccacaaaaaggagaagggattcgaaccccccacaagctggtttcaagcccaccccctggcctccatgactttttcca

SEQ ID NO: 693118 - DNA, 423 bp, Homo sapiens
agtatttttacaagatacccaccgagatcagagcgtaccccatgccggcattttcgctgacgacgtacatcgtagctgggtgcgacggattgttcagctgatcgacgatcgatctggccgagaacacatcggtgagtacccactcgtactcatgatcttcggaatagatagaaacttccatcccgagattttggtaaaccatctcgaacttgggtgaacgatccctcagttcgtcttcccgtacagttactacccgcttgatgtcgtcttgagttccggacttacgggatttaagtccgctgtcgtcatgcggagaggtgggtcgaacttccaagctacctaggtacctctccctgtattcgaacgtcccgatcttcagggggtcgcgatcattgaccgcctgtagcttcttactcatcactc

SEQ ID NO: 693119 - DNA, 205 bp, Homo sapiens
ggtataagcatctaaatagagcacttgagtactcatctccctattaggtatttgttattgttttactcaaaagaacattttccatcatatggtaactgtgtttatcatttggaggaaatgccaaactgtttcccaaagtggctgcaccattttacattcctactagcaatgcccgaaagttcctttgtcgtatttttactttcca

SEQ ID NO: 693120 - DNA, 567 bp, Homo sapiens
tggattgggagtcggtttctgtcccccaggtgggagtgcaggggcccgattctcggctcactgtgcaaggctcagcctccggggtttcattgccatttctcctgtgcttcagccccccgagtgtggtggggactacgggcgcccgccaccattgcccagctaatttttttggtatttttgggtagagagggggtctcgccattgttgggccaggagtggtctcaaattccgtgacctcgtgatccgcccacctgggcctcccaagggggctggggataacagggcttgagccagggccgccgggcccaccagtcctagtggtctaaatggtgctggaagagaaatgctgggagaaaagaaaactgaaacctagagttgggatagtctatcaactaagtggagataaaaaccaatttccgggcggggcaggggggctcacgccttataatcccagcacctggagaggccgagggggggggactcacctgaggctcaggagtgcgagaccagcgctggccagcggtgtgaaccccggctctctactaaaattcgcacaaaaaaaccggg

SEQ ID NO: 693121 - DNA, 1229 bp, Homo sapiens
  misc_feature (339)..(339): n is a, c, g, or t
  misc_feature (496)..(496): n is a, c, g, or t
gagagcgtagaaccagaccaagaggcacgaggtccttgtaggaactgtgtgatggatgatgaactaattatactgtattataagaaaagcataatgataccatagtcctgtgagtgtagatggtatgatgtaggcattgggtgtcaggagtttcatgggaaagttgactagtgattgagtgtgtagggctgtgggtataaaggaggggtgacatgctatctgggggcatgatatgctacaatcaaggtagattaggatcgggatggtagctggtcatttagtgcgttaggctggagttgtagtagataagtgccttgagaagaaattcaggatctgaanagcatgatgcaaactattgtgtcgccaaaaggttgagaatgggattgaatgtatggcccatgacgaatgtaatgaagggctacagatcgaaagtactgatgtgaccatcagtatctgcaggataacggaaaagatactatgaccataggggtgggancaggaatgtatcatgaaagcgctgaattctctacagtggatgactcggcagatgtgcataacttccattggatatgaacacgttgtgggtaagctggggcagtattttagatcatttcacgtagtaggaccaagcgttgataaggaacgagggtagatggaatgagttagataggagatgtgggtgggaccaagaatttttaggtggaaagtgttggaggggggaatggcttgaaaagtgtacgcccattgaacgaaatggcctcctatcaactaggggacccaagggaaaaatgggccctcgtacggaagattaagtcgggacatttggctccttatcttcatttaggggaaaggggatttattgtaaactacactccaatgtggccaaggaaaacgcgcaagaatcattgcatgtaatggggcctaatgggagtgcaacgataggttaagaagaaataaattcgtgacgacaacttgtcccaagagtgtgaaagttaacctcttttgtcaaaatgtggggaaccgaacgaaaggtggcgacactgggggaagatcgaggtgaaagtttgtctgtatgagccttgggtaaaaacttgctagaataaatatgtggagtcaaaagaggcagttagggtacgcgctggattggaattcggactgtgagacgcgattaaggtgtaggtacgggagaaggccaggtgcgtgtattcgcgagaaaatataggttggga

SEQ ID NO: 693122 - DNA, 1040 bp, Homo sapiens
ggagagagaactagtctcgagtttgtgttttttttttttaacaaacccggttctgtgggtgggtgtgggtataatactaagttgaaatgatatcatttacgggggaaggcgcttggtgaagttaggcctatattatctcgttggtcctttcgatacagggacggaaactttgaagatagactagaaaccgaccgtggcatttactccggtctgaactcagaatcacgataggacttaaatcgatagaacacacgaacctcttaaatagtcaggactgacaccatggggatgtcctgatccaacatacgaggttcgtaaaccctcatggtccgatcatggactctaaaataggatcgcgctgtaatccctagggtaactcgccccgattggtcacgtaacgggatcaaagagtcatagacagagacgacatcaaacacgtggcgcaaatctaaaacacatgctacgtgactacgaaagtgtaagagctcacagaatcacgaggataaaaccaaacactagaaaatcaacacaagacgagaccagagcacgcacaaaggcacagcagcgacacagccaggcaccagcaagaaactaaataaactgagcgaacaaaaagagaatacatgaacagatacgacacaagacccagacatataccaggaaaggaacacgtaacagaatacacagatggcaaacagaaaacaacaggacacaatacatacaggaaaacacaaagagaaggtcactatataacaatgtaaagggaatgaaagaatcagaatcaaacgtaatacaaaaacaagtaagtactactaagaattcatttcatcactactgtctctcacaaacaataatgaatgccaaacactaacaacaaaatcaaaaaacaaaaaaacaatatacaccataaaatatcacacatcctaatacgattttgttgttctctctctctctctcttcatactcaaactcataacaactatctaaaaaaaccaatcaacaatcaacaaaaaaacaacaaaaataaaaataaaaaacaa

SEQ ID NO: 693123 - DNA, 237 bp, Homo sapiens
  misc_feature (205)..(205): n is a, c, g, or t
  misc_feature (220)..(220): n is a, c, g, or t
agtggagctcctgggtgcgtgtccagatgggaaaggcagggttgtatctgtggggacctgacaagggcaggggaagcggagaccagggtgcaggcaccgcccccacccaaggccgggcccagccagagaaagggcaggccagggcagcaggtttctgtatgtttgataggtttggctaggctctcttttgttttgttcataattnaaaacaccttaatcncccgtcttacaaaaaaa

SEQ ID NO: 693124 - DNA, 394 bp, Homo sapiens
taaaaccctagcccaggggctggagcaggaaagggaccttcaaagtgaagactgccctgtcccccagctccttttgggttagattgaaacatgggcttcctaatgggtttaatcctttaaaacaaggagttgtgggggaagggtgtcgtgccctcctaaagaaaggtacacagttgcccggttgggaatgtgcttggccctgaccctgcgggcatttgactggttttccagctcaggaaaaagaattttaaaaaggcttagcgtgaaggggaatcaaaaaggaggttgtgatttggtccaaggggcctggtttagtgccggaaatgtcttattattttttttatataaatattttttggagtaaacattttaaataaacaacattgtttactga

SEQ ID NO: 693125 - DNA, 115 bp, Homo sapiens
aaatctgcggttcgagggcggatcctctctggcgtgtgaccaagatgaagatgcagagtaccattgtcatccgccgagactatctgcactacaaccgcagttgaaagacgcaggc

SEQ ID NO: 693126 - DNA, 358 bp, Homo sapiens
ccggtcgttctagaggatcccgaaaccctaatatacggatgactatggccctaccttgtctagcaagacacaaagaagtccctgctttccaaatttccaaatcccattcattcatgacatttagtgtggcttgtgagaagcctccctgccagctgtcgccattacctggaacaattaggtggaagtgtagggcagcatatcagcatcctgagcatacatatgtggtggcagcaggagacaggggacaggaaaggaagtagggggagggtgtcaattactcaggcagtttcttcttcatttttgaatagtcagctaggctgtggttccaagatgggactgtgctgcgtaattagggtta

SEQ ID NO: 693127 - DNA, 123 bp, Homo sapiens
acctccagttaggagacaggccatgcctttcaagatgcatgcagctgactgattatcatcctcaagatttccgcactgctgcccaccacaagtatgtccgacaagcctggcagaaggcagact

SEQ ID NO: 693128 - DNA, 595 bp, Homo sapiens
agcgggcgaggccttgcatccagagtcagtgtggtcagtattcgcaaactctccagactcatctcttctacgctgctctaacactgaaggtcgacacaggaaagtcgataatgattcaaacacacagtttgagaccctaagcctatggagtgcaatccctatcttgtggacatttgaaaagtcaaatagcctgaacatggcgggggttgtcctggacagttctccgtgatctgcagattcacggtgcacacctttctatatctttgcctcttgtgcctagttaagtgggaatgtgtgtggagataggggaaatcacataagctggtacgaagtatggagtaattgcttacccagtgcctggtggaagtctgatagcgtctctgcacgtgacctctgactaagcccatcccaggagacggggtgaagctattccccacactctcctgtgaacactggagtcttgcagagaccagggagaacccacgtgctatttcccaggaggctccaggacttaggaaatgtgtgtattgtagtgaaacaataggatcgtagtgacatatagttactatttcatgacaagtagatctttctagaa

SEQ ID NO: 693129 - DNA, 95 bp, Homo sapiens
tcgatacgactttctttctttctttctttctttctttctttctgtctgtctttctcttcctcccttcccttcccttcccttctgtcgtcttctcg

SEQ ID NO: 693130 - DNA, 306 bp, Homo sapiens
cgttgatgcctggcgcactatactatagttccgcaggggaaatgatgaaaaattataaccaagcacaatatagcaaggactaatacccctataccttctgcatcatgaatttaatctagaattaactttgcaaggatagccaaagcttataccccctaatccagacgagctacctaagaactgcttagagagcacacccgtctattttgcacaatagctgggaagattcataggtagaggcgacgaacctaccgagcctggtcatagcttgttctctctgctattaatttctaagttcaactttaa

SEQ ID NO: 693131 - DNA, 180 bp, Homo sapiens
atgctgaatctgatagtgaccgaagcggcagtgcaggtggcagattcagagcggcgtatctcaagctccgggccataggccctcttccccattacttttgctattcaggctccgagataagatatcatgacgatcaaagataatggtaggagactgtgtgttgaactgtaaaatcttgga

SEQ ID NO: 693132 - DNA, 182 bp, Homo sapiens
cacgtagggcttcttctgtgtggacgaggggaggctgccccacacccagaggctgctggaggtcatctccgtgtgtgatatgccccagagtgccgtttctatggccgccactccgccaacgactgctgaccgcaggaccgctgcccagtggacctgcatcgtatgggaggaccgggacacca

SEQ ID NO: 693133 - DNA, 200 bp, Homo sapiens
tatctctcaggatcccccattcatggggcctggagttcagcagtacgagagacaggccactagtatacgctatattacagtgcaaaactccgagtccctagagtaaggcagtcatgctgtttgccttatgatgtgatcttgcttgggcttcatggaacgtggttggtctcttgcctttcagctagaaactgaatagatca

SEQ ID NO: 693134 - DNA, 791 bp, Homo sapiens
aatatgcataggttgggctggggtataaatgaaaggagtgtgtctctctgctaccaggagatcatggcaggctcactggtaagcgatgcacgtgcctcctgagagaagcatgctcgtctggcccctgcacatggtccagttggccgagctgatgacttgcctgggtatgcccataagactctgagcttcctcagcacacctcacccatttcccagctcccaggttccttgatggagcctggtggagaagtgaactgagcatctactccctacatagagaatgcaggtggaccacctcatcaatgaaggccacaatggccagaggagctcctggagctacgttggtggcagtcactgacttgggcagcaatcaatgcagcaagtggtacttatccggctctctcacttgctgtctgaagaagccagaagatagaggcttgctcatacaggatgcccactttcatcaacttctctgtcatgctcaacagtcagatagcctcggtctggcatgtgtaccctctcgaagctgcttggagaagcctgtatgctcttgggcatccccaaggactccaatggagctgcagtcaggtggacgcaggaggtccgctggcgcatgcggaaagatcaatgtacaagcacctgggccttcctggcagaagtcctgtgccaacctactcacaggagcacgactcgcaggaagctgatggatgagatgtcaaaaactggcaaggctgtggacgaattgaggatccacacattagtggcggtcttgttacggtggcacctcttcgg

SEQ ID NO: 693135 - DNA, 943 bp, Homo sapiens
aatggatagataagatagtattctaaattcaaattcgtggctaggcacagtggcccacacctgtaatcccagcacttgggattccaagacagaagactcacttgagtacagtatgagaccagcctgggcaacatagatcttgcctctacaaaaaaaaaaaaaaaatagccaggtgtggcaatgcctgtagtctcagctgctgggaaggctgaaatgagaggatctcttgagcccaggaggtctaggccagagtgagctggtgatcgtgccattggcactccagactggagtgacagagtgagactggtgtctaacaaaaaaagttggatttacaacaaaaaaaaaaaaatgtcgcttgtgcaggggggctcatgcctgtggaccccagcacttccggagggccaacagggggtgggataacctgttgaggctcagggagtttggaaaccagcctgttgaccacacgtgggctgaacgcctccgttccctaagtaacaactatcaaaatattttacccctgtggactatagcgggcgcatgctgtgataaaccccggctaactgggagaggcttgaggcaggagaatccctttggaccccgggaagggccaagggtttgacgtgacgctgagattgtgccactgcatacagctggggcacacattgagcacaatctctccatctctaagataccccacagaccaaaacacaaactccaatttgcattgtaagatcgggcacctaggattcagttcctgaaacgtctttgtcacaattaagggcaaatacttataacgccaaatgtacctcggcgtctgcacacttttaccacttgtctttggccaaagggtatgctttaccaccggggaggtcgtcagccaccaatgtgctcttaacttagcaaccatgacctcgccggtctagaaaacgcattgtttcccacc

SEQ ID NO: 693136 - DNA, 601 bp, Homo sapiens
  misc_feature (179)..(179): n is a, c, g, or t
  misc_feature (192)..(192): n is a, c, g, or t
gagatcccggcagatacactcaaacgggaagttcagccacgtaacatagtgcacatgtatgatggcgcgtggctgcattcctctgtgtccagactatctctcccacttggctgtccaccctcggctggtcaagttaccggcagtgctgcgaggagtgggtctgtgacgaggatagtatncaggaccccatgnaggaccaggacggcctccttggcaaggagctgggattcggtgcctccgaggtggagttgacgagaaacaatgaattgattgcagttggaaaaggcagctcactgaagcggctccctgtttttggaatggagcctcgcatcctatacaaccctttacaaggccagaaatgtattgttcaaacaacttcatggtcccagtgctcaaagacctgtggaactggtatctccacacgagttaccagtgacaaccctgagtgccgccttgtgaaagaaacccggatttgtgaggtgcggccttgtggacagccagtgtacagcagcctgaaaaagggcagaaatgcagcaagaccaagaaatccccgaaccagtcaggtttacttacgctggatgtttgagtgtgatactgggcg

SEQ ID NO: 693137 - DNA, 853 bp, Homo sapiens
gtttctggtgactgcgggtgcacaccccccaaggtggtgcgcgcgccacaggtagcaccgtcgagctcaaccattcgcagtgtgctcacagcacttgtgatagtagcgtcattacgtcccggacgccgcgtgccttggtcgagcgttgaaagccaggtgcacgtggactctcgggcccgagggttcagcatcggaccccgaactctcctagccatgcgattgcctcgaccttcgtcgggctcgcgacgacgcattgcaggatcgctactccggtgctatgcgtcgcagttcgctccagcggtcgtggagtccctcggtagtaaccctggaacctcggagctggttagctagttggggtcagagcttaggtgcgcgcgcccctctagtgccgaggcttctctacgttgtgtgcccagaaggggctctgtgaggcgcccgctcggcttccgggccgtcctgaggttgcgtaggagcttgagcagtgagtgccgaggtctgcgtccacgacctatcgggctggtgtgcgtccccgctggcgtagcggccacgggcctgcggagcgggccggaatgcctgggccggatgggttggaggctgggctgggggctgggtgaccacccctgtgtggccccatgagacgagatcacccacccattgaccttcgtagcattgggtagaagaacatgggcggctctacaatcgtaacgacgctgcgagacaagggtcggtcgcaccacggggcgcagaattaggttggagcttgggctacatgtgtaatctacattgtacgccacgaagggtgtaggatcttggggggcgttggtccgcctttagaggttgctaggtacctagg

SEQ ID NO: 693138 - DNA, 110 bp, Homo sapiens
tcgcgcagtcaggcggccagtggtctacatcatcttctcatacacagttaatagacatgtccacttttttgacagtttctaaattacatatttaaaaatgtgtcttttcc

SEQ ID NO: 693139 - DNA, 231 bp, Homo sapiens
cttaaaacaagcctgacgataatgatgcccatggtgcacagcagcccagcgcagataagcccgccaaactgaaggctgtgccagtcatagtagacaggactgataaaatcatccaggtcatataggcgtccaggacaggaaagcctgccaggaacacaagcaggcccagggtcaacttctgcatgtcagagcgctggcctgtgtggtacaccaggctggagcagaggtacc

SEQ ID NO: 693140 - DNA, 489 bp, Homo sapiens
  misc_feature (41)..(41): n is a, c, g, or t
  misc_feature (72)..(72): n is a, c, g, or t
  misc_feature (103)..(103): n is a, c, g, or t
  misc_feature (111)..(111): n is a, c, g, or t
  misc_feature (135)..(135): n is a, c, g, or t
  misc_feature (173)..(173): n is a, c, g, or t
  misc_feature (187)..(187): n is a, c, g, or t
  misc_feature (247)..(247): n is a, c, g, or t
  misc_feature (305)..(305): n is a, c, g, or t
gggcatctcacccccccagttcaccccataccccatgcctnctatcatattcctatagtcccaccaccaaantggtcttgtatgattctccctttctgtttcngattatangttccagttcagacctctctgccngattttaagtaaactccgatttctcccttagtgaaggntatggtgctggtcntcttgttctgtgttcttccaaatctggtgcttccagtgccctcaacatggccttagatgntgggggacctgggagggggagaccactgatatggtggaacatcatggaataccaggantgcgttgaattaaatcatgtgaactcatattttattaatgcaacatgattaaattataagaaacgaggccaggtgcagtgccttacgcctgtaatcccagcactttgggaggccaaggtgggcggatcacgaggtcaggagatcgagaccatcctggctaacacggtgaaaccccgtctctact

SEQ ID NO: 693141 - DNA, 221 bp, Homo sapiens
cttagtcatcagataccgtgcgtagattagcgctcattccagtcactcagcatcaagagaatcaagctgcaggacagtcacaatgcgtgtcttggtctctaacgatagtgggcactgcggctgtctccttcaagtgttctccctattggttctgattagaattcgtgctcttgggacattgctgttaccatcatttatggggcgccatcttcctgatgcta

SEQ ID NO: 693142 - DNA, 187 bp, Homo sapiens
cctctgtgggaatgcagcccgctctgctgactgctgctagagccagcaactccactaaggtggataaaacatcaaggtgcctgcatgggcccataccacatatagcccatatgttccttgcgctgaaaaaatggcagggccccaaggaattcgtgactaaacgttatgctcctttgactccaaggaa

SEQ ID NO: 693143 - DNA, 865 bp, Homo sapiens
  misc_feature (574)..(574): n is a, c, g, or t
ctggccgacacgtgggggccccgcggtgggagtgttgctccacaagataggtagatggtgggccgatctgaccgaggtgccttcttggttatgaagcccgagtgagtgcacgcagtgaggggctatgtatcctgcgttctcatgggttgcgaaccgtctgatttcacccgccgtgggccctcttctgacaagaaatgctcgtggcttcacacccaccgggctcgtggttcacgcacagtaattctggggtcggaaaccaccgctctccgtttggtcctagagcactaatttgcaaccattctaatcccgcgcgcgccaagagcgggaggcgaggacaacccgcccgttggcaaactcgccgccgccgagcttggagggcgagcgacctgagcgcgagcgcgcgagggaggactctcgctcgctggacaccacggggcgtcgcgcgcgcgggggcttgacctcgataggcgatggcagaagtcacgcgccccgcctcgagatgtagctcgccgcggcacgcgcggggccacaccccatgggggagacctccccacgacatcggtctcacaaaaangaaaacaaaagcgcgacagagcgtttctaccacacgcagagtatgatcccgcgggcgtgtattatattaatccagtagactggtcccagacgtgcgtagaataaaaaagagatggaggccttctaacaactgtggcagcaaaatccttctttctgttagtaacaatggcgaggaatacaaaatacatattaggtttaggtgtttacgatacaacacgacccgagagagaatcctgttttccgccgacaggatgatagtctaacaaaaaagcaacccccggccacacatgac

SEQ ID NO: 693144 - DNA, 536 bp, Homo sapiens
aagtcccttccacctgtgagcctgtaaaaccaaaagcaagttagttattttctagatacacagggatacaagctttgggtaaatacactcgtttcaaatgggagaaattggccaaagcgaaagagctacaggccccatgcaagtccaaaacccagcaggcaaatcttagagctccaaaatgacctcctttgactccatgtgtcacatctaggtgatgcaagaagtgggttcccagggtcttgggcagccccgcccctgtggctttgcagggtacggcccccccttctggctgcattgagtgtctgcagcttttccaggcacacagtgcaagctgtcagtggatctaccattctggggtctggaggatggtggcccctttgtgacagatctgctttgcagtaccccagtggggactctgtgtgggggctccaaccccatatatccctttgacactgcccctacagaggtattcatgagggccccccgcttccgtgcacaacaaacttttgcctggattccaaggcatttcatacatt

SEQ ID NO: 693145 - DNA, 912 bp, Homo sapiens
agcggaagtcgaggccgccgccgcggggcctggttatcgccggttcagcgcagcccggagtcgcccaggcctgaactcctacccagcctagactcaagtctgggtttcagctgccgccagccctattgctgctgttgctgttctctgtccttggcccaggggctgcgaccgagctcttccacttccactgttcctgaggagcacattcctggcgtgtgttgggaacctcatcatcttcacagggggccgcggggggagactctttggggaccccctgtgcccagaaccacaagtgttgagctgtgtgatttccgcgtgccggggggcgaccccccctgtgtcatctcatcccccctgtgatatcacactttcccacggggacacacgcgtgttgtccctgggggtgtttctctacctgtagcacctctagacgtgtgagcactggtgccaaaccgcgacctctaggcgactcttttaaccgtctagcgagcgcccctttacctgtggggactggtgtctttgtgcgtggtgccacacttctcccaggcgccacggcgcacaatctctggtcacagggtgctcccggagtgagtgtctacgtatcctctcttcaagccgcgagctgagttgtgccgcgcgtgtgcgtggacgtctgctgtgcgtggttcctggccgggcctcagagcaaaacctcttcccacacaatcgcgtcagccctgtacacagggtctttgtgcccagcttcacttacacgggtttcagcacagctggtgtgtgtgggggggcggggggggtatctgccttgggcccctgtcactgcggtctgcgtccccaaagccccaaccctgtacaactcaaagctctgtggctgtggaggtgctcaggatgccagctggagctggcactgtcccc

SEQ ID NO: 693146 - DNA, 901 bp, Homo sapiens
tcccttaaagatccaaagatggtgaaaggaaaagactcatatcaacattgtcgtcattggacacgtagattcgcggcaagtccaccacatactggccatctgatctataacatgcggtgtgcatcggatcaacatgaaccattgaaacactttgagcaaggaggctgcctgagactgggcaaagggctccttcacagtatgcctgggctcttggactaaactgaaatcctgacgcgtgaacgtgggtatcatccatttgactatctcctttggtggagaatttgatgaccagtaaaggtacctatgctgacgtatcagttgattgcctccagtgacacgagagacttctatcgaagaacatgatttacagcggcacactctcacgggcctgcactgctgcatgctcgctgaatcagcttgcctgcctgcgctgctccggctgacactactagcacagcctgtgctaatcataccaacgcaactggcgcacgcaccccgagcagcattgccgcattcctggcgttacgacacctggcgctgttggacaacaacgtacactgtgctcagcggtgccttcacccacacaatgggacttcgcaccgtgacgcgcacacccctagcaggcccagaacaggacgacttactcgcgcggaacatgtgctctacagggcaacgcctcacagcagcttatagccacttgacacgaaagcaacttgcgcctcaccagaacccccgccggaaacaaacctaggataatgcgaatttgatggtggccccacaaccacaatccgtaggggctcgcagtaacattgcgctgaacccaaccaacctggccttgcagaaccccccacaaggttgcataaacacacatataccctttggggatcttcaaccgagggaa

SEQ ID NO: 693147 - DNA, 318 bp, Homo sapiens
ctgcctcataattaaggggaaaggcaaaattgaaagaccccctgtctttatctatcctgggggatgttggccccctagctactttttttttttcccttttgcccaaggggctttcctgatatgttccacatgccctctttgggtgataatggatatgccgtgatggggctcaggccccttaggggagggtctataagaactgcctatttatgctcctttacctccaggctgtcctctctaccctaatctagttgtcatccctccctcttttgggctgctggtggcccttaccaattaaagataaattttgttttatga

SEQ ID NO: 693148 - DNA, 909 bp, Homo sapiens
ataagcagtaaggctagtttaatcgacacgaggggtggatgacgccgtatgcaggggggggcccgggggccctggtgtggccctgggattgggaaccgcggtggcttccgcggaggttacggcagtggcatcggggccggggtcgcggcgtggacggtggccggggccgaggccagggagctcgcggaggcaaggccgaggataaggagtggatgcccgaacaccaagatagggacaattggtcaaaggacatgaagatcaagtccctggaggagatctatactcttctccctgcccattaaggaatcagagatcattgatttcttcctgggggcctctctcaaggatagaggttagaagataatgccagtgcagaagcagacccgtgacctggcagccgcacgcaggttcaaggcattagtatgctatcggggactacaatggccaagtcaggtctgggttgtaaaagttgctccaagtgatgtgtggccacacgcaatccgtgggggccatcatcctggccaagctctccatcgtccccgtgcgcagagagctactggtgtggaacacaagatcaggaaagcccccaaacttgtgccttgcaaggtgacaggcccgtgcggatctagtggctggtacagcctcatccctgtacccaggggcactggacatcggtaaacgcaccttgtgctaagaagatgctcatgatggctggtcatcgaatgactgtaacactcagcccgggggttgattgacacctgggaaatttcgacaaaggcaacctttgattgcatatatcaagactacagtaactgaacccccgactctaggaagagatgattacacagtttcctataaagagtcatggccactggaaagaccaacgagaattcgatggaaggaatcagg

SEQ ID NO: 693149 - DNA, 619 bp, Homo sapiens
  misc_feature (225)..(225): n is a, c, g, or t
aacgggattcttaaggaaaagccattaatgaggtaaaggaataaatagcatttcgggttggagagtctaagaaccgaatgttcataaatttaacgaagttatagtctaattaaaaactttgtttatgtaatggcacctcgtgccgaattcggcacgagctcgtgccgaattcggcacgaggagagagaactagtctcgagttttttttttttttgtttgtcaagncagtgtctcaaaagaaagaaaagaaaattcccataacaaactatttgtacagcaaaggccatgcttaagatgcagtggctccacaggaatgccatttacctgcaatgcttcgtatttctcatgtacatgacatacactaagtatcacaggatgaatggttttgaattgaaaatttcttggattaaagatatcttttacgaatgataatctccattgttgatttaattacttagtttctggtttggctaaagtaaaaacatcctctgaactatgtaactaaggcactctacaggctgtattcggttacattgcaataagttaccagtaaaatgcattaaaactcaagattaattttttcagataaattcaatattatctttcatttttatagttt

SEQ ID NO: 693150 - DNA, 673 bp, Homo sapiens
  misc_feature (225)..(225): n is a, c, g, or t
aacgggattcttaaggaaaagccattaatgaggtaaaggaataaatagcatttcgggttggagagtctaagaaccgaatgttcataaatttaacgaagttatagtctaattaaaaactttgtttatgtaatggcacctcgtgccgaattcggcacgagctcgtgccgaattcggcacgaggagagagaactagtctcgagttttttttttttttgtttgtcaagncagtgtctcaaaagaaagaaaagaaaattcccataacaaactatttgtacagcaaaggccatgcttaagatgcagtggctccacaggaatggtacagtctagttctttggtcagctgggggcatgcaggttaggtcaggagttttccatttacctgcaatgcttcgtatttctcatgtacatgacatacactaagtatcacaggatgaatggttttgaattgaaaatttcttggattaaagatatcttttacgaatgataatctccattgttgatttaattacttagtttctggtttggctaaagtaaaaacatcctctgaactatgtaactaaggcactctacaggctgtattcggttacattgcaataagttaccagtaaaatgcattaaaactcaagattaattttttcagataaattcaatattatctttcatttttatagttt

SEQ ID NO: 693151 - DNA, 265 bp, Homo sapiens
ccacgcggcgcctcacctctgccggcgcctagcagactacttataactggtgcagaccaagggaatccaacggcttaattaaaacaaaacatcatgaaagccctgcgcaggtgtctacacgatgtgattactaaccagagctctgcatgtcaaaacgaagaaagtcactgaaacgctgttaaacggcgggagtgactatgactctattaagggacccacatgcctggttgtataatatttgacgcgcatgaatgtatgatcgaga

SEQ ID NO: 693152 - DNA, 441 bp, Homo sapiens
cttttggagtctttgcggaatggatacgcacactgatccctgactatggccctaaggctgggactctagaaatctaattggaaggcggtagacagtttcagagactgagcaaagtgtgggtggagaataggtactgactggattctgtttctcagggatggggaacgtactctgcggacaatgaaccacaaccaacgccaccaaccaatactcataattaataattacaacagccctggtgcagaagacattgcaccatgaatgcactaagcatgcccgaaacctcatgcaaaaagtttaaaactgaggcgtctgcaggagctgacagggcagggaaaggcacacacaccaagatcaggtgaagtcagcactgagctaatgtcctgttccaggataagcttagttgggctgggtctgaaaggaggaaaccagcacttggaa

SEQ ID NO: 693153 - DNA, 414 bp, Homo sapiens
  misc_feature (168)..(169): n is a, c, g, or t
  misc_feature (318)..(318): n is a, c, g, or t
  misc_feature (363)..(363): n is a, c, g, or t
  misc_feature (387)..(387): n is a, c, g, or t
ttagaaatgcacacaaatattcacaagtgaaatgatatgacattgtggaggtatttcaattaatctggtggggagtgtagataaaacaaaagtagctgtgagtttattgttttggctgggttatgggcacgtgggggttaattatactattttcttaaaattttgtgnnaatttttaaatttatctttacaatttctaaagcaagagattcatagagtgagtaatcattatgcttcgggtataaataatggtagacctttgaaagcaaataaacaagtgggaaaatccactaagcacggatcactcatcccaaaatgnatctttttctttagtcactttgggcagcctcacttttgccagggncagatttagctattaaacatatgncccccctcagagtgtggcacatcaaca

SEQ ID NO: 693154 - DNA, 213 bp, Homo sapiens
ctcacagggacgcaaaaacgaggagtgattgaatttgtgtcttactctgatatgaaaagagctttggaaaagctggacggaactgaagtcaacggcagaaaaatcagattagttgaagacaagccaggttctaggcggcgccggtcttactccagaagccggagtcactcaaggcctcgctctcgaagcagacattcccggaagagcagaaac

SEQ ID NO: 693155 - DNA, 257 bp, Homo sapiens
aaacttgtgtatggactgcctgaccacctgcacagctgccagagcaaacttgccttgggatcagctgtctgggtctggggacccgggccctctatctgcaattcaactgcctcattagatgatctttacttttgtaaaacagtaaatagcaaccctcataattctcacccgagaattagaaaaagcctctgttcccaaaagcacttgggatcttcagggagagtctctggttacttaaatcgacctaacactgaatt

SEQ ID NO: 693156 - DNA, 323 bp, Homo sapiens
ctcccttgtccccggccctttaccctggttctgagtttacaaagtctcttccccattcccgttgagttttttcccacctttgaaattccctccctcccctccccagggctgagattgggggggggggatggctaagggcccctgacagtgaccttcctgtctcgggggggggggacagggccaggtagccccctgccccttatgtttacgtttgcagcccgaagcactttaatttttttttttttgggccgttcctgtaacttattttccaactattgcttccaactgaaataagactattaaatgcctgttcggggggggga

SEQ ID NO: 693157 - DNA, 821 bp, Homo sapiens
gtggagaccggcgagccggggaaccggtcgcgggtggagtccctgatcagagtcgccggtggttgggtgtcggtgcagacctgagggctggtttccttgactgtgggagaaactgcctgtgtgagcctggagtgacccgatggagggactccgcctcctgagctggctgagtgacccctggtgcagaggatgcctggctcgcagaattgcagagtctgtcgccccgtttttaccaacctggtcccgttttattctgccatacccagttttcggattttttgtcttcccgcattcttctctttgctaaactgaccacctccaagataatttttacaaaaaccttctcctttgctcacctttgcttcccagccttcccatccaaacacgcacgaacagcaacacacattcaaagaaccccagacgcatgggaacggtccagagctcgcccgcccacacagcagtcgagagcgtccgcgtccacacccgatactctccactccgatgcgagaagactcaggaaccccgagctcagcgcgctcaccctaacacagcaactcagcgacaacggacgaaggggcgagtctcccatcgaaatcactaacaaaagaaatcaatatagcacagactcccaacacaatcccacttatcatacccactgttcccactgcccccacacgagaccccccccccaccgccccacaccaccatcccctcgaaccacccccaccaacccacccaccaccccaaacccacaccctacagtcagcaccacatgacagcctctccgcaacacccaccacccccaccacctcccacacaaa

SEQ ID NO: 693158 - DNA, 1868 bp, Homo sapiens
  misc_feature (16)..(16): n is a, c, g, or t
agcgtggccgcctggngcccgcccgagctgccgccttgtcgagctgagtccgcgctcccgcccaggcggcggccgacgcgacgccccgagcgcccggccccgccgccgcggcccggcagactgcctctgtcaccgggtccctccacccttgtctcctgtgcggccagcgtcagagccatggcgacggaggagaagaagcccgagaccgaggccgccagagcacagccaaccccttcgtcatccgccactcagagcaagcctacacctgtgaagccaaactatgctctaaagttcacccttgctggccacaccaaagcagtgtcctccgtgaaattcagcccgaatggagagtggctggcaagttcatctgctgataaacttattaaaatttggggcgcgtatgatgggaaatttgagaaaaccatatctggtcacaagctgggaatatccgatgtagcctggtcgtcagattctaaccttcttgtttctgcctcagatgacaaaaccttgaagatatgggacgtgagctcgggcaagtgtctgaaaaccctgaagggacacagtaattatgtcttttgctgcaacttcaatccccagtccaaccttattgtctcaggatcctttgacgaaagcgtgaggatatgggatgtgaaaacagggaagtgcctcaagactttgccagctcactcggatccagtctcggccgttcattttaatcgtgatggatccttgatagtttcaagtagctatgatggtctctgtcgcatctgggacaccgcctcaggccagtgcctgaagacgctcatcgatgacgacaacccccccgtgtcttttgtgaagttctccccgaacggcaaatacatcctggccgccacgctggacaacactctgaagctctgggactacagcaaggggaagtgcctgaagacgtacactggccacaagaatgagaaatactgcatatttgccaatttctctgttactggtgggaagtggattgtgtctggctcagaggataaccttgtttacatctggaaccttcagacgaaagagattgtacagaaactacaaggccacacagatgtcgtgatctcaacagcttgtcacccaacagaaaacatcatcgcctctgctgcgctagaaaatgacaaaacaattaaactgtggaagagtgactgctaagtccctttgctcctgcccgcgagagactgtcgggaagttgacccggattggcaagaaacagggtgtcttggaggtggtcccccagatctgcgcctgggggtcaggacagggcctgatttgagcctcctctctgaagatgatttggccgagcggaaggtgtggaccaccggaaagttcttaaaagttgctggtgacatttcttgccaattctaacactgtctagggaagagttcctagtctattgtgttcaaacagagtcaacaaaagtttttaattttttattacagaagggtgaagttcaatttaacatgcgttgtgttttttcagtaaacgttctgtatctttttgatattccatgacccagtgcacgctgtggcctgtcaccgccaccgtggccccgccagctggcctcccctttggcccacgccggccgcccccattctctgctgcgtagatgccctggcccagggccctgactcctccattcccgccagtagctgttcctagtgtattttcgtctttctggaaaacagcattgagtggttgttttctgtgtaaagagccgtttgtgtcttgggagtttgtggcccacatgccgatagcacggtcatcgcacatgactctcccgtttgtctcagtgtccctgcaacaagcagcaccgcagactgtaataaaaggtggggttt

SEQ ID NO: 693159 - DNA, 699 bp, Homo sapiens
  misc_feature (295)..(295): n is a, c, g, or t
  misc_feature (506)..(506): n is a, c, g, or t
  misc_feature (538)..(538): n is a, c, g, or t
cagacactttgcttttcttccaggacatactgtcctcatggaacttatgttctggtgagaaaaactgataatggagaactaagcgaatatgtaaattccttatacatcatgagtaaatagtgggaagaaactaaacagggagctgtgatagagaataatgggcatatattgaacttaagtggtcaggaaaggcctctgtaagggaggtgactgagacctaaagaatgagaacaagctatctctctgcactatcaggggaagaatgtttcaggcagaaggaacagtaagggcaaangtaaccttagcaaaatactttgtgtccctactatgtgctaggcattttgcatgataatcttttatcaattaatttttcagttgagaaccttggcttaccatgcaaccagcctaaggtcctagagcatgtcaacttgtggtggaacgtggttggaactcagacatgcttgtgctatatactgccttccaaattgcttgagattgaaatatcnttccttctttctttttttcaatagtaggcctnctaataagcttaggtacacgaaattggagaactctggtatacaaggaattataacagaattagaattactgctgtcatcttagagtttcaaatagtagagaggtagatatttttacagctttatttactttttcaggaacttatatactgcatcttagatc

SEQ ID NO: 693160 - DNA, 1050 bp, Homo sapiens
ccaactccagttctttcccctggagcagagcctggaacctaagcccttcccatctctgtcaccgttctcaagatccctgccggcgacattatagagcctgcagttccagtcttgagagtccttcagagcctcgatgccacgtacggctgcgactgcagtgtgactcaacgtctgagatggccgccaaggaaccgagctcacgtcgttggacagaatttacatctcgaatccagaagctttgttatggactcacattatggatttatgtagatcctgctctagatcaccgatgaaagtagatccgaaggtcttgctacagctgggggtcaccactagtggaactagatgactttggcatgcgtgaaagcagctgcgaatctgtgactacctaagcaccctgactatgctatcctggtagccaggatcgctgtctctaacttgcacaaagaaacaaagaaagtgttcagtgatgtgatggaagacctctataacgtacataaatccacataatggcaaagcactctcccatggtggccaagtcaacattggatattgttctggccaagtaaagatcgcctgaattctgctattatctatgaccgagatttctcttacaattacttcggcttaaagacgctagagcggtcttatatgtagaagatcaagtggaaaaagtggctgagagaccgaaagatatgatgatgagagtatctgtagggatccaaaaagaagacatcgatgcagggattgaaaccatataatctctttctgagaaggtggtatacctaatgcgtacggcacagtctcataaaattgtgggtaccaacggccacaacattataagctgattacttctgagtatgaaccgaactgcacaggagtgacaggacagtaggaccaccataagcaatggtcaatagaattgcaaggacggcggacaacaacggcggatagaccgcgagaagcaaccggcacacgggcaacacacacggcggacccaaggaaagccaaaggccgtgccccgagcaacacaaaacacagcacgaacat

SEQ ID NO: 693161 - DNA, 1777 bp, Homo sapiens
gctccctgttctgcatctcgctcaacagactgcctctgtcaccgggtccctccacccttgtctcctgtgcggccagcgtcagagccatggcgacggaggagaagaagcccgagaccgaggccgccagagcacagccaaccccttcgtcatccgccactcagagcaagcctacacctgtgaagccaaactatgctctaaagttcacccttgctggccacaccaaagcagtgtcctccgtgaaattcagcccgaatggagagtggctggcaagttcatctgctgataaacttattaaaatttggggcgcgtatgatgggaaatttgagaaaaccatatctggtcacaagctgggaatatccgatgtagcctggtcgtcagattctaaccttcttgtttctgcctcagatgacaaaaccttgaagatatgggacgtgagctcgggcaagtgtctgaaaaccctgaagggacacagtaattatgtcttttgctgcaacttcaatccccagtccaaccttattgtctcaggatcctttgacgaaagcgtgaggatatgggatgtgaaaacagggaagtgcctcaagactttgccagctcactcggatccagtctcggccgttcattttaatcgtgatggatccttgatagtttcaagtagctatgatggtctctgtcgcatctgggacaccgcctcaggccagtgcctgaagacgctcatcgatgacgacaacccccccgtgtcttttgtgaagttctccccgaacggcaaatacatcctggccgccacgctggacaacactctgaagctctgggactacagcaaggggaagtgcctgaagacgtacactggccacaagaatgagaaatactgcatatttgccaatttctctgttactggtgggaagtggattgtgtctggctcagaggataaccttgtttacatctggaaccttcagacgaaagagattgtacagaaactacaaggccacacagatgtcgtgatctcaacagcttgtcacccaacagaaaacatcatcgcctctgctgcgctagaaaatgacaaaacaattaaactgtggaagagtgactgctaagtccctttgctcctgcccgcgagagactgtcgggaagttgacccggattggcaagaaacagggtgtcttggaggtggtcccccagatctgcgcctgggggtcaggacagggcctgatttgagcctcctctctgaagatgatttggccgagcggaaggtgtggaccaccggaaagttcttaaaagttgctggtgacatttcttgccaattctaacactgtctagggaagagttcctagtctattgtgttcaaacagagtcaacaaaagtttttaattttttattacagaagggtgaagttcaatttaacatgcgttgtgttttttcagtaaacgttctgtatctttttgatattccatgacccagtgcacgctgtggcctgtcaccgccaccgtggccccgccagctggcctcccctttggcccacgccggccgcccccattctctgctgcgtagatgccctggcccagggccctgactcctccattcccgccagtagctgttcctagtgtattttcgtctttctggaaaacagcattgagtggttgttttctgtgtaaagagccgtttgtgtcttgggagtttgtggcccacatgccgatagcacggtcatcgcacatgactctcccgtttgtctcagtgtccctgcaacaagcagcaccgcagactgtaataaaaggtggggttt

SEQ ID NO: 693162 - DNA, 338 bp, Homo sapiens
tagctggcaactccatatctgtccagagcctgagctgattgatctgatctactagtggtcaggaagctaaaagatgaccagacactatgacttctatgagcattcaaactgggtccactgtccatgttctgcgaaagtactggcctgaacctgatcagaaaccggaacctgtggacaaagtggctgccatgagatatgtaccgggtgtaagcacactgacctgcacaagcagctcctcttacacggaggacggactttacgatagctcagcaataaaggagtcctctggctccgatccaagtggccaacccaggcctacagcagtgaccctaattgct

SEQ ID NO: 693163 - DNA, 475 bp, Homo sapiens
  misc_feature (157)..(157): n is a, c, g, or t
  misc_feature (180)..(180): n is a, c, g, or t
  misc_feature (375)..(375): n is a, c, g, or t
tcattagcagattggttttatttgataaacatctttccagtccttacttgagtcctatgttaaaaaacatacaggagtttgtgcctatgacagacgtgatgcacggggacacacaggccaggcgaatgctctcatcacgcttgccattctcactctntggggtgcctttctggtggtttncatctatgggaaaccatgcacaggtggggtctatctgtgtcatttaggaaaacaagctgtgtggcacatcctggcacatcctgctcttcagcccatgaaggaagctctcaaaacactgcggtggggtaaggtgttggcagtgtggattcaccgtcccagcaaggagctaccttagggtcaaggatgagttctganaaataggagaaaagaaagactcagtgaagaggagaatcaggtatggttacccagaggaagggcagaggatgctgaatcccagtagagtgatgcccgctcc

SEQ ID NO: 693164 - DNA, 5583 bp, Homo sapiens
  misc_feature (16)..(16): n is a, c, g, or t
agcgtggccgcctggngcccgcccgagctgccgccttgtcgagctgagtccgcgctcccgcccaggcggcggccgacgcgacgccccgagcgcccggccccgccgccgcggcccggcagactgcctctgtcaccgggtccctccacccttgtctcctgtgcggccagcgtcagagccatggcgacggaggagaagaagcccgagaccgaggccgccagagcacagccaaccccttcgtcatccgccactcagagcaagcctacacctgtgaagccaaactatgctctaaagttcacccttgctggccacaccaaagcagtgtcctccgtgaaattcagcccgaatggagagtggctggcaagttcatctgctgataaacttattaaaatttggggcgcgtatgatgggaaatttgagaaaaccatatctggtcacaagctgggaatatccgatgtagcctggtcgtcagattctaaccttcttgtttctgcctcagatgacaaaaccttgaagatatgggacgtgagctcgggcaagtgtctgaaaaccctgaagggacacagtaattatgtcttttgctgcaacttcaatccccagtccaaccttattgtctcaggatcctttgacgaaagcgtgaggatatgggatgtgaaaacagggaagtgcctcaagactttgccagctcactcggatccagtctcggccgttcattttaatcgtgatggatccttgatagtttcaagtagctatgatggtctctgtcgcatctgggacaccgcctcaggccagtgcctgaagacgctcatcgatgacgacaacccccccgtgtcttttgtgaagttctccccgaacggcaaatacatcctggccgccacgctggacaagtgagtactgcgtgggactgtgggggcgggcatgtggcctccccagccagagacacctgcgtgccagcgtgagcctttggagagcgtgttgtgggcttggcacgggatccaggctcctggtggagcttcggcttctgggcagtggcctgttaggtcggagggcaggcccccgtccatcccttcccgaggctgaacctcaggtccgactataggaggatttagggtccgttttctggttgagcaactgtggccagggcaggcctagccatcccgcatgaaggagtcggcggtccgggggcctccaaggccctttctggttctgacctctgagcatcttgattttacctctcacaaagccactgccctcctgggctgttctctaagctccagctttcccatgcgtgcaccctcagccctgtgggtccgagcctgggccctgatcctctgagggctgtgtggttgggtggtaaaacctgttctggatgtttccagaaccaagaggacttcctcacccttttgaggatgacccgagtcagggacgataacacccatcagcttcctgttaaagtctctcttggaactacaaatacttgcggctgtcacactgtgctctcagacgccaagtcactggactttgagcctgaggggctccttaccctgatggggaagggggttccagccccgctggcttttgcacctggcgctgatggtggctgtgacgtagtggctgcagagttgggtgtggggacagaaggatgcctccagacatgccgcctcacccctctctctgtcttgcagcactctgaagctctgggactacagcaaggggaaggtgagcccccgcaggcttgggcccccatggtgcaccatccctgggtcatggcctctggtggggacagagctggccccggtgatgacaaaggagaggagctcagagagccatctccgctgggtttggtgcgaattcctgaaagacctgggtatttgtagggtggcagtctgcaagttaaatcttcgattgtgtgggtttggtacttgtacttttcagaaataagtgaagtgagtagtgaaacgccttgcttagaacgtagaattacacaaaatcaaggggaaccatgactctgtgaccagcctgtcccctcctgtttcagtgcctgaagacgtacactggccacaagaatgagaaatactgcatatttgccaatttctctgttactggtgggaagtggattgtgtctggctcagaggataaccttgtttacatctggaaccttcagacgaaagagattgtacagaaactacaaggccacacaggtgagggcctgcgctcctgcagtcactggctgcctgttgatgtgaggacagttcctgcaggtgaagcgtggtgtgcccgtagggtgctgtcgtcttccccttcccacctcagccctccgctggccccgctgaggaaccgctgctaagagctcttgcccaaggcatggagctggtcactgtgctgccgactcagacccgggctcctggcttgaaccctgtttctccctgttctgccaggcatgctggtccggaaggtgtgtgtggctgtgggactttaggtgggtgcagcccgtcccacgtcacggcgagctctgtttcctgggctggggacagtgaggtcatcgctgccccatcctggaggctctggctcctttcgggtacctgttccctctcccagagagaccccccagctgcatgcaggcctagtgggctccacggcggagctggttcccaggctacctggggttgccacctctgtgggtcccggctgccctctgcagccgccgctacttcctcaccctctggccctgcatttccacgtctcatggagccaacgagagcagggggttcgagcccttgtggaaatctggggaggcactgcttctccctccatgtgagcagcttcacccagcctggggtcagtgcttacgctccacggcgggcctgggccttcccctgggtcctcgccggcgttctggggttctttggtttacgtagaagctgtaaacactttgatgtggccgaccttgcaccaccagtctgttagttctgacctccctgcttgggtggtggacttgtccttgctgtgacagagccagccctgtggggtgctctggggcttagcattggggggaggcggtgggagtgggcggctcagggtccgaggagaagagggacattgtcgataaaggactgaggactgtgaggggtctgactgcagtccttgtgcgcgccagcctctgagccagtcctgctgccgcgctcctccttgtgggcgccgagctgctgttggtgggggcgtgtggggctcctggtctgcaggcagggctggcactccctgtggcctcctgcccctgtcccccaaccggctgtgtcgccctggtaccggctgctgtcccctcgctcccctcccctgggctccctgtgtcgaaggtgggcagtgggtgcttgtcctgtgacctcccaggtggcgggcaggcgctacccgcgtttctggagaaaggtggagctcagtctgggatggcgtccccgacccaggcgcagggatggctctggttctgactgtgtctttgttttcagatgtcgtgatctcaacagcttgtcacccaacagaaaacatcatcgcctctgctgcgctagaaaatgacaaaacaattaaactgtggaagagtgactgctaagtccctttgctcctgcccgcgagagactgtcgggaagttgacccggattggcaagaaacagggtgtcttggaggtggtcccccagatctgcgcctgggggtcaggacagggcctgatttgagcctcctctctgaagatgatttggccgagcggaaggtgtggaccaccggaaagttcttaaaagttgctggtgacatttcttgccaattctaacactgtctagggaagagttcctagtctattgtgttcaaacagagtcaacaaaagtttttaattttttattacagaagggtgaagttcaatttaacatgcgttgtgttttttcagtaaacgttctgtatctttttgatattccatgacccagtgcacgctgtggcctgtcaccgccaccgtggccccgccagctggcctcccctttggcccacgccggccgcccccattctctgctgcgtagatgccctggcccagggccctgactcctccattcccgccagtagctgttcctagtgtattttcgtctttctggaaaacagcattgagtggttgttttctgtgtaaagagccgtttgtgtcttgggagtttgtggcccacatgccgatagcacggtcatcgcacatgactctcccgtttgtctcagtgtccctgcaacaagcagcaccgcagactgtaataaaaggtggggttttgtgaatggttgtggcaagtgcgtccttgtgaagctcgtctccatgtggctttcttggagaaaggctcccctggggcaagagggtggaaggtttctttggacaggaggtgctgaggctggctgcacctgctctctgaagacgccttcctctctaggttcattgttcagtgttgctggaggcggggaacgggggtggggaggttcttagttgcgaaggagccaagctcctgatggacttgcgttgggatgtgggggacacctgtggcatggtaaggctccctgagtcccttactccaggtcagatgccagtgggactcatgcgccctatgagggctgcagggccagtgctgcccctcggactcctcgaggggttgggtgctaagcgcgagcctcgccgtccctgctggagccctcgcctgcctgcccctctgcctgtgctcctggcactgtggcttcccggtgctcacctgcacagcagttaacagcagaggccgagcgggagcctctggggagcgaggctgaaacctgaacctgcccatggagacagttgtggtgagggttgccacacacagtgagggcggagcagggtggctgagggcacaggtgcctgggtctgtcccacggggcagggctttggggctgtgatgctctgggaagccagcttgggtcctgggtctacagagggccctggccccggagcccagccagctctgcctctctcagggcctggagtcctgggggagctcagccagctctgcctttctcagggcctggagtcctggatgaatcctgcaggtttttggttgcaccggcccagggaggaagcggggggtttgtcaggtgggctctcctggaggtcctcgagtggcaggggtgaggaggggattatctgaggcatctggagatgtatatcctgtggtttcccctgcccctctgtttccgatgaggtgtacggatgagtgacctgcactaagaagtgagttgccacagtgaaaatgggttggtttttgtcttcgacgctcagggtctgggcgcctcgcatttgcagtctgttgtgacagacacggggagctccgcgtgccagcctgtggctgccctgctgtgggggtcctggggccggcgaggccccttcagtcttgttctggggggacggcccactccggggagggggtgtgctgtgctgagcgctgtatccctgaatatagtttattttttctacatttgaattctgttgtagatttatgtaaaaatacattctttttgaaaataaaaattttcatgtcttctaaaaaaaaaaaa

SEQ ID NO: 693165 - DNA, 6363 bp, Homo sapiens
cggaatgcggtcaccagctccggtaaccgttggttcctgggcattgccccggccaattcggctgcctccacgtttcccgaatcaactgccatcggaattccgctgcccccaaagctctggactggccatgaaggggccaagtgctttccgggctgcctgcttcgaggacaccagcactcctgccacgggccattcgtccatcgcatgccagtggccctccctcctcagggttcggcagtccactccaaggctctaagaagtgaagcaggcggcgagaatgtgcagtcgttgaggccagaggaccgggcctcagcttctccttaagcccctgagtcctcctctggggaccacccccttgtacctggaggtgaaaatgcccgcccaggagggaagggctggcccccggagagcccgctgcgaagtgagtttgcgcactgcggagcgggcgcgggtgactccagagcggccctgccagtccgcggggctggcggggagcaggttcgtgcaccgcgggctctgtgcatgcagaggcgggaagagcccccagcccggcagccggccccgcgggaaggcgcagcccgggcttccgaaccctgtgaacgcgcaggttcctggtcttccagatgggcaggaatcgtcctgcccgcccggggtgggaggccacatgggggcactgcgcccgggcgcggccccaggtgctttccaaatgcccactgccgctctcatccgtaccagcgatgatcaagaaggggcctggtcgcccggggaggtgccccggcccgaatcgactccggagacaacgccgggcgacgccacctgcgcaggtcccggaggccgctggtgtctgtgtacagggcgtgctgtctgtggaaacgcgagggcacactagcactttccagactgcctctgtcaccgggtccctccacccttgtctcctgtgcggccagcgtcagagccatggcgacggaggagaagaagcccgagaccgaggccgccagagcacagccaaccccttcgtcatccgccactcagagcaagcctacacctgtgaagccaaactatgctctaaagttcacccttgctggccacaccaaagcagtgtcctccgtgaaattcagcccgaatggagagtggctggcaagttcatctgctgataaacttattaaaatttggggcgcgtatgatgggaaatttgagaaaaccatatctggtcacaagctgggaatatccgatgtagcctggtcgtcagattctaaccttcttgtttctgcctcagatgacaaaaccttgaagatatgggacgtgagctcgggcaagtgtctgaaaaccctgaagggacacagtaattatgtcttttgctgcaacttcaatccccagtccaaccttattgtctcaggatcctttgacgaaagcgtgaggatatgggatgtgaaaacagggaagtgcctcaagactttgccagctcactcggatccagtctcggccgttcattttaatcgtgatggatccttgatagtttcaagtagctatgatggtctctgtcgcatctgggacaccgcctcaggccagtgcctgaagacgctcatcgatgacgacaacccccccgtgtcttttgtgaagttctccccgaacggcaaatacatcctggccgccacgctggacaagtgagtactgcgtgggactgtgggggcgggcatgtggcctccccagccagagacacctgcgtgccagcgtgagcctttggagagcgtgttgtgggcttggcacgggatccaggctcctggtggagcttcggcttctgggcagtggcctgttaggtcggagggcaggcccccgtccatcccttcccgaggctgaacctcaggtccgactataggaggatttagggtccgttttctggttgagcaactgtggccagggcaggcctagccatcccgcatgaaggagtcggcggtccgggggcctccaaggccctttctggttctgacctctgagcatcttgattttacctctcacaaagccactgccctcctgggctgttctctaagctccagctttcccatgcgtgcaccctcagccctgtgggtccgagcctgggccctgatcctctgagggctgtgtggttgggtggtaaaacctgttctggatgtttccagaaccaagaggacttcctcacccttttgaggatgacccgagtcagggacgataacacccatcagcttcctgttaaagtctctcttggaactacaaatacttgcggctgtcacactgtgctctcagacgccaagtcactggactttgagcctgaggggctccttaccctgatggggaagggggttccagccccgctggcttttgcacctggcgctgatggtggctgtgacgtagtggctgcagagttgggtgtggggacagaaggatgcctccagacatgccgcctcacccctctctctgtcttgcagcactctgaagctctgggactacagcaaggggaaggtgagcccccgcaggcttgggcccccatggtgcaccatccctgggtcatggcctctggtggggacagagctggccccggtgatgacaaaggagaggagctcagagagccatctccgctgggtttggtgcgaattcctgaaagacctgggtatttgtagggtggcagtctgcaagttaaatcttcgattgtgtgggtttggtacttgtacttttcagaaataagtgaagtgagtagtgaaacgccttgcttagaacgtagaattacacaaaatcaaggggaaccatgactctgtgaccagcctgtcccctcctgtttcagtgcctgaagacgtacactggccacaagaatgagaaatactgcatatttgccaatttctctgttactggtgggaagtggattgtgtctggctcagaggataaccttgtttacatctggaaccttcagacgaaagagattgtacagaaactacaaggccacacaggtgagggcctgcgctcctgcagtcactggctgcctgttgatgtgaggacagttcctgcaggtgaagcgtggtgtgcccgtagggtgctgtcgtcttccccttcccacctcagccctccgctggccccgctgaggaaccgctgctaagagctcttgcccaaggcatggagctggtcactgtgctgccgactcagacccgggctcctggcttgaaccctgtttctccctgttctgccaggcatgctggtccggaaggtgtgtgtggctgtgggactttaggtgggtgcagcccgtcccacgtcacggcgagctctgtttcctgggctggggacagtgaggtcatcgctgccccatcctggaggctctggctcctttcgggtacctgttccctctcccagagagaccccccagctgcatgcaggcctagtgggctccacggcggagctggttcccaggctacctggggttgccacctctgtgggtcccggctgccctctgcagccgccgctacttcctcaccctctggccctgcatttccacgtctcatggagccaacgagagcagggggttcgagcccttgtggaaatctggggaggcactgcttctccctccatgtgagcagcttcacccagcctggggtcagtgcttacgctccacggcgggcctgggccttcccctgggtcctcgccggcgttctggggttctttggtttacgtagaagctgtaaacactttgatgtggccgaccttgcaccaccagtctgttagttctgacctccctgcttgggtggtggacttgtccttgctgtgacagagccagccctgtggggtgctctggggcttagcattggggggaggcggtgggagtgggcggctcagggtccgaggagaagagggacattgtcgataaaggactgaggactgtgaggggtctgactgcagtccttgtgcgcgccagcctctgagccagtcctgctgccgcgctcctccttgtgggcgccgagctgctgttggtgggggcgtgtggggctcctggtctgcaggcagggctggcactccctgtggcctcctgcccctgtcccccaaccggctgtgtcgccctggtaccggctgctgtcccctcgctcccctcccctgggctccctgtgtcgaaggtgggcagtgggtgcttgtcctgtgacctcccaggtggcgggcaggcgctacccgcgtttctggagaaaggtggagctcagtctgggatggcgtccccgacccaggcgcagggatggctctggttctgactgtgtctttgttttcagatgtcgtgatctcaacagcttgtcacccaacagaaaacatcatcgcctctgctgcgctagaaaatgacaaaacaattaaactgtggaagagtgactgctaagtccctttgctcctgcccgcgagagactgtcgggaagttgacccggattggcaagaaacagggtgtcttggaggtggtcccccagatctgcgcctgggggtcaggacagggcctgatttgagcctcctctctgaagatgatttggccgagcggaaggtgtggaccaccggaaagttcttaaaagttgctggtgacatttcttgccaattctaacactgtctagggaagagttcctagtctattgtgttcaaacagagtcaacaaaagtttttaattttttattacagaagggtgaagttcaatttaacatgcgttgtgttttttcagtaaacgttctgtatctttttgatattccatgacccagtgcacgctgtggcctgtcaccgccaccgtggccccgccagctggcctcccctttggcccacgccggccgcccccattctctgctgcgtagatgccctggcccagggccctgactcctccattcccgccagtagctgttcctagtgtattttcgtctttctggaaaacagcattgagtggttgttttctgtgtaaagagccgtttgtgtcttgggagtttgtggcccacatgccgatagcacggtcatcgcacatgactctcccgtttgtctcagtgtccctgcaacaagcagcaccgcagactgtaataaaaggtggggttttgtgaatggttgtggcaagtgcgtccttgtgaagctcgtctccatgtggctttcttggagaaaggctcccctggggcaagagggtggaaggtttctttggacaggaggtgctgaggctggctgcacctgctctctgaagacgccttcctctctaggttcattgttcagtgttgctggaggcggggaacgggggtggggaggttcttagttgcgaaggagccaagctcctgatggacttgcgttgggatgtgggggacacctgtggcatggtaaggctccctgagtcccttactccaggtcagatgccagtgggactcatgcgccctatgagggctgcagggccagtgctgcccctcggactcctcgaggggttgggtgctaagcgcgagcctcgccgtccctgctggagccctcgcctgcctgcccctctgcctgtgctcctggcactgtggcttcccggtgctcacctgcacagcagttaacagcagaggccgagcgggagcctctggggagcgaggctgaaacctgaacctgcccatggagacagttgtggtgagggttgccacacacagtgagggcggagcagggtggctgagggcacaggtgcctgggtctgtcccacggggcagggctttggggctgtgatgctctgggaagccagcttgggtcctgggtctacagagggccctggccccggagcccagccagctctgcctctctcagggcctggagtcctgggggagctcagccagctctgcctttctcagggcctggagtcctggatgaatcctgcaggtttttggttgcaccggcccagggaggaagcggggggtttgtcaggtgggctctcctggaggtcctcgagtggcaggggtgaggaggggattatctgaggcatctggagatgtatatcctgtggtttcccctgcccctctgtttccgatgaggtgtacggatgagtgacctgcactaagaagtgagttgccacagtgaaaatgggttggtttttgtcttcgacgctcagggtctgggcgcctcgcatttgcagtctgttgtgacagacacggggagctccgcgtgccagcctgtggctgccctgctgtgggggtcctggggccggcgaggccccttcagtcttgttctggggggacggcccactccggggagggggtgtgctgtgctgagcgctgtatccctgaatatagtttattttttctacatttgaattctgttgtagatttatgtaaaaatacattctttttgaaaataaaaattttcatgtcttctaaaaaaaaaaaa

SEQ ID NO: 693166 - DNA, 391 bp, Homo sapiens
cagaaggatcacttgagaccaggagttcaagatgagtctggacaacatattgagaccctgtctctacaaaaataattagccaggtgtggtggcacatgcctgtagtcctaactactcaggaggctgagacaagaggatctcttgagcccaggtgtttgaagtagcagtgagccatgattgtgccactttgctccacctgggtgacagagtcagaccctgtctccaaaaagaagaaaaaaaatttcttaaatttaaatggaaaaaacataccaaaacctatgggatacagcaaaagcagtgctaagagggaagtttagagcaataaacacctacatcaacaaaagtagacagatttcaaataacctagtgatggaccttaaggaactagaaa

SEQ ID NO: 693167 - DNA, 277 bp, Homo sapiens
tgcgatatacaatagtaataaatgcgatgaccaaatgaaaatgcaaaccagtgtaagatcaataaggatcggggaggggagaaccagatctttaatacaatgttcagagtagatatcattgaaaaggtgaaacccatgtcttctgctgtctaattactgtattcacattcaaccatcagaccttgatttcgattttcttcctgatcattctgtatcccagctaatgagatcaatcacatctaagccagtttgtcacttaaatcaacatgtagggcca

SEQ ID NO: 693168 - DNA, 914 bp, Homo sapiens
  misc_feature (809)..(809): n is a, c, g, or t
ggaggcagaggttgcagtgagtcgagatgtgccatgcactccagcctgggggacaagagcaagacttcgtctcaaaaaaaaaaaaaaaagggaggtaccatcaatccgtggtggccgggggtaactcttccttaaaaaaagggttttcactcattggctcatggtcgtggcttaaaactccattaacatttacacgtccaaatttcttttggggcctttgggtcaaacaccattttacaccaaaatttcttaattggggcaaagggcacttccatagcactacgtggtcgtggcgctaacacgtggcgctcctggaccacattggtccttttggaactgacccaacttattaacgaggcgatacatgcatggtactggggattgggatggacccggggctcattccaaaaatttccccaagaattcctcttctttaaccttaccagggctacgcacctggtggttttaacccaaaaggtcccggggcgccttacacagtggaacgccaattatcaatattgcggcggggaggaccccttatcctgtggccccttcaccttcaatcctaaagacccaattcttcaagggtggccacttctgggtccctttcaacttataccacgcaatattaacctctaaacttttcccgggttttacacgctaaaatttaatttccagtccccatttctaagtttacacaagtccaattgcgtccctaaacgtggtaaggtgcgacacctttttctctccctttttaaacttatactttggaaaggcccatgggaaggagcagacaacacgggtttgtnagcatccctgcgccatgggtgtggtttcaccaattattttacaattttccttacgaccctatgggttttacataactgaacggcttatggtcacaaaaaggcggt

SEQ ID NO: 693169 - DNA, 6276 bp, Homo sapiens
gcctcaggtgatcccgacctcaggtgatccactcgcctcagcctcccagagtgctgggattacaggcgtgagccgccgcgcccggccggattttctcatttttactagaaggttctatctcctgggggtggggtgaggtggtgagaccaattcacctccaaggctctaagaagtgaagcaggcggcgagaatgtgcagtcgttgaggccagaggaccgggcctcagcttctccttaagcccctgagtcctcctctggggaccacccccttgtacctggaggtgaaaatgcccgcccaggagggaagggctggcccccggagagcccgctgcgaagtgagtttgcgcactgcggagcgggcgcgggtgactccagagcggccctgccagtccgcggggctggcggggagcaggttcgtgcaccgcgggctctgtgcatgcagaggcgggaagagcccccagcccggcagccggccccgcgggaaggcgcagcccgggcttccgaaccctgtgaacgcgcaggttcctggtcttccagatgggcaggaatcgtcctgcccgcccggggtgggaggccacatgggggcactgcgcccgggcgcggccccaggtgctttccaaatgcccactgccgctctcatccgtaccagcgatgatcaagaaggggcctggtcgcccggggaggtgccccggcccgaatcgactccggagacaacgccgggcgacgccacctgcgcaggtcccggaggccgctggtgtctgtgtacagggcgtgctgtctgtggaaacgcgagggcacactagcactttccagactgcctctgtcaccgggtccctccacccttgtctcctgtgcggccagcgtcagagccatggcgacggaggagaagaagcccgagaccgaggccgccagagcacagccaaccccttcgtcatccgccactcagagcaagcctacacctgtgaagccaaactatgctctaaagttcacccttgctggccacaccaaagcagtgtcctccgtgaaattcagcccgaatggagagtggctggcaagttcatctgctgataaacttattaaaatttggggcgcgtatgatgggaaatttgagaaaaccatatctggtcacaagctgggaatatccgatgtagcctggtcgtcagattctaaccttcttgtttctgcctcagatgacaaaaccttgaagatatgggacgtgagctcgggcaagtgtctgaaaaccctgaagggacacagtaattatgtcttttgctgcaacttcaatccccagtccaaccttattgtctcaggatcctttgacgaaagcgtgaggatatgggatgtgaaaacagggaagtgcctcaagactttgccagctcactcggatccagtctcggccgttcattttaatcgtgatggatccttgatagtttcaagtagctatgatggtctctgtcgcatctgggacaccgcctcaggccagtgcctgaagacgctcatcgatgacgacaacccccccgtgtcttttgtgaagttctccccgaacggcaaatacatcctggccgccacgctggacaagtgagtactgcgtgggactgtgggggcgggcatgtggcctccccagccagagacacctgcgtgccagcgtgagcctttggagagcgtgttgtgggcttggcacgggatccaggctcctggtggagcttcggcttctgggcagtggcctgttaggtcggagggcaggcccccgtccatcccttcccgaggctgaacctcaggtccgactataggaggatttagggtccgttttctggttgagcaactgtggccagggcaggcctagccatcccgcatgaaggagtcggcggtccgggggcctccaaggccctttctggttctgacctctgagcatcttgattttacctctcacaaagccactgccctcctgggctgttctctaagctccagctttcccatgcgtgcaccctcagccctgtgggtccgagcctgggccctgatcctctgagggctgtgtggttgggtggtaaaacctgttctggatgtttccagaaccaagaggacttcctcacccttttgaggatgacccgagtcagggacgataacacccatcagcttcctgttaaagtctctcttggaactacaaatacttgcggctgtcacactgtgctctcagacgccaagtcactggactttgagcctgaggggctccttaccctgatggggaagggggttccagccccgctggcttttgcacctggcgctgatggtggctgtgacgtagtggctgcagagttgggtgtggggacagaaggatgcctccagacatgccgcctcacccctctctctgtcttgcagcactctgaagctctgggactacagcaaggggaaggtgagcccccgcaggcttgggcccccatggtgcaccatccctgggtcatggcctctggtggggacagagctggccccggtgatgacaaaggagaggagctcagagagccatctccgctgggtttggtgcgaattcctgaaagacctgggtatttgtagggtggcagtctgcaagttaaatcttcgattgtgtgggtttggtacttgtacttttcagaaataagtgaagtgagtagtgaaacgccttgcttagaacgtagaattacacaaaatcaaggggaaccatgactctgtgaccagcctgtcccctcctgtttcagtgcctgaagacgtacactggccacaagaatgagaaatactgcatatttgccaatttctctgttactggtgggaagtggattgtgtctggctcagaggataaccttgtttacatctggaaccttcagacgaaagagattgtacagaaactacaaggccacacaggtgagggcctgcgctcctgcagtcactggctgcctgttgatgtgaggacagttcctgcaggtgaagcgtggtgtgcccgtagggtgctgtcgtcttccccttcccacctcagccctccgctggccccgctgaggaaccgctgctaagagctcttgcccaaggcatggagctggtcactgtgctgccgactcagacccgggctcctggcttgaaccctgtttctccctgttctgccaggcatgctggtccggaaggtgtgtgtggctgtgggactttaggtgggtgcagcccgtcccacgtcacggcgagctctgtttcctgggctggggacagtgaggtcatcgctgccccatcctggaggctctggctcctttcgggtacctgttccctctcccagagagaccccccagctgcatgcaggcctagtgggctccacggcggagctggttcccaggctacctggggttgccacctctgtgggtcccggctgccctctgcagccgccgctacttcctcaccctctggccctgcatttccacgtctcatggagccaacgagagcagggggttcgagcccttgtggaaatctggggaggcactgcttctccctccatgtgagcagcttcacccagcctggggtcagtgcttacgctccacggcgggcctgggccttcccctgggtcctcgccggcgttctggggttctttggtttacgtagaagctgtaaacactttgatgtggccgaccttgcaccaccagtctgttagttctgacctccctgcttgggtggtggacttgtccttgctgtgacagagccagccctgtggggtgctctggggcttagcattggggggaggcggtgggagtgggcggctcagggtccgaggagaagagggacattgtcgataaaggactgaggactgtgaggggtctgactgcagtccttgtgcgcgccagcctctgagccagtcctgctgccgcgctcctccttgtgggcgccgagctgctgttggtgggggcgtgtggggctcctggtctgcaggcagggctggcactccctgtggcctcctgcccctgtcccccaaccggctgtgtcgccctggtaccggctgctgtcccctcgctcccctcccctgggctccctgtgtcgaaggtgggcagtgggtgcttgtcctgtgacctcccaggtggcgggcaggcgctacccgcgtttctggagaaaggtggagctcagtctgggatggcgtccccgacccaggcgcagggatggctctggttctgactgtgtctttgttttcagatgtcgtgatctcaacagcttgtcacccaacagaaaacatcatcgcctctgctgcgctagaaaatgacaaaacaattaaactgtggaagagtgactgctaagtccctttgctcctgcccgcgagagactgtcgggaagttgacccggattggcaagaaacagggtgtcttggaggtggtcccccagatctgcgcctgggggtcaggacagggcctgatttgagcctcctctctgaagatgatttggccgagcggaaggtgtggaccaccggaaagttcttaaaagttgctggtgacatttcttgccaattctaacactgtctagggaagagttcctagtctattgtgttcaaacagagtcaacaaaagtttttaattttttattacagaagggtgaagttcaatttaacatgcgttgtgttttttcagtaaacgttctgtatctttttgatattccatgacccagtgcacgctgtggcctgtcaccgccaccgtggccccgccagctggcctcccctttggcccacgccggccgcccccattctctgctgcgtagatgccctggcccagggccctgactcctccattcccgccagtagctgttcctagtgtattttcgtctttctggaaaacagcattgagtggttgttttctgtgtaaagagccgtttgtgtcttgggagtttgtggcccacatgccgatagcacggtcatcgcacatgactctcccgtttgtctcagtgtccctgcaacaagcagcaccgcagactgtaataaaaggtggggttttgtgaatggttgtggcaagtgcgtccttgtgaagctcgtctccatgtggctttcttggagaaaggctcccctggggcaagagggtggaaggtttctttggacaggaggtgctgaggctggctgcacctgctctctgaagacgccttcctctctaggttcattgttcagtgttgctggaggcggggaacgggggtggggaggttcttagttgcgaaggagccaagctcctgatggacttgcgttgggatgtgggggacacctgtggcatggtaaggctccctgagtcccttactccaggtcagatgccagtgggactcatgcgccctatgagggctgcagggccagtgctgcccctcggactcctcgaggggttgggtgctaagcgcgagcctcgccgtccctgctggagccctcgcctgcctgcccctctgcctgtgctcctggcactgtggcttcccggtgctcacctgcacagcagttaacagcagaggccgagcgggagcctctggggagcgaggctgaaacctgaacctgcccatggagacagttgtggtgagggttgccacacacagtgagggcggagcagggtggctgagggcacaggtgcctgggtctgtcccacggggcagggctttggggctgtgatgctctgggaagccagcttgggtcctgggtctacagagggccctggccccggagcccagccagctctgcctctctcagggcctggagtcctgggggagctcagccagctctgcctttctcagggcctggagtcctggatgaatcctgcaggtttttggttgcaccggcccagggaggaagcggggggtttgtcaggtgggctctcctggaggtcctcgagtggcaggggtgaggaggggattatctgaggcatctggagatgtatatcctgtggtttcccctgcccctctgtttccgatgaggtgtacggatgagtgacctgcactaagaagtgagttgccacagtgaaaatgggttggtttttgtcttcgacgctcagggtctgggcgcctcgcatttgcagtctgttgtgacagacacggggagctccgcgtgccagcctgtggctgccctgctgtgggggtcctggggccggcgaggccccttcagtcttgttctggggggacggcccactccggggagggggtgtgctgtgctgagcgctgtatccctgaatatagtttattttttctacatttgaattctgttgtagatttatgtaaaaatacattctttttgaaaataaaaattttcatgtcttctaaaaaaaaaaaa

SEQ ID NO: 693170 - DNA, 956 bp, Homo sapiens
  misc_feature (956)..(956): n is a, c, g, or t
tgggcatccaaaatgtgaactttaataacgggtcaaatggggggttccccaggaacaaaaatgacggaacgggtgctggaggcctcagggtgcccacttcccgtgctccaagttcgggaggcgaggaggcaagggaccctgttgaggcagggacagggcccagctccagctaagtccatcggtcggggtcccgtgagacccaagatgcagcagttgtgtggagcagggggccgccctgcctgacccgggaggctcctgcagggaatgcggcccaggctggccgggtgagcaggccaaaggctgtggggacagatccggaagcttcctcacgggccacttcgatgtggcggagccgcaggtagacgtccgtgccaagtgccctgcagggcactgcagctgaagagacccaccgaggatactccgcgtaggcccgtgagtggggcaacccgaagccaaagcgggggtcggggcagggcggccaggacaggaggcatccaaaggattgacagtaccattggcagcctaccccaagacacatcacacactcgaacgggaccagcgttcaaaccgagacatgatccacagacagacaacaacaacctatagcatgtccaaatggccacaaggggccttgaaccggaggaccagagattagagaccacacaaaaaaacacagcgaacaccagcacgggcacaacactctgctcagcacacccacaaaggaacgcaaccagcgaaactgcaaacaaggtgccacggaacaacccatggccctagcagacaggtaggaccacagaggaaccagcaacacgacccaccggaacccaccaggacaagaagacaacaacgcaaacaggcggactagactacagcaacacacgaatagaacataaacaccaacaacaaccgagacacgcacaaacaacccacacacaacacacagcactagtaagacn

SEQ ID NO: 693171 - DNA, 5610 bp, Homo sapiens
cccggcggaccgctgacaaggccagagcgccggcactgggtcctctttcccgcaggcagcgtgcccggcctcacatcgcccctctccctccactgccccttcagggaaggaccccagacccaccaagccactcagtccctggacagactgcctctgtcaccgggtccctccacccttgtctcctgtgcggccagcgtcagagccatggcgacggaggagaagaagcccgagaccgaggccgccagagcacagccaaccccttcgtcatccgccactcagagcaagcctacacctgtgaagccaaactatgctctaaagttcacccttgctggccacaccaaagcagtgtcctccgtgaaattcagcccgaatggagagtggctggcaagttcatctgctgataaacttattaaaatttggggcgcgtatgatgggaaatttgagaaaaccatatctggtcacaagctgggaatatccgatgtagcctggtcgtcagattctaaccttcttgtttctgcctcagatgacaaaaccttgaagatatgggacgtgagctcgggcaagtgtctgaaaaccctgaagggacacagtaattatgtcttttgctgcaacttcaatccccagtccaaccttattgtctcaggatcctttgacgaaagcgtgaggatatgggatgtgaaaacagggaagtgcctcaagactttgccagctcactcggatccagtctcggccgttcattttaatcgtgatggatccttgatagtttcaagtagctatgatggtctctgtcgcatctgggacaccgcctcaggccagtgcctgaagacgctcatcgatgacgacaacccccccgtgtcttttgtgaagttctccccgaacggcaaatacatcctggccgccacgctggacaagtgagtactgcgtgggactgtgggggcgggcatgtggcctccccagccagagacacctgcgtgccagcgtgagcctttggagagcgtgttgtgggcttggcacgggatccaggctcctggtggagcttcggcttctgggcagtggcctgttaggtcggagggcaggcccccgtccatcccttcccgaggctgaacctcaggtccgactataggaggatttagggtccgttttctggttgagcaactgtggccagggcaggcctagccatcccgcatgaaggagtcggcggtccgggggcctccaaggccctttctggttctgacctctgagcatcttgattttacctctcacaaagccactgccctcctgggctgttctctaagctccagctttcccatgcgtgcaccctcagccctgtgggtccgagcctgggccctgatcctctgagggctgtgtggttgggtggtaaaacctgttctggatgtttccagaaccaagaggacttcctcacccttttgaggatgacccgagtcagggacgataacacccatcagcttcctgttaaagtctctcttggaactacaaatacttgcggctgtcacactgtgctctcagacgccaagtcactggactttgagcctgaggggctccttaccctgatggggaagggggttccagccccgctggcttttgcacctggcgctgatggtggctgtgacgtagtggctgcagagttgggtgtggggacagaaggatgcctccagacatgccgcctcacccctctctctgtcttgcagcactctgaagctctgggactacagcaaggggaaggtgagcccccgcaggcttgggcccccatggtgcaccatccctgggtcatggcctctggtggggacagagctggccccggtgatgacaaaggagaggagctcagagagccatctccgctgggtttggtgcgaattcctgaaagacctgggtatttgtagggtggcagtctgcaagttaaatcttcgattgtgtgggtttggtacttgtacttttcagaaataagtgaagtgagtagtgaaacgccttgcttagaacgtagaattacacaaaatcaaggggaaccatgactctgtgaccagcctgtcccctcctgtttcagtgcctgaagacgtacactggccacaagaatgagaaatactgcatatttgccaatttctctgttactggtgggaagtggattgtgtctggctcagaggataaccttgtttacatctggaaccttcagacgaaagagattgtacagaaactacaaggccacacaggtgagggcctgcgctcctgcagtcactggctgcctgttgatgtgaggacagttcctgcaggtgaagcgtggtgtgcccgtagggtgctgtcgtcttccccttcccacctcagccctccgctggccccgctgaggaaccgctgctaagagctcttgcccaaggcatggagctggtcactgtgctgccgactcagacccgggctcctggcttgaaccctgtttctccctgttctgccaggcatgctggtccggaaggtgtgtgtggctgtgggactttaggtgggtgcagcccgtcccacgtcacggcgagctctgtttcctgggctggggacagtgaggtcatcgctgccccatcctggaggctctggctcctttcgggtacctgttccctctcccagagagaccccccagctgcatgcaggcctagtgggctccacggcggagctggttcccaggctacctggggttgccacctctgtgggtcccggctgccctctgcagccgccgctacttcctcaccctctggccctgcatttccacgtctcatggagccaacgagagcagggggttcgagcccttgtggaaatctggggaggcactgcttctccctccatgtgagcagcttcacccagcctggggtcagtgcttacgctccacggcgggcctgggccttcccctgggtcctcgccggcgttctggggttctttggtttacgtagaagctgtaaacactttgatgtggccgaccttgcaccaccagtctgttagttctgacctccctgcttgggtggtggacttgtccttgctgtgacagagccagccctgtggggtgctctggggcttagcattggggggaggcggtgggagtgggcggctcagggtccgaggagaagagggacattgtcgataaaggactgaggactgtgaggggtctgactgcagtccttgtgcgcgccagcctctgagccagtcctgctgccgcgctcctccttgtgggcgccgagctgctgttggtgggggcgtgtggggctcctggtctgcaggcagggctggcactccctgtggcctcctgcccctgtcccccaaccggctgtgtcgccctggtaccggctgctgtcccctcgctcccctcccctgggctccctgtgtcgaaggtgggcagtgggtgcttgtcctgtgacctcccaggtggcgggcaggcgctacccgcgtttctggagaaaggtggagctcagtctgggatggcgtccccgacccaggcgcagggatggctctggttctgactgtgtctttgttttcagatgtcgtgatctcaacagcttgtcacccaacagaaaacatcatcgcctctgctgcgctagaaaatgacaaaacaattaaactgtggaagagtgactgctaagtccctttgctcctgcccgcgagagactgtcgggaagttgacccggattggcaagaaacagggtgtcttggaggtggtcccccagatctgcgcctgggggtcaggacagggcctgatttgagcctcctctctgaagatgatttggccgagcggaaggtgtggaccaccggaaagttcttaaaagttgctggtgacatttcttgccaattctaacactgtctagggaagagttcctagtctattgtgttcaaacagagtcaacaaaagtttttaattttttattacagaagggtgaagttcaatttaacatgcgttgtgttttttcagtaaacgttctgtatctttttgatattccatgacccagtgcacgctgtggcctgtcaccgccaccgtggccccgccagctggcctcccctttggcccacgccggccgcccccattctctgctgcgtagatgccctggcccagggccctgactcctccattcccgccagtagctgttcctagtgtattttcgtctttctggaaaacagcattgagtggttgttttctgtgtaaagagccgtttgtgtcttgggagtttgtggcccacatgccgatagcacggtcatcgcacatgactctcccgtttgtctcagtgtccctgcaacaagcagcaccgcagactgtaataaaaggtggggttttgtgaatggttgtggcaagtgcgtccttgtgaagctcgtctccatgtggctttcttggagaaaggctcccctggggcaagagggtggaaggtttctttggacaggaggtgctgaggctggctgcacctgctctctgaagacgccttcctctctaggttcattgttcagtgttgctggaggcggggaacgggggtggggaggttcttagttgcgaaggagccaagctcctgatggacttgcgttgggatgtgggggacacctgtggcatggtaaggctccctgagtcccttactccaggtcagatgccagtgggactcatgcgccctatgagggctgcagggccagtgctgcccctcggactcctcgaggggttgggtgctaagcgcgagcctcgccgtccctgctggagccctcgcctgcctgcccctctgcctgtgctcctggcactgtggcttcccggtgctcacctgcacagcagttaacagcagaggccgagcgggagcctctggggagcgaggctgaaacctgaacctgcccatggagacagttgtggtgagggttgccacacacagtgagggcggagcagggtggctgagggcacaggtgcctgggtctgtcccacggggcagggctttggggctgtgatgctctgggaagccagcttgggtcctgggtctacagagggccctggccccggagcccagccagctctgcctctctcagggcctggagtcctgggggagctcagccagctctgcctttctcagggcctggagtcctggatgaatcctgcaggtttttggttgcaccggcccagggaggaagcggggggtttgtcaggtgggctctcctggaggtcctcgagtggcaggggtgaggaggggattatctgaggcatctggagatgtatatcctgtggtttcccctgcccctctgtttccgatgaggtgtacggatgagtgacctgcactaagaagtgagttgccacagtgaaaatgggttggtttttgtcttcgacgctcagggtctgggcgcctcgcatttgcagtctgttgtgacagacacggggagctccgcgtgccagcctgtggctgccctgctgtgggggtcctggggccggcgaggccccttcagtcttgttctggggggacggcccactccggggagggggtgtgctgtgctgagcgctgtatccctgaatatagtttattttttctacatttgaattctgttgtagatttatgtaaaaatacattctttttgaaaataaaaattttcatgtcttctaaaaaaaaaaaa

SEQ ID NO: 693172 - DNA, 990 bp, Homo sapiens
tcgtgaagactacccctagaagccacacgatggagaataggaagatacgactcatatcaacattgtcgtcataggacacggtagattcgcggcagagtccaccactactggccatctgatctataaatgcggatggcatcgaccataaagaaccagttgaaaacatttgacgaagcgagcgctgctgacgattggtgaaagggctccttcaacgatatgcctgggtcttggataaactgaaagctgaccgtgacgcgtggtatctagccatatgagtatctccttgctggaaacttagagaacagctagatactatgtgcactaatcattgatgcacaccaggagcgacagaagacatttaatcacacacaacattgagttagcacgtggacagtcgtcaaggactgtactgttgcttgtccttgactggttggactagctggattggtaagagtgacaagttgagaacaacatagtgctcattcatgcgccaaggacactgcgccgtcatgtaccctccgcaagtaaggccgtgtccaccattccttgcgtgccttaccaacatacttggggttggtgaacaaccacaaacataaccactttgcgtaccggggatggactattagacccaacacacgtagtgggaatatcctcaagccatggaaaggcacccaggccccttaatcacggcgcgacggacaacagcgcacgcaagtcatttggcaaggttgggaaagaactatgggtattacagacagccggtagacagcactcccaaaaggacaaagcgctattttacccaacctttttcaaaaccccgacaactaaatccttgtagcagcgacgcttaagtcgaaagacccgtccccaaccggaaagacgtaggcgtaggatttcaacgaccacactggtataggggttgtggccccacaaaacgttacatagccataggggcgatctctagtgtggacaacactggcaggtcacgga

SEQ ID NO: 693173 - DNA, 5492 bp, Homo sapiens
gctccctgttctgcatctcgctcaacagactgcctctgtcaccgggtccctccacccttgtctcctgtgcggccagcgtcagagccatggcgacggaggagaagaagcccgagaccgaggccgccagagcacagccaaccccttcgtcatccgccactcagagcaagcctacacctgtgaagccaaactatgctctaaagttcacccttgctggccacaccaaagcagtgtcctccgtgaaattcagcccgaatggagagtggctggcaagttcatctgctgataaacttattaaaatttggggcgcgtatgatgggaaatttgagaaaaccatatctggtcacaagctgggaatatccgatgtagcctggtcgtcagattctaaccttcttgtttctgcctcagatgacaaaaccttgaagatatgggacgtgagctcgggcaagtgtctgaaaaccctgaagggacacagtaattatgtcttttgctgcaacttcaatccccagtccaaccttattgtctcaggatcctttgacgaaagcgtgaggatatgggatgtgaaaacagggaagtgcctcaagactttgccagctcactcggatccagtctcggccgttcattttaatcgtgatggatccttgatagtttcaagtagctatgatggtctctgtcgcatctgggacaccgcctcaggccagtgcctgaagacgctcatcgatgacgacaacccccccgtgtcttttgtgaagttctccccgaacggcaaatacatcctggccgccacgctggacaagtgagtactgcgtgggactgtgggggcgggcatgtggcctccccagccagagacacctgcgtgccagcgtgagcctttggagagcgtgttgtgggcttggcacgggatccaggctcctggtggagcttcggcttctgggcagtggcctgttaggtcggagggcaggcccccgtccatcccttcccgaggctgaacctcaggtccgactataggaggatttagggtccgttttctggttgagcaactgtggccagggcaggcctagccatcccgcatgaaggagtcggcggtccgggggcctccaaggccctttctggttctgacctctgagcatcttgattttacctctcacaaagccactgccctcctgggctgttctctaagctccagctttcccatgcgtgcaccctcagccctgtgggtccgagcctgggccctgatcctctgagggctgtgtggttgggtggtaaaacctgttctggatgtttccagaaccaagaggacttcctcacccttttgaggatgacccgagtcagggacgataacacccatcagcttcctgttaaagtctctcttggaactacaaatacttgcggctgtcacactgtgctctcagacgccaagtcactggactttgagcctgaggggctccttaccctgatggggaagggggttccagccccgctggcttttgcacctggcgctgatggtggctgtgacgtagtggctgcagagttgggtgtggggacagaaggatgcctccagacatgccgcctcacccctctctctgtcttgcagcactctgaagctctgggactacagcaaggggaaggtgagcccccgcaggcttgggcccccatggtgcaccatccctgggtcatggcctctggtggggacagagctggccccggtgatgacaaaggagaggagctcagagagccatctccgctgggtttggtgcgaattcctgaaagacctgggtatttgtagggtggcagtctgcaagttaaatcttcgattgtgtgggtttggtacttgtacttttcagaaataagtgaagtgagtagtgaaacgccttgcttagaacgtagaattacacaaaatcaaggggaaccatgactctgtgaccagcctgtcccctcctgtttcagtgcctgaagacgtacactggccacaagaatgagaaatactgcatatttgccaatttctctgttactggtgggaagtggattgtgtctggctcagaggataaccttgtttacatctggaaccttcagacgaaagagattgtacagaaactacaaggccacacaggtgagggcctgcgctcctgcagtcactggctgcctgttgatgtgaggacagttcctgcaggtgaagcgtggtgtgcccgtagggtgctgtcgtcttccccttcccacctcagccctccgctggccccgctgaggaaccgctgctaagagctcttgcccaaggcatggagctggtcactgtgctgccgactcagacccgggctcctggcttgaaccctgtttctccctgttctgccaggcatgctggtccggaaggtgtgtgtggctgtgggactttaggtgggtgcagcccgtcccacgtcacggcgagctctgtttcctgggctggggacagtgaggtcatcgctgccccatcctggaggctctggctcctttcgggtacctgttccctctcccagagagaccccccagctgcatgcaggcctagtgggctccacggcggagctggttcccaggctacctggggttgccacctctgtgggtcccggctgccctctgcagccgccgctacttcctcaccctctggccctgcatttccacgtctcatggagccaacgagagcagggggttcgagcccttgtggaaatctggggaggcactgcttctccctccatgtgagcagcttcacccagcctggggtcagtgcttacgctccacggcgggcctgggccttcccctgggtcctcgccggcgttctggggttctttggtttacgtagaagctgtaaacactttgatgtggccgaccttgcaccaccagtctgttagttctgacctccctgcttgggtggtggacttgtccttgctgtgacagagccagccctgtggggtgctctggggcttagcattggggggaggcggtgggagtgggcggctcagggtccgaggagaagagggacattgtcgataaaggactgaggactgtgaggggtctgactgcagtccttgtgcgcgccagcctctgagccagtcctgctgccgcgctcctccttgtgggcgccgagctgctgttggtgggggcgtgtggggctcctggtctgcaggcagggctggcactccctgtggcctcctgcccctgtcccccaaccggctgtgtcgccctggtaccggctgctgtcccctcgctcccctcccctgggctccctgtgtcgaaggtgggcagtgggtgcttgtcctgtgacctcccaggtggcgggcaggcgctacccgcgtttctggagaaaggtggagctcagtctgggatggcgtccccgacccaggcgcagggatggctctggttctgactgtgtctttgttttcagatgtcgtgatctcaacagcttgtcacccaacagaaaacatcatcgcctctgctgcgctagaaaatgacaaaacaattaaactgtggaagagtgactgctaagtccctttgctcctgcccgcgagagactgtcgggaagttgacccggattggcaagaaacagggtgtcttggaggtggtcccccagatctgcgcctgggggtcaggacagggcctgatttgagcctcctctctgaagatgatttggccgagcggaaggtgtggaccaccggaaagttcttaaaagttgctggtgacatttcttgccaattctaacactgtctagggaagagttcctagtctattgtgttcaaacagagtcaacaaaagtttttaattttttattacagaagggtgaagttcaatttaacatgcgttgtgttttttcagtaaacgttctgtatctttttgatattccatgacccagtgcacgctgtggcctgtcaccgccaccgtggccccgccagctggcctcccctttggcccacgccggccgcccccattctctgctgcgtagatgccctggcccagggccctgactcctccattcccgccagtagctgttcctagtgtattttcgtctttctggaaaacagcattgagtggttgttttctgtgtaaagagccgtttgtgtcttgggagtttgtggcccacatgccgatagcacggtcatcgcacatgactctcccgtttgtctcagtgtccctgcaacaagcagcaccgcagactgtaataaaaggtggggttttgtgaatggttgtggcaagtgcgtccttgtgaagctcgtctccatgtggctttcttggagaaaggctcccctggggcaagagggtggaaggtttctttggacaggaggtgctgaggctggctgcacctgctctctgaagacgccttcctctctaggttcattgttcagtgttgctggaggcggggaacgggggtggggaggttcttagttgcgaaggagccaagctcctgatggacttgcgttgggatgtgggggacacctgtggcatggtaaggctccctgagtcccttactccaggtcagatgccagtgggactcatgcgccctatgagggctgcagggccagtgctgcccctcggactcctcgaggggttgggtgctaagcgcgagcctcgccgtccctgctggagccctcgcctgcctgcccctctgcctgtgctcctggcactgtggcttcccggtgctcacctgcacagcagttaacagcagaggccgagcgggagcctctggggagcgaggctgaaacctgaacctgcccatggagacagttgtggtgagggttgccacacacagtgagggcggagcagggtggctgagggcacaggtgcctgggtctgtcccacggggcagggctttggggctgtgatgctctgggaagccagcttgggtcctgggtctacagagggccctggccccggagcccagccagctctgcctctctcagggcctggagtcctgggggagctcagccagctctgcctttctcagggcctggagtcctggatgaatcctgcaggtttttggttgcaccggcccagggaggaagcggggggtttgtcaggtgggctctcctggaggtcctcgagtggcaggggtgaggaggggattatctgaggcatctggagatgtatatcctgtggtttcccctgcccctctgtttccgatgaggtgtacggatgagtgacctgcactaagaagtgagttgccacagtgaaaatgggttggtttttgtcttcgacgctcagggtctgggcgcctcgcatttgcagtctgttgtgacagacacggggagctccgcgtgccagcctgtggctgccctgctgtgggggtcctggggccggcgaggccccttcagtcttgttctggggggacggcccactccggggagggggtgtgctgtgctgagcgctgtatccctgaatatagtttattttttctacatttgaattctgttgtagatttatgtaaaaatacattctttttgaaaataaaaattttcatgtcttctaaaaaaaaaaaa

SEQ ID NO: 693174 - DNA, 3167 bp, Homo sapiens; identical to SEQ ID NO: 557735
  misc_feature (16)..(16): n is a, c, g, or t

SEQ ID NO: 693175 - DNA, 418 bp, Homo sapiens
tgaacatggagagacgtgacggccatatatgcaagcgcaggaacacagcatcattcacattcgttcgcatcctatgcctccatcagtgtgatgccgggcgctcataagagatcggcatcactagtaagcctggcctgtcctccaacatcagttccatgatgtaaagctctctctgttaccagttgaggatcatgtattctttgagctcctgacaatattatcttctacctctcatgaacatatcgtaagagttggactgtttgggatttcttgggtcaggcatggtatagaccaggtcttacagccaatggatatttatcaagaatataacaaatctgtatcatactatttcctttaccaaatgacccaacagctatacatttggtgtgctcagatcgtcttcatactacccatttcg

SEQ ID NO: 693176 - DNA, 5399 bp, Homo sapiens
tgtttatcgattgccacagagaccatcatagctacttgaaactatcaaggatccatcacgattaaaatggacggccgagactggatccgagtgagctggcaaagtcttgaggcacttccctgttttcacatcccatatcctcacgctttcgtcaaaggatcctgagacaatggggatgtttgagattttgaccttttgccgatggtcctattttgtcctgtcaagttactgaccctgttttatctggtcacaagctgggaatatccgatgtagcctggtcgtcagattctaaccttcttgtttctgcctcagatgacaaaaccttgaagatatgggacgtgagctcgggcaagtgtctgaaaaccctgaagggacacagtaattatgtcttttgctgcaacttcaatccccagtccaaccttattgtctcaggatcctttgacgaaagcgtgaggatatgggatgtgaaaacagggaagtgcctcaagactttgccagctcactcggatccagtctcggccgttcattttaatcgtgatggatccttgatagtttcaagtagctatgatggtctctgtcgcatctgggacaccgcctcaggccagtgcctgaagacgctcatcgatgacgacaacccccccgtgtcttttgtgaagttctccccgaacggcaaatacatcctggccgccacgctggacaagtgagtactgcgtgggactgtgggggcgggcatgtggcctccccagccagagacacctgcgtgccagcgtgagcctttggagagcgtgttgtgggcttggcacgggatccaggctcctggtggagcttcggcttctgggcagtggcctgttaggtcggagggcaggcccccgtccatcccttcccgaggctgaacctcaggtccgactataggaggatttagggtccgttttctggttgagcaactgtggccagggcaggcctagccatcccgcatgaaggagtcggcggtccgggggcctccaaggccctttctggttctgacctctgagcatcttgattttacctctcacaaagccactgccctcctgggctgttctctaagctccagctttcccatgcgtgcaccctcagccctgtgggtccgagcctgggccctgatcctctgagggctgtgtggttgggtggtaaaacctgttctggatgtttccagaaccaagaggacttcctcacccttttgaggatgacccgagtcagggacgataacacccatcagcttcctgttaaagtctctcttggaactacaaatacttgcggctgtcacactgtgctctcagacgccaagtcactggactttgagcctgaggggctccttaccctgatggggaagggggttccagccccgctggcttttgcacctggcgctgatggtggctgtgacgtagtggctgcagagttgggtgtggggacagaaggatgcctccagacatgccgcctcacccctctctctgtcttgcagcactctgaagctctgggactacagcaaggggaaggtgagcccccgcaggcttgggcccccatggtgcaccatccctgggtcatggcctctggtggggacagagctggccccggtgatgacaaaggagaggagctcagagagccatctccgctgggtttggtgcgaattcctgaaagacctgggtatttgtagggtggcagtctgcaagttaaatcttcgattgtgtgggtttggtacttgtacttttcagaaataagtgaagtgagtagtgaaacgccttgcttagaacgtagaattacacaaaatcaaggggaaccatgactctgtgaccagcctgtcccctcctgtttcagtgcctgaagacgtacactggccacaagaatgagaaatactgcatatttgccaatttctctgttactggtgggaagtggattgtgtctggctcagaggataaccttgtttacatctggaaccttcagacgaaagagattgtacagaaactacaaggccacacaggtgagggcctgcgctcctgcagtcactggctgcctgttgatgtgaggacagttcctgcaggtgaagcgtggtgtgcccgtagggtgctgtcgtcttccccttcccacctcagccctccgctggccccgctgaggaaccgctgctaagagctcttgcccaaggcatggagctggtcactgtgctgccgactcagacccgggctcctggcttgaaccctgtttctccctgttctgccaggcatgctggtccggaaggtgtgtgtggctgtgggactttaggtgggtgcagcccgtcccacgtcacggcgagctctgtttcctgggctggggacagtgaggtcatcgctgccccatcctggaggctctggctcctttcgggtacctgttccctctcccagagagaccccccagctgcatgcaggcctagtgggctccacggcggagctggttcccaggctacctggggttgccacctctgtgggtcccggctgccctctgcagccgccgctacttcctcaccctctggccctgcatttccacgtctcatggagccaacgagagcagggggttcgagcccttgtggaaatctggggaggcactgcttctccctccatgtgagcagcttcacccagcctggggtcagtgcttacgctccacggcgggcctgggccttcccctgggtcctcgccggcgttctggggttctttggtttacgtagaagctgtaaacactttgatgtggccgaccttgcaccaccagtctgttagttctgacctccctgcttgggtggtggacttgtccttgctgtgacagagccagccctgtggggtgctctggggcttagcattggggggaggcggtgggagtgggcggctcagggtccgaggagaagagggacattgtcgataaaggactgaggactgtgaggggtctgactgcagtccttgtgcgcgccagcctctgagccagtcctgctgccgcgctcctccttgtgggcgccgagctgctgttggtgggggcgtgtggggctcctggtctgcaggcagggctggcactccctgtggcctcctgcccctgtcccccaaccggctgtgtcgccctggtaccggctgctgtcccctcgctcccctcccctgggctccctgtgtcgaaggtgggcagtgggtgcttgtcctgtgacctcccaggtggcgggcaggcgctacccgcgtttctggagaaaggtggagctcagtctgggatggcgtccccgacccaggcgcagggatggctctggttctgactgtgtctttgttttcagatgtcgtgatctcaacagcttgtcacccaacagaaaacatcatcgcctctgctgcgctagaaaatgacaaaacaattaaactgtggaagagtgactgctaagtccctttgctcctgcccgcgagagactgtcgggaagttgacccggattggcaagaaacagggtgtcttggaggtggtcccccagatctgcgcctgggggtcaggacagggcctgatttgagcctcctctctgaagatgatttggccgagcggaaggtgtggaccaccggaaagttcttaaaagttgctggtgacatttcttgccaattctaacactgtctagggaagagttcctagtctattgtgttcaaacagagtcaacaaaagtttttaattttttattacagaagggtgaagttcaatttaacatgcgttgtgttttttcagtaaacgttctgtatctttttgatattccatgacccagtgcacgctgtggcctgtcaccgccaccgtggccccgccagctggcctcccctttggcccacgccggccgcccccattctctgctgcgtagatgccctggcccagggccctgactcctccattcccgccagtagctgttcctagtgtattttcgtctttctggaaaacagcattgagtggttgttttctgtgtaaagagccgtttgtgtcttgggagtttgtggcccacatgccgatagcacggtcatcgcacatgactctcccgtttgtctcagtgtccctgcaacaagcagcaccgcagactgtaataaaaggtggggttttgtgaatggttgtggcaagtgcgtccttgtgaagctcgtctccatgtggctttcttggagaaaggctcccctggggcaagagggtggaaggtttctttggacaggaggtgctgaggctggctgcacctgctctctgaagacgccttcctctctaggttcattgttcagtgttgctggaggcggggaacgggggtggggaggttcttagttgcgaaggagccaagctcctgatggacttgcgttgggatgtgggggacacctgtggcatggtaaggctccctgagtcccttactccaggtcagatgccagtgggactcatgcgccctatgagggctgcagggccagtgctgcccctcggactcctcgaggggttgggtgctaagcgcgagcctcgccgtccctgctggagccctcgcctgcctgcccctctgcctgtgctcctggcactgtggcttcccggtgctcacctgcacagcagttaacagcagaggccgagcgggagcctctggggagcgaggctgaaacctgaacctgcccatggagacagttgtggtgagggttgccacacacagtgagggcggagcagggtggctgagggcacaggtgcctgggtctgtcccacggggcagggctttggggctgtgatgctctgggaagccagcttgggtcctgggtctacagagggccctggccccggagcccagccagctctgcctctctcagggcctggagtcctgggggagctcagccagctctgcctttctcagggcctggagtcctggatgaatcctgcaggtttttggttgcaccggcccagggaggaagcggggggtttgtcaggtgggctctcctggaggtcctcgagtggcaggggtgaggaggggattatctgaggcatctggagatgtatatcctgtggtttcccctgcccctctgtttccgatgaggtgtacggatgagtgacctgcactaagaagtgagttgccacagtgaaaatgggttggtttttgtcttcgacgctcagggtctgggcgcctcgcatttgcagtctgttgtgacagacacggggagctccgcgtgccagcctgtggctgccctgctgtgggggtcctggggccggcgaggccccttcagtcttgttctggggggacggcccactccggggagggggtgtgctgtgctgagcgctgtatccctgaatatagtttattttttctacatttgaattctgttgtagatttatgtaaaaatacattctttttgaaaataaaaattttcatgtcttctaaaaaaaaaaaa

SEQ ID NO: 693177 - DNA, 82 bp, Homo sapiens
gccctgaagatagaagtgtaatagataggcatgacaaacaggataataaaaaagttaatataaataaaaaataaaataatat

SEQ ID NO: 693178 - DNA, 185 bp, Homo sapiens
gtggcgcacgcctgtagtccctactcaaggggctgaggtgggaagactgcttgggcccagaagctcaaggctgcagtgggccatgatcgcaccactgtactccagcctgctgggcagagcaatgtactgtcttataacaaaaccaaaaagggcagaacacgtatggtttctaaaagtgccacaga

SEQ ID NO: 693179 - DNA, 285 bp, Homo sapiens
ttttaaggggggggggggggggccccccccaaaaatttcgggggttttccccccaaaatttccatttttttccggggaaaaaccccgaattcccccccctttttagggaaagggtttttccccccgtaacccccaaaaaacaaaggggtaaggggggcccttttcccttttttccttttctttggggttttccaaaacccccccccttcccccccccccaaaaaccccttttaggggggtttttcccccccccaaaattttattaaaaattttggccccccccca

SEQ ID NO: 693180 - DNA, 342 bp, Homo sapiens
gatcacctctctttcctgaaaaagcattgaaccgctgttgttttccggtcgcgaaacacctgcttcctgccggtgccgttgtcgacgatgcaggggtgaatgcaacaagcgtgcacaaaccggtaaccgaatgtgattttttcgtgaaaattgtcaacggcctgtaaaaaccgcataagcacgggctttttacgccgtttggtttggccttgtggcacctgccgcacgcccctgcggtagtgcataaaacctgcaccagaacaaaacgttaccggttcacccctttctgtgagtagtcggtggatccctttgaagcacaaatgggtcattttggtgcaggtg

SEQ ID NO: 693181 - DNA, 367 bp, Homo sapiens
  misc_feature (124)..(124): n is a, c, g, or t
tttttttaaaaaaagggggccccccttttctccctaaaaaagaaaaaaatttttttcccccccccaaaagggaggggcccccccccccccccccaaaggggggggccccctttgggaaaccttnctttttttccccccaaaaaggggggacccaaaaaaaaaccaattcccccccaacccccccccccccccaagttttaagccccccccccccaaaaaggggttcccccggccccccccagaaaggaaaaaaaatttttcccccccccggggcaaacttttttttttaccccggaaattttttttccctttttttttttccccccggggccaaaaaaccccccttttaaaggggtggtttttttta

SEQ ID NO: 693182 - DNA, 235 bp, Homo sapiens
cttgcttaccgagcacggttcactctaaaagtatccccatacgtatctgatagtaaacggcgtacgtgtaaaggccatttcacctggcagactctcatcacattgtcgtgacttgtacacacccctgcggcttcctccagtgctcgtgataggaggcagattcgttctcgccttctcaacataacgagtttcactggagttcatagtccgcatatcacgtgcgccacgtggacta

SEQ ID NO: 693183 - DNA, 107 bp, Homo sapiens
cactgaaatggtcaacattgtccaggtgcttggctgaatttataggggcatgtttctaggcatatcctctttcttttctcatcttcagctatagtcactgccaacaa

SEQ ID NO: 693184 - DNA, 1060 bp, Homo sapiens
agatgtatatcattctatgattgacccagggactggaagatgcagatggcaatgaatcatcagactcacatgacaaaccatccacccccacagagattcaagacagatatcattccatcagaccatccgagagataactagagagaattaacaaggcgatgcagccaaccacagcccagctaagttgtgtgtgtatttttggtagagacggggtttcaccagtgttggccaggctggtctcgaactcctgacctcaggtgatccacccacctcggcctcccaaagtgctgggattacaggcatgaaccaccgtgcccggccgtgatgcgcaactttctaataacatacttttgaaagtgcccagacatacatccctcctctggtaccacagtggccatcagttgccagagaacatgaaattatccagccctcagctctgcagcaggattctgaggagtaaagcaggcctgtaaagtactctaaagtacttcagagaggtaatgccacaaagcgaagaacaaccttcttgggaggcggagcccctcagccctatccaggccagcagtgtccacttgaaatctgaaagcagctccctcacaaaacagcaagatggaaaactccctgggttggcaagtggcctgggaagtacatggcccatctctgtcaggatagcagtggagaggttcgtgccagtgcaggtccaccaaccagaatggtctccagaatccaagctgtcatggggtggcaactcctgggtttctggtcaaaggggagttagactgaacattctggtctttcacgggaaagccattcttccgaattgtgcgggggtgaacccactgttccaccctttttgtgccgaggagggcaaacacggggaagccgacacgggggaaaaaaactcaaacacccaaaaccctgtcgacactcttataccacaagaggactatcacaaatatggcgcgccattaacaagaaacaccggcggttaatcccaacaagacaaaacaaccaaaccggagtccgcgcaccgcaagccaagcgaaaccaagacgtatgt

SEQ ID NO: 693185 - DNA, 694 bp, Homo sapiens
  misc_feature (21)..(21): n is a, c, g, or t
  misc_feature (62)..(62): n is a, c, g, or t
  misc_feature (105)..(105): n is a, c, g, or t
  misc_feature (125)..(125): n is a, c, g, or t
  misc_feature (143)..(143): n is a, c, g, or t
  misc_feature (167)..(167): n is a, c, g, or t
  misc_feature (172)..(172): n is a, c, g, or t
  misc_feature (179)..(179): n is a, c, g, or t
  misc_feature (185)..(185): n is a, c, g, or t
  misc_feature (192)..(192): n is a, c, g, or t
  misc_feature (196)..(197): n is a, c, g, or t
  misc_feature (200)..(200): n is a, c, g, or t
  misc_feature (202)..(202): n is a, c, g, or t
  misc_feature (246)..(247): n is a, c, g, or t
  misc_feature (284)..(284): n is a, c, g, or t
  misc_feature (290)..(290): n is a, c, g, or t
  misc_feature (371)..(371): n is a, c, g, or t
  misc_feature (399)..(399): n is a, c, g, or t
  misc_feature (437)..(437): n is a, c, g, or t
  misc_feature (487)..(487): n is a, c, g, or t
  misc_feature (494)..(494): n is a, c, g, or t
  misc_feature (510)..(510): n is a, c, g, or t
  misc_feature (518)..(518): n is a, c, g, or t
  misc_feature (536)..(536): n is a, c, g, or t
  misc_feature (548)..(548): n is a, c, g, or t
  misc_feature (575)..(575): n is a, c, g, or t
  misc_feature (600)..(600): n is a, c, g, or t
  misc_feature (609)..(609): n is a, c, g, or t
  misc_feature (620)..(620): n is a, c, g, or t
  misc_feature (688)..(688): n is a, c, g, or t
gggacttggcccttaccagcnagcgggtctagctcgcattggctcttggtgcgccaccagcncctgttacgcatgcgaggcccacggagagcctccagaggcacnatggaggcaagatgtgggcnggtggtgagggagcaggnctgtggagcttcctcaccagggtngctgnctctggncccggnctccccntccnnacngnggtccatgcgccactggcaaaggacagccagtccagccccttcnngcgcagtgaggcccccagccaggggggatgtggcggntgcttngctgttctgctttcttccctagttagcaaactgttacctagttatggtgtgaaggggagggggcagggacttaggaccaanggggggaggtaagctccgttgtttctanccgtggtaaatagccccagccttcgttgggggtacacngattaagaaatgggatcactcaggaggattgcgtgagcccaggagggcgnggcggcngtgagccatgatcgcnccactgcnctccagcttggggaatancaggaccctgtntctaaaaacaaagaaaaaagacaaggngatggaatcaaagcccagaggtccnccccttctnagagccaccantagttctctgtgaccatggaaaactacccccagccccactgccttttgcctccgggcagtggggtttngcgggg

SEQ ID NO: 693186 - DNA, 216 bp, Homo sapiens
cctcacgcagagcgctctgcgggtacgccagaggaggaagaaaaggtttagggggaactgactcatgctttgttcttaaactgacagagatgtccttggtattagtgacacactgattcgactttctgtgggcttagaggatgaggatgacctactggaagatctagatcaagctttgaaggcagcaccccctccaagtggaattcacagctagta

SEQ ID NO: 693187 - DNA, 193 bp, Homo sapiens
tggacccacggaggtgtctgttcatgggtgaaggtctaacacggcctgtacaaactgggtaaggagatgtaagagacatgggccaagtgctatatggaggaagagggtaatggcagggctctaggaagggcagtagccatggctgcccagtgagttacgtaaatcacctggtgtcggggaatctggaaatggc

SEQ ID NO: 693188 - DNA, 182 bp, Homo sapiens
ttgtggtgctaaactatgatgtagcctctcaagtactgataaaaatctgccttggtttgggaggccgaggcaggtggatcacctgtggtcaggaattccagaccagcctggccgacatggtgaaacgtcgtctctactaaaaatacaaaaattagctgggcgtggtggtgcacacctgcagt

SEQ ID NO: 693189 - DNA, 1066 bp, Homo sapiens
  misc_feature (327)..(327): n is a, c, g, or t
  misc_feature (335)..(335): n is a, c, g, or t
  misc_feature (343)..(343): n is a, c, g, or t
  misc_feature (355)..(355): n is a, c, g, or t
  misc_feature (386)..(386): n is a, c, g, or t
  misc_feature (546)..(546): n is a, c, g, or t
  misc_feature (570)..(570): n is a, c, g, or t
  misc_feature (573)..(573): n is a, c, g, or t
  misc_feature (578)..(578): n is a, c, g, or t
  misc_feature (584)..(584): n is a, c, g, or t
  misc_feature (592)..(592): n is a, c, g, or t
  misc_feature (595)..(595): n is a, c, g, or t
  misc_feature (1066)..(1066): n is a, c, g, or t
cacgggcgtcgggaagacgctgctggtgaaacggctgcaggatatccttccgcgcggggacgggaccggggcgcggggggcacccggactggggcggggactcaccctttagctgctcgggtccttgaccgcttcgcacaggtgagctcccgggatgggaaaggcgacctgggggagccgcccccgacacggcccacggtaggtgtccgcccccgcgggtggagttgcggggggtcagttctgcgcttggcgaagagctccgggctcctctaagtgcacgccgaggcgcagcgggtcaggtcgtgacttaaggccagccttcgggancggggganggcccganctgaggataatnggcgcgggatgagggggcctgcgccctccangggcacttcctctcccctcgcaacggcttcctgtggctggtcgcccccacagcgagtccagctactgatgggcgtcggtccctgctcgccgttcctgcgttagggagaatgggtctgcggggttcaggccaccgtgtaaggtgtgggcacggtgctcttnaggagttcacaacgggacagcggntgnattgntctctntgcatcgnggnttttcctataggtgggcaccaatcttactgacatcgtggccacagagaaagatcaccatccgggagcttggggggtgcatgggcccatctgtccagttacctatggaaccggcgcggccaaccggggggtgggaaccaaatagggacccataggaaagggccacattcgggacggcaagcccaacctggcgcgggtaaaagggcagggaaaaagggagaaaaccaccacggaaagaataaaaaggaggcccggggggcccggatggggatagaggagagcccaaggaccaagagagaacaaaagaaaggaaaacgaagacgaggcgccaaaaaaaaggcccgaagaaaccgagaaggaatggaaaagaaaagagggaaaaaaagagggagcagaaaaacaaagaagaaagaagagaaaacacacagagagaagaggataagacagaagagaaaagagtagacgacgaacgn

SEQ ID NO: 693190 - DNA, 134 bp, Homo sapiens
tccatagaagcagggaacactgggaacatgtataagatcgaaccggtcctacgcatcatcaccatttgcacgaaccagacatacgacgaaggtcagtttgtgctatccatcaaagtcacagatcagaggatccc

SEQ ID NO: 693191 - DNA, 851 bp, Homo sapiens
agcgggctgggcatggtgatgcgtgcctatagttccagctactaaggagacagaggcaggaggactcctttagtctatctctaaaaaaaaaaaaaaaaaaaaaaaaattaagttaaaccaaaaaacaatatgggtttggatgtcctattgggtataggacccaaccatatgttaaaggtggtgacttcttttagcttcaggtggtattgtagaaataaattcccaagtgtttcagtgtttcagaaaagtgggcataattgggcagaactagaaagaaaagaaaggcaataacctagtgttctaggccagaaaatacttgttcaactagttaagtatgagacaaagaggcaaaggatcaccattaagtggacggcaactaatgtgaactgcagtggtatgaaacacaagttacgaaccccaggaaaaagaattcacgtcgaaggccattaatgcttagagaacataaggggagcttaagtcagtggaaccagaaaaaaccgaacaaaaagccgagtcgaaacaaagaaaatattaaaagacggctactggggaagaatccccgattttgttcacaagtatcaaagaacgagggaccgcccagaaatatttgtaattcgccagagacttagccccgtaaaagagagaaaaagagcgcacagtgtgtgttattgtctgtgaataaaatagccgtaagtcgtgtgtaatgtacgcaaggagccaaacaggcttgctggagcaaccattgtagcggacagacaaagtgtagtgtaagtaaaaatctcccaggaaaaaaaaatcgccttctattacccccacacccaaaatatattttcacgtcgtgacagcaaccg

SEQ ID NO: 693192 - DNA, 761 bp, Homo sapiens
agccgcagggccgtatgcaggtgcatgtgacgccctagccggaatggcatgtgtcttgaagccccacttccacaagagactggtcaggcggccgcgatggaccacggtggttcaaccaggccggggccggacagggagtccgcatgacgtaaggcccggacaagccaaggcgcgccgtcatcgctccgcgccccgcggtcggggtcccactccggcccatcgtgcgctgcactccacgagttcggtactcactactgaagcgtgcgcgaccggccgtcggcttcagcctggcaggatgctcagaggatggcgcggtcgattcacgagagcaagcgtggacccgtgaccattcggacattatcttgtgtgactccgagcgcagagcggaatctaacgctccacgcgcatgtccctgacaggcccaagcggtgcaggcgtgtctgaacgtgagtacccgatcccaaaactcaatcctccttcccgcgaggaagccgcctctgggccgccaagcaagtggagacgagttcgtgctgaaagaagcgtgaaacgtaggacacccagatagaccaggacaaggtcatgccctgtcctggaacgtctatacggacggacgacagctcagagtcgatcactgattgaagagacagagtttccaaagccttcgctaagtctccgtcatggaccgtggcaaacgcccggctcttcggaatacggggcacaaagagccacagggaagccaggagaacaggaattgtttcgac

SEQ ID NO: 693193 - DNA, 392 bp, Homo sapiens
gtcacactagcaggatcccccctgtttccccctaaaatcaccacgatcaagagggacaagcatcaggcacgcagcattgcagctcaaaacgcttagcctagccacacccccacggtgaaacagcagtgattaacctttagacaataaacgaaagtgtaactaagctatactaaccccagggttggtccatttcgcgccagccaccgcgtgtcacactgatttaacccaagtcaagtacacgccggcgtacagagtgttttatgatcaccccctccccaataaagcttaaactcacctgagttgtaaaaaagctccagttgagcacaaaatatactacgacagtggctttaagcatatcttaacacacgatagctaagacccaaactgggatt

SEQ ID NO: 693194 - DNA, 121 bp, Homo sapiens
cttcagccactacaacagaattttaaatgacagtgcagaatgtggagtgtttttacattgatctttgctaatgcaattagcattatgtttgcatgtatgacttaataaatccttgaatcat

SEQ ID NO: 693195 - DNA, 140 bp, Homo sapiens
ggcatgtggtggtgcatctaagaagaatatcctctcacctcagcctccccagtagcccgctaagtcacagctacttgggaggctgaggtagaagcatcacttgagccaaggagtttgaggtaatacaggagctataatca

SEQ ID NO: 693196 - DNA, 638 bp, Homo sapiens
gtgtgctctcagaggaaattaaacaaaatcaaaaacagaaacgtagatgggaaatctcaaaataactggagattaaacaaaacacttctagataccagatgggtcaaacgaagaagtctgaacagaaactttctcaccaatgttttgaactacataaaaatgaaaatacaatgtatcaaaatttataggaagcagtgaaagtagtggttggagataaattataactattgaatgcctatattagaacgagattaaacaagatttaaaattcataatctaagtttccatcttaggaaactacgagacagacacagatcagtgctaagcctaaagcaagcaacccggcatagaacatcacacattatagtagaaatcaataaacatagcaacaaccaagaaaccaatagaaacaattcagtgaagtacacaatgtgctaatctgtgcagcagcaactagaaacacagacaataaaaacagtacttttcacaggtcagtaaaatgtataaacctcttagctaagcttactaagcaaaacataaaacacagatttgctgataaccagaaattgagaaccggggtcatcactactgatccccaaggaccttcacaaccgactaccaacacagacatctcactc

SEQ ID NO: 693197 - DNA, 221 bp, Homo sapiens
cgttgtctctaacagagacatagaagctctttgtttttgagagggagtttggctctggtggtccaggctggagtgcaatgatgcaatatcggctcactacaacctccgcctccggggttcaagagattctcctgcctcatcctcccgagtaactggaattacctgtacctgccagcatacccagctatttttggcatttttagtagagacaaagggaaaca

SEQ ID NO: 693198 - DNA, 1236 bp, Homo sapiens
  misc_feature (181)..(181): n is a, c, g, or t
  misc_feature (593)..(593): n is a, c, g, or t
gaagactgcctgggggtccaggagtactccaagctctgcctgaccagcatcttcctcctcttcctgctgtctgctgtctacctggtgccctggagttgccagggcccgtgttggagtgcagcgaaggtgtccacacgtcaatctagttggcaatgggtgaaggcgcatggagtggaatgancgcctccgactttccttaatgtcccgacacgaaatatgtcagggcaactaatctgccaactgtcaaactggttggccgacgttctaccatgcgtcaattatcctgtggcctcctgagattcttgaggccccgaggcgaggacgcctcaattggctacgtctgcttccgttccagacatggttgaaccacgacatgtccttgcgggcgctttatcgctggttggtgcgcggtgctccagtagagtcgcgaacgatctcatcaccactagttcgctggcaggcctccttaccctcgcgcgtgctgcctcagttcgtgctccacgcgaggcgcctatcgcttggaaccacttcggggggaggcgtgccggcagagatagccgcacagtcgatcgacagctgcgaggggcatcatncctcgctgcttctgcgctgatggtgcccttgggagcgctgtctttctggttccagagaaacgaagtgagcagaactcgtaggaaaggctcgtgggtaaggagagtgcgcgcggtgactgcatctcatgcacacgatgcttccttcaaagtaaccacgtgatcgagccgtcaatccctgctgctgacgcacctcgtgtctgaaagcgtttgacgttggaacccttttatctggacaccaacggccgcacttttccccaggtgagcctatctgggaagaaccatgtggggacgtatagggcgacacactttccctacgcgacaacatttggtggaaacgacactaggtcgcacagggcatagacgatagtaccattcctggttgaaacacgacccacgggtcgcgtgcttctttgcgagcacagcgacgttgcccctttcccgcgctttcgtctccggccgcggtgccccgtgatgttcccttttggtaggtcttcttccagcttctcccctttcccaatgtggtaaccgtgtcctctccttcttcttgtactctttcctcgcgccgtgccgtttttacctgagggacttccttatggtcctctgcagctgtgtgagactcgggacccgctcaggcattcggccg

SEQ ID NO: 693199 - DNA, 475 bp, Homo sapiens
ctcgcggagccgctcctgccgtcgccgccgcctttctcctaattcatcctggcgcaccataggcggcacaggcacaaatttgttcaaccgagtggtttgcccaaaagccagtcacgccgggagctggtacacagctctatgaccgcatctgaatgcacagttagaaggttggtttttacaagtccagcttacagacctgctagagccattattgtcccccatgcacgatatacgcactgcgggccttgtgctgcccatgcttataaacaaatgcgatccgtttattacccggagaattttcatccttgggccttttcattatgcgcccctctttcaatgtgcactttccagtgcggatatatataggcctctgtttgaccttcgtattgaccaacagatttaccgataactgtcgaagacaggatttgttgcgcttgcttttcctacagatccattcggatgttttccttttttc

SEQ ID NO: 693200 - DNA, 479 bp, Homo sapiens
  misc_feature (14)..(14): n is a, c, g, or t
  misc_feature (25)..(25): n is a, c, g, or t
  misc_feature (56)..(56): n is a, c, g, or t
  misc_feature (68)..(68): n is a, c, g, or t
  misc_feature (193)..(193): n is a, c, g, or t
  misc_feature (264)..(264): n is a, c, g, or t
  misc_feature (291)..(291): n is a, c, g, or t
  misc_feature (293)..(293): n is a, c, g, or t
  misc_feature (473)..(474): n is a, c, g, or t
aaaaaaaaaactgnaagctaagctnaagtgtcttccccaaaaatggccaacccaanatttgtgccttnaaaacccaagatcccctggtggcaataaggcaaccggagggaatctccctggtctgctggttgcgaaagacttggggggaaaagcatagtatctgggcccagggtgcactgttccctcatggcanagtccctcatggcttcccttggctaggggagggagttcccagaccccttgtgcttccccaggtgaggtganaccctaccctgcttcagctcgctgtcntngggctgcacccactgtctatccagtcccagtgaggtgaaccgggtacctctgttggaaatgcagaaatcacccgccttctgtgttgatctctctgtgagctgcagaccggagctgttccttttttggccatcttgccctggttcctagtcaagcattttttaagagaggattttcaccanngtaaa

SEQ ID NO: 693201 - DNA, 1014 bp, Homo sapiens
gccagctctgggtacccggctctgcgtcgcggtcccagtgatgtgggccactcgtccaggtgctcgtgctcagccagaacacaaagcgtgaatccagaagaaaagtacacctctggaaaccgtcaagtgctgtcaagactattgcagatatcatccgaacatgtttgtggaccctagagtccagtgatgaagatgctttgtggacgccaatgggatcgcattgtgagtgatgcaactgatggcaatgcctgttcttcgagagcttcaagtccaggcatccagctggtccaatgtccatgatctgacattagcctggacccaggatgaacgaggttggacgactgggaccagcatcagaaattattcttgcgaagggaaatgctgtctgtagctgagcagcttcctggagcagcgagatgcacccaacagtggtgatcatgtgcttagccgcgaaggcatcggatgactatgatcagcaccctaaagaaaataagtatcccagtctgacatcagtgacagtgatatgactgctgaacatcatcaagcagctctattactaccaaagccatcagtcggtggtcatctttgcgcttgcaacattgccctggatgctgtcaagcatggtacagccttgaggagaatggtcgcgcacagcagattgacataggaccactagtgcgcaagaagtgggaacagtgacttacactgacgagagcactcatatgaaggacctctctagttgactagcgtagcaagtctgtgacctaacagggattgtgatctcaatccacagctatcctggggctaataatcaagaagccttacggacattcgaagcgtgcgtggactcacattcttttggagcttaccgtgaaaagacgaaaagcaggatggcccttgcagcattacaccgacgatgagggaagcacacccgaaattccacaactgggggacgaggtcatccaaccgtacgcggcaagaaataacccaactgagcccgtgtgaccttaaata

SEQ ID NO: 693202 - DNA, 202 bp, Homo sapiens
tctacagttcatgcatcctttttaaaaatatgttttagaggacagaggtttaatcattctttatgaggctgagtgcagtggcttacgcctgtaatcccagcactttggtaggccaagtcaggcagatcaattgaggtcatgttgaaaccctgtctctactaaaaatatagaaatttagccaggtgtggtggtgcgtgcctat

SEQ ID NO: 693203 - DNA, 450 bp, Homo sapiens
actgatgctttccaatgttctctagcttaacgaggacctgctccatggagccgcgcggaacggggctcagatcacccagcgcaagttggaggcggcgcgtgatggcgtagcagtgcgagagactacctggagggcgagtgcgtgcagtggctccgcagatacctggagaacgggaaggacaagctggagcgcgctgaccccccaaagacacacgtgacccaccaccccatctctgaccatgaggccaccctgaggtgctgggccctgggtttctaccctgcggagatcacactgacctggacagcgggatggcgaggaccaaactcaggacactgagcttgtggagaccagaccagcaggagatagaaccttccagaagtgggcagctgtggtggtgccttctggagaagagcagagatacacatgccatgtacagcatgaggggctgcc

SEQ ID NO: 693204 - DNA, 130 bp, Homo sapiens
  misc_feature (91)..(91): n is a, c, g, or t
  misc_feature (126)..(126): n is a, c, g, or t
ggccctgcaggaattcggcacgagagcaggtggtaataccatgggtgctgtgacactaacagtcattgagaggtgggaggaagtccctccntccttggactggtatctcaggcaactattgtttcntcct

SEQ ID NO: 693205 - DNA, 800 bp, Homo sapiens
cggtttctgagcgttggtctttgtgactacgcgctacccccttttgctttggttctgccatgccgatgtaccaggtaaagccctatcacgggggcggcgcgcctctccgtgtggaggcttcccacctgccagtgtaccggtctccccaagtgcacggaggagctacggcccaggccgtgcgcgctgctcatcgtgcaggaaggagtctaacctgtctctgcaagctcttgagtcccggcgcaaggatcgatgttctaagagcagcgtctgtatgagttgaacaggctgccagtttgataggcctctcgcaagatgattcagacaccagatgccgacttggatgtaaccaacataatccaagcggatgagcccacgattttagtccacgcaatgcgctgggccttgacatcccaggtgccttgggaaggataacgggggcgcttgaacggactgtcgtgatcaaggcaaaagctccggactccccttcccctctcccggtggttgttgttgcaccagggctggctcttgtgatgccactccgaggggtcctgtccaccgtgtgcaccacgcgaattctcttcgggaccaaagagcgttgccttgaaaaaacctatctacaaggtgctttggggaagaaaacaggagttaaacaaaaacaaggccacggccaagaacatatcagctgggaactccactttaaaattggggaagaatggtgccgaaggactgcagattgaagtcagcatcccagaggatgtgccccatcgaagggcacagggcacttttgacgttcctgtact

SEQ ID NO: 693206 - DNA, 144 bp, Homo sapiens
atggatgtgtacctgtatcttcttcagcatcacccaaggtgacgacgaatcacctgtcgctaattacaacaccgcccaccatgagtccactgattgcacctttgtttgaacaacaaaggtttatcgccaaagcccgccaataca

SEQ ID NO: 693207 - DNA, 190 bp, Homo sapiens
gctgggattatatggacccgccacacacctgggcgatttttgtagttttagtagaggcaggtttcaccatgttggccaggctggtcttgaactcctgacctcaggtgagccacctgccttgtgctcccaaagtgctgagccactgctcccagctgatagtagctctttagcagcagacttgcatttcact

SEQ ID NO: 693208 - DNA, 1044 bp, Homo sapiens
gagtgggagcgggatgtgcgccttgtgcttgcaggatgtaatcgcggctgttcgcctggtgtggtgagtgagaggacggagagtgcctagtggtgagacatagggggaaggattgcagtgtgggcatcgggaagaggctaagttgacattatgaaataggaagtctgatgcgggggtacagtgtattcctgggatccggcggacgtgacctgtccgtgactagtgcatcgtgtgaaactagtttacgctgttgagaggtttaataatccgaactgtggagtagaggagctcaatgaacatcaggtccaagaaagaatttctctgtaagaagtgcctattacatgtcatctctagcttccagttttaccaagcgtgaaaaccaacggtgaagaactcaaaaggtttgcacagggagattttaatcgatctgtggtggaaaggtatacgaggaaggaaaagggttatggcaatttcattgattggaaggtgaacttggaacattgtttagcggtacatgccaagcttgataatctaatacgcatggactcattctgggacgcatgaactcctacaaaaggtgccaggaacgagtggcttctgcccaaggtggggacccaacgagaggattcttactgggaagtccctcagatgtgttgtaccactccgaaatttgtggcccgaatttgagcggttggttaatttcccctttgggggtgttgcggacgacacacggtcctttttaagcgccccttttgggattgcacttcgccaaagaaatttgggggcagctcgggaaaacgtcctcatcttttctcagggaccaccggttccaagagcctctttgggggagaaacctgtcccacattcggaagcggggaccaaacgggcgcgtcacaggaattcaatgtgtgtcacacctctgcgagaagggcgcgattcataacattttgatcacacttctttggttatggcacaccacttcgtggagcgtgcacaccagtaaaaataactatcccacacggggtccataagtgtcggcggcag

SEQ ID NO: 693209 - DNA, 1058 bp, Homo sapiens
  misc_feature (32)..(32): n is a, c, g, or t
agacgtacttgtagcagcaatccggtctgcgngcgcggggccggtgttgagtagagtgcacatatgtagtacctagcatgtgctccatatcgaaatatactgtggatcaatggacatcatgtgcagttgcaatactcgagacatttaaacaatcagctgcagtatcgtccactcgcatgcgatcctagggcatagatcctgtagtggacctactggacgagttcatgtgttgtcggcatcgtagtcaaagctagcccgagtctcgaaagcagatctttgcgggacttctcgaaattgagctcgttctccagtgctcttcgtgcagtgaacatgccttggtggctctggggctttcacatgaacaaggaagaccaacccgtggacttggggttgttctggttaggttgaccccctagtcccgggggattgtgccccctgttggggacacgttgtttgaacgagggacactgacacaccccatatgccaacgtttacaagtcaagcatcccctcctagccctgtgccaagcatgaagactcaatcattcctgtgaactcttcagagctattcaagcaattcaacacttttggcatttgcttcccgtacgccctcttgtgcacattgaacacgttcatgcccttgaaggcacctgcccttaacatggccaagttgtgtacagttggctcttaacaccagtcaagacgttggtgctgtgtgaacccggacattgtttcaccctgttgctgggacttggctcgcctctttcccaggacacccctttccttacaactgcagtcccttatccaagtgctcctttccgttgaaccactgtcacacttgcaggcgcttctcctcctaccgattggggcagccactgttcggcactggtagtggcgaaccctgttcccccgacatttggcaccttgctccattgagccaaacttggctattgccgaaacccaggtaagcaatggccacggaacccccttgtaatttacttccattcatcacagggacacagattggcccacacacatctagaagacttcaagtattca

SEQ ID NO: 693210 - DNA, 353 bp, Homo sapiens
caccactgcatatttattaaaatagctaaaataaaaaagacttaataaaatagactgacaatgtcaagtgtttctcaagtggcagaaaaactggaaatttcatacaccacttgtagatgtaaaattgtacaaccactttgaaaagcatgcatctaacatgtgatctaaccattctacttgtaggtatctggtcaagagaaaaggaaatatgtatgtctatacggacttgaatacaatgttcatagcagcattatttgtaaaggccaaaacctaaaaacaaccaaaatatccatcaacagatgagagcataatcatactctagtaaactaatccaatataataatatttcacaa

SEQ ID NO: 693211 - DNA, 980 bp, Homo sapiens
  misc_feature (35)..(35): n is a, c, g, or t
  misc_feature (48)..(48): n is a, c, g, or t
agttcttcaggcgcgacgtggttcacacacaaganggggcatctctcncaccacactataactgcggtagcccgtggtgaatacgttccccatgatgaggggtgcccgaggtctacagcgcctatatcactgtggcgagaatcatccgccgcctttgcttgtttcgaggcctctaatgaggagctcttttataactttttaggggcttgtacccacttttgcgagcaatgagtcagccatggtgcgcccaacctgcccccacattattagggagtacggtccaaactggctgacaccataaaacagtgttgcttgagggctcctcttcatgaagggggctccccaccagggctccccccaacatggggggctgccccccccccgcccgtcttcgttggaagtacaacacatacgttcaatgtcggggtgggtagaaatattgacagccccctgcacgaattaatttcttggtgagacgtcatagaaaatactgtctcgggccgcaccagactataacactgcatgtttctaccaagatgttgggcccacaacacacattccactcctcctcgcgctatcatttggttacaagcgcggtgcgtctcttcgggtgagaagatagtttcgtgaatatagtttgcgataggacagactcgagaataaaagatggggtagcaggttgccctgcctcatcatacaggagggaggacatcatcaattggaagcatcgatatacagtcgggggccccacacacgttgttgaaagaaggagttatgattcacctaggggcccgcctgccatagattatcgctcactcatagtgcagcactggagaaatacattgtgcggcagtttactggtcaccaccattgttgtggatctttgttcccaacatggccgcggccaaacaacaatacagtctgccacgctctgttgcccgccccccaaatggccccaaacttccattttcgcccacatc

SEQ ID NO: 693212 - DNA, 366 bp, Homo sapiens
gggtaacccatgaggaaggtgcttccgggtgtgactggtgggctaggcgtccctccggactgtcaggaccgcatctatgggcactttaccaaagcgggtgaacaatggtggaacgttggtccccggaagagtggtactacgagagaagtgagaaagaatatcgtatctattccagtgaaggtcagagctgatagaggtggtttctgatagctaggactctctgtgtgatagaatagcgagcagcgttcgtgtctccttaagtgggtgccccagatgggtgagcacactgaagtcttgaaagggtcatgcagaagtttcctggcatcgactatcccagtacctgagccccaaattttgatagatggc

SEQ ID NO: 693213 - DNA, 324 bp, Homo sapiens
tctagaggatgctctctctccacactggacggaaaccgtacgagttgtgctatcctgtcgagagaagcgttcagtgaatcagagatagcgcgtgtctgtacacaggcgagttcacgagggtgagaagcgctatggatgtgatcagtgaggaaaagccttcagtcagaaaggaagcttaattgttcacatcagagtccacacaggcctgaagccctatgcctgtacccagtgtggagagagtttccacaccagggggaattgtattctgcatggcaaaatccacacaggagagacaccctatctgtgcggccagtgtggagagag

SEQ ID NO: 693214 - DNA, 264 bp, Homo sapiens
cccccctaatgatagaattgagctggtaccgagtgaacttgacagtggtactggcaggcatttatagcagtgaccgggcgccattaaacgagtatatggaggtcagcactggtgctcacgtgtcgacggaacttgtacagggaggcatgcaccgcacgtggtgaatacacgtcgaccaggctccatctttgcgtcattgggtggtgcaccacggagctcacgtgttcacggagctggtacagggcaggcatgcacggcagcggc

SEQ ID NO: 693215 - DNA, 388 bp, Homo sapiens
cttactctgcatagactcatgagcactggccacgaggctataaactgtgatttatgcctctctgccatttattagcactatagccattaagcatagcattactctggactttattggcctgtttatatcaaattggactaacaaaaattgacataatacattcataacagaattgataggagatttaaatgaattaatgaatgtaagatactttacaaagcatgtgaagcactagaaacaatgaggtggcttcaattattgctcattctgagagctaaatttaaagggtcaggcgttagaaacgtgctccttcatatctaggagatggggaaattctgaactaaggtcttataagaacgatatgagcgtggtcattgtagatacttgg

SEQ ID NO: 693216 - DNA, 221 bp, Homo sapiens
aagtgaggaggaagtcactggccagtttgaggtgcttccattggtctgggtaactagccatttacttcctgattgtgcctagtatatcccagacagtttagttatctatgcagaagaatttatatatgaaattttacatttctttagcaacaaacttgattccttacttatcagatatcatagacaatacatccatagctaaaagtactgacgtcatactg

SEQ ID NO: 693217 - DNA, 218 bp, Homo sapiens
  misc_feature (132)..(132): n is a, c, g, or t
cgtatcaatgatccagtgatggtcagctataatccagaggttgggagcgagatcaagacagcaaacgacatggagaaacccgtctcttctaaaaaaacagaattagctgggtgtgtgtgcacatggctgtantccagctactcgggaggctaaggtgggagaatcgcttgaggccggggggtcagccagaggtttgcgggtggagccaatgatccatg

SEQ ID NO: 693218 - DNA, 899 bp, Homo sapiens
ggtgacattaggggcacagaggggccaacgaatggtgtcgaaaaaaccagtggtgcacgaacacgtgggcggcaccccatgttcggcaggtgcacgagggtataagggaacaccgtgcgcaccctgtcaggggcctcctccacacgaatcctgggaagacaccccaaggtgaacgagcaatggcgccttgtgatacacgtggcaacatgaggaagcgctcgcgtcaaatgcggtggtaggccccgctcgtggcaagaagaagatgtgcggagtccacacccatgggtagctaatactataaacagatgtcgataagtcacaccccttcacaacagcgctttcaagagaaaacccctgctttcccaaaaacttccggataaaattgttgtcccccaaccactatctcctttccaataagggtataccccattatgatattattaatacgaaaaatccccacctttggtttccccaggagtgacatatatccctatgtgtcaatcccacccaatccaacaagtctactgtcgcttcatccaagagctttcataccccgacccgggtgaagaaaggactgtggagacacacccccgtgatgttcaaaaggagcatacttgtttaccaaggcattatacatagtgagggaccctccttagaacggtctgtcacaacaagagacactgcgccctgtattctctctgcggatagaagaatgtggatctacttgtcgagaccatcattattataggtagtgctggatgttcctctccgcacacagttgtggaggtacttggagacaaataccgggttggtcggccacccactcacaggccaaataaaaaaggtgtgttgtgtttcccccaaaaaaaaacctcgccaaggacaaccaaacaaaaaca

SEQ ID NO: 693219 - DNA, 666 bp, Homo sapiens
cgagcaagctttctagcaccattctgttattgtgctgctgctgtggcccatgtatggtaatgtgaacattggtcatatgcttgtttccatagtgagcatcctgtgtcattgactatgtagcttgtgcattctcaccgaataaagaaactgccctgtgctggaaaacctgagctgttcttgaagcaaatcgcagattggagtatactgaggtcattcacttggatctcatcacacaggagtccaatgcgagcgtcgatatcgaaattactgcccctggccgatggaaagaacaagaagaagagagaagaagaaagagaaagagaggagagagagagaagggaagaagaagagagagaagaacgagagaagaaggagagagagaaaaaagagagaaaagagagagagaagagaaaaggagaacaaaagagaggggaaagacagaagaggcagaaccggggaggagagaagagaggagaaggaaaggcgacagtaggtaggagaggagagagagaagagagaggaagagagagggagctggagaagcgagggagaagagcggcgagaggaagacgagagccgaggggagggcgcggagagggacgcggaagagagaggagaagaaaagagagggcagagacgagagcagaggaagagaggaagagagaa

SEQ ID NO: 693220 - DNA, 246 bp, Homo sapiens
  misc_feature (5)..(5): n is a, c, g, or t
  misc_feature (11)..(11): n is a, c, g, or t
  misc_feature (18)..(18): n is a, c, g, or t
  misc_feature (22)..(22): n is a, c, g, or t
  misc_feature (27)..(27): n is a, c, g, or t
  misc_feature (45)..(46): n is a, c, g, or t
  misc_feature (53)..(53): n is a, c, g, or t
  misc_feature (65)..(65): n is a, c, g, or t
  misc_feature (76)..(76): n is a, c, g, or t
  misc_feature (82)..(82): n is a, c, g, or t
  misc_feature (102)..(102): n is a, c, g, or t
  misc_feature (107)..(107): n is a, c, g, or t
  misc_feature (123)..(123): n is a, c, g, or t
  misc_feature (126)..(126): n is a, c, g, or t
  misc_feature (134)..(135): n is a, c, g, or t
  misc_feature (141)..(141): n is a, c, g, or t
  misc_feature (155)..(155): n is a, c, g, or t
  misc_feature (158)..(158): n is a, c, g, or t
  misc_feature (201)..(201): n is a, c, g, or t
  misc_feature (205)..(205): n is a, c, g, or t
  misc_feature (217)..(217): n is a, c, g, or t
  misc_feature (244)..(245): n is a, c, g, or t
gaagntaactntaagaangggntgggnagatggatttattttttnnaactgtnaatatgtaaaanaaaacattatnttcccnggagtttttaatacagcganagaanagagatttgtgtgttnatnttaagagnnagagcnatataagcatcccnggnaagcaagtttgaaccagctgctggtgtaatgtacagttatatntgtntataaccggcgntgtttccgggaatttaatacattctcnnc

SEQ ID NO: 693221 - DNA, 123 bp, Homo sapiens
tatgaaacctaccatttttaatgctctgctctatgcataacctccatgaaaccttttctgtaccccctttgtcagagaggcatgcctctttcccctctcctggtttccacatggacatacttt

SEQ ID NO: 693222 - DNA, 1619 bp, Homo sapiens
gcccttgataagagagaggaaaaaaacaacaaaagagaaaacgagacataaaccaaaacagagaaacgaaaaaaaaaaaaaaaacaagagcaaaagaaacaaatagccaaaaaaaaaactagaacgcgcaaccgcaaagacagaggaacagatgaagggagaagaaaggcacgagcgcagagaagacaaagaagagacgcggccgcgcacagacacagacagccaacgcgggagcacaacaaaccaacaagcaagaagaacaaaacaaaagcaacgacgaaagcagagaaagagacagaggcgagcagaagaaagagacgaaaagacaaggaacgaaagaaggagagagaagaaaggagggaagagcaagaagagagaggaaagagagagggcaccagcagagagagaggaggagagaagggagagagaaaagagaggagaaaggcaagcagaggagagagaaggagcaaaggaagaaaagacacaagaagaagaaagaaaaaaaaggcgaaagaagcaggcgggagaagaaagacgaagaggaagcaccagcgacaagaaaaggagggaggcacacagacgaggagagcgcaggagacgacaacgggaacagaacaacgggaaacggcggcagaaggaaacgcgagaaaaggtgaagggacaccaaaaggagcgagggcgcagacggagaacagaagcggcaggaggcaaccgaaggagagacagcgacgagagagagaaaggagagcggggaacagggagagaaagaacggagaagagcaagagaacaaagaggcggacacagacgagagagaagcaccggacagcgaatggggagcgacgagcaacggcaagaaagagaagccaacgcacgcgggccgagagggagccagcgacaaaggacgagaaggaacgagacgaaagagaagagagagacaagaaaaaaaagagaaagaacaacgcagaacagcacaacgcaaacacaccggagaaggaacaaggaaaacgaagagacgaagagacacacgaagacaggagagaaaggacgcgagacaggcacaagcgagagaagagagcagtacggaaagagcgagcgagacgcagaaggcgaggaggaccagaagacaagacagagggaagagacggaaacgcaagagcgagacgcagacgcgacagaagacgacagaagacaagcaaagagaaaaaacggaaggaagagcgaggcagagagcgcgcacagggcgagcggcacgagagcacgaaggacggcagaaaggcaagacacgaagacgggccagacgcgcagaagagacagaagcaggaagagacaggccaacacgaagcagaagagagagaggaagagagccaagagagaaaaagcaacgaaggaaagacaagaacaacaaaagagagagacacagagagaacaacaaccagacggaagagtgaacggaagacaacgagagaaggaatggaagacagcgaaagcacaccgaagaacaagccagagcaggagggaacagacgacgagacagagaagcgagaacgagcggacgaacaacacggacgagaacagacagaacgcgcgacacagaaagagcagacacacggacagcgca

SEQ ID NO: 693223 - DNA, 235 bp, Homo sapiens
atcgaagtacaggggggacgccgagccacaaggacaatcatcttgacgagctggacatcactcgtgggtcgtggttccatgtaaatgagtgcatctccagcgtcaatcatctatttctgaatagtcttctttacactcttgaaccttctgtcctttcaatccatccaccaagatgataccctcataaaatcctttgagatatatctgctcctctgcttctgcaagtatttcccgc

SEQ ID NO: 693224 - DNA, 189 bp, Homo sapiens
aatagaggtggcttttcacctgttagccaggctggtctcgaactcctgacctcaggtgatccacccgccttggcctcccaaagtgctgggattacaggcgtgagccaccgtgctaaaccgccttctattaattctatctgcggccacaagtccttatataatccagacattcccttctgtcgtcttctc

SEQ ID NO: 693225 - DNA, 126 bp, Homo sapiens
  misc_feature (1)..(1): n is a, c, g, or t
ntataatccatatcgagaggctgaggaggagaatacttgaaccacagtgcagaggttgcagtaagctgagatcaggtcactgatctccagcctaggtgacaaagcgaaactcagtctcaaaaaaaa

SEQ ID NO: 693226 - DNA, 998 bp, Homo sapiens
  misc_feature (295)..(295): n is a, c, g, or t
gctccagacgtcgcgtttctctgccggtcgcgatggaagaagagatcgccgcgactggtcattgacaatggctccgagcatgtgcagaagcgtggttttgctggggacgactgctccctcagagcctgtgttgtccttccatcgtccgggcgccccagagactcgaggtcgtcatgtgtgggcatgggccagaaggactccttacgtgggtcgacgaggccacggagcaaggcgtggcacatcctgatcccttgaaagtagccctccattgaagcagtggcactcgatctagcancatggggatcgaacatgtggcatgaacgaatcctgtgcacccaacatctcgtttctaacatacggaagcgttgctctgtaggcctccggcagcggagcaacctcggagttgcattgcattgtacctggagggcctccactcgttgaacctcgcgaagtgtcctagagcacgagcagcacagaatgaccttcgagcattctgatcgttttattgacgaacgcattatccagagcgaacacaccatgggtccacatagttaccgagttgagcgccaattcgctatgcgcgcatgtttgcattgggtaccccgttccttaaccggcccgttcgttggggatgcttggcaaacccgaatcgtttgtgacacacttatttgcttcgaacttggggcaccagtacggtagcgtacgcacacggaggcggattacaaagcccgcgaatcgaaacaggtggcattaggccccccaagttccattatccggcaaaggaaggtggccgtttaaaccgcggcccgccaccgtatactccatctaggagccaggactaggacacctaaggttcccccttttgccgcggagttcctgtggggggagagatgccattatggtgggccatttcgggcgggcactccagggaggcaggcacctcccgatcttggaagtctcccccgaggaaacgcgattaaagtcgccggtttcccaag

SEQ ID NO: 693227 - DNA, 619 bp, Homo sapiens
tctgcagactctagcgccagcgtaactggggagatgaaatacatcaggagccagtataagcttatcaagggtggccccagttcttgagctgggaagagtctttgaggtcgaggcaagaggaggatgaaaacccagaactggaagctgagaccttcattgctttccattagtctgtccccacctctctccattcaataggtgatggtcttctagcaacttgttagccacacagaattcatctgcagtaggccacattctgctgtacaatgctacagacatctcaaagaccacaccatgagaaccactgtggtagacatatggcatgttaaaatgctaactaggctgggcacggtggttcacgcctgtaatcccagcactttgggaggccgaggcgggtggatcaccaggtcaggagttcaagaccagcctgaccaacatggtgaaaacccatctctactaaaaatacaaaaattagccaggtgtggtggcgcacgcctgtaatcccagctactcaggagactgaggcagaaaaatcgcttgaacccaggaggtggaggtcgcagtgagcccagatcatgccactgcccccagcctggcgacagacgagactctgctcaac

SEQ ID NO: 693228 - DNA, 1300 bp, Homo sapiens
  misc_feature (19)..(19): n is a, c, g, or t
  misc_feature (56)..(57): n is a, c, g, or t
  misc_feature (241)..(241): n is a, c, g, or t
  misc_feature (511)..(511): n is a, c, g, or t
  misc_feature (627)..(627): n is a, c, g, or t
  misc_feature (677)..(677): n is a, c, g, or t
  misc_feature (716)..(716): n is a, c, g, or t
  misc_feature (806)..(806): n is a, c, g, or t
  misc_feature (875)..(875): n is a, c, g, or t
  misc_feature (949)..(949): n is a, c, g, or t
  misc_feature (1169)..(1169): n is a, c, g, or t
  misc_feature (1196)..(1196): n is a, c, g, or t
  misc_feature (1212)..(1212): n is a, c, g, or t
  misc_feature (1279)..(1279): n is a, c, g, or t
aaaaaaaagagaaaaaaanaaaaaaaaaaagaaaaactgaaaaaggacacgggaanncctgctagggatactggcaggcaccagttatgatgataatgccatactgagaataccacccatcggccttacgcatgtgatctggtcatccagtcactgactcggagcttgtcgccctcatgcctcatcacctctgtctataccattttctaacatcatccatcgtcctcgtcaaacgtctccnacgtcgcacaatactgtctacgcgagcagctacaatgcagtactcgtctcctctaaccacacgcacgagcaagccatatatgcctcgcctccttgtaaacgctacgtacttgtcgaacacaacatcgccaacacactcactcctactcactcaaaccacacaataagcatctcttcaagaaagtcgcgacgaacacacactctaccaaatcacacatggcatcccaataatagacgcggccagcgacgtcgaataacgtatctttcggcntaaacactacgtctagcacacgctcaccccgtagtacataacacttacacagccgtccaccatacaatacatcgctgccataatatatcaactacacgactactctccacttcttnaccgatcctcctcacagcacatgccaccttcaaatctctttcgtacgatnttactcttacgcctacgtacactaccacgccgcacgtcnctacttcctcgcacgcgcctgcccgacatatgataactgccgaacaccgatccacacctgtattcagcgcaccgagtcctacgtgtacancgtcacccttcacaataataagtagatcacgctcaccaacaacacaacacccacacagtcctcataacncacctacgagtccgcctctaccatacatcatcgaccaacacacgatctcattaatacaatcacaccaatctatncgctacgaccaacacacaacacagtacggctcttcaccgccatctacgaatcgagtcccgccactacaagctcgcacctctacaccagtaccactatactcacttattctacacgcctatcactatccgcacgcgcctcaaacgataaccacatctgcacacactgagactagaaatactctagtcagacactattccacacctctcgccgccgctcgcntcacgagacaccgcgaacggtatcaanttaagtcatacgcacnctctacgacatccctcgcctactcctcaccgaagtagctaacactgactagcgcagacaccagcacnctcacctcgcgacgttccccg

SEQ ID NO: 693229 - DNA, 319 bp, Homo sapiens
ccccccccccaaagttaccctgtgtgtgtgtggggaggtgtaataacttttcagtgttttgagttgattccccaaaggcaaattttggaatgtttttgcgctttgtgcccttggaggggaaaaccccactacatatgcccttttttggttgtgtgtgctataaaaaggttggaaggggtggttggaaggggaaaaaaacttaaatggcccttttttactcgactgctgggatgtatttgcttttgggagccaactgagttttttttgccatttgttttattgtttgggtttactggcgccaataaactttttcccctta

SEQ ID NO: 693230 - DNA, 211 bp, Homo sapiens
  misc_feature (5)..(5): n is a, c, g, or t
gttgntcactgccccatagagaccaagttctgcggttttgggcactggaggaggcttaggagcaccaggagacccagtgctcagagtgcaggggtggtgaggacccccacagcttctacttccctggacagttcgccttctccaagtgcctcgcccgaagttaagccagcactgagatgcgtggtgctccaggaccgctgcgggtggtaac

SEQ ID NO: 693231 - DNA, 207 bp, Homo sapiens
aagtggccagcagatccacgtgggtgtctttggtgttagccatggtaatagtctagcttaactggcgtggctagcccagaattggacttaacgtgcccccagaggtgaggcagtcagactgcttccaggttcttggctatagtaaacagttggtgtgcaaacatacagcactcattttacttcaagaatcagaaaattacccgagac

SEQ ID NO: 693232 - DNA, 1298 bp, Homo sapiens
gtgcagctggaagatggcggcgtccgtggtctggtcgggccagctaccgccggggccacaagtgctattgcgcgcccgccggatcgccggacccgtgctgcggtacgccagccttgcggagtacggcaacgcttcgcctcaggcagctccagcttctgtgccagggagacgcatggttaggcctgactgtgacaacagggctgcgatgtggtcctccgacgcagatcctctcaggccacattgcacgagtgaggacgtgttggatttgactgtccgggacgcgcgttttccgaagaatcgtgcacaaaggcaagtaatctagacggagcgcgagcctgacctactagacgcggcaggcagtactggggcgttagcaatacgcgggccccgtgcacgaactcgggggccctcgggcacggtcgcccgcatgaggagaaaacggacgcgttggccgaacggccattgcctgcgagcgccccactccttcactagccccctacacgggaaaagcctctgcgcgcggagcgcctcctagcgagcctcttctaccgtaactagtccacaaggcggaagggcctggacacccatggggggcaactgcctgggcgcgggacacacacgcctggtgtgcgcaagaacatttccctgggagagtggacgccaccgtctggacgggcgcgaagccaaaaccgttgggtccaacaccttcgtcgccgcacacggtacgcatacccaaccgacaagcaaaccttgtcgcagcgccaacaagggcgcgacaacacagcgggctcgcaacacagcgcccggcacccgtgccccgcatcggacgccggcggcaaacgcaaactgaccgcacccgcggcacagccacgccatgccacgtgggcgacactcactatagcgcgcccccaacaaggcgccgtggcctcggcgccacaaccccacaccacaccccgaccgcccccacagctgccacgcagggcccacgacaccatgacagcggcacggattcagccacacacgggaggcagacacaacaacgcagcgccaccgcgccacacggacacacacccaacaacggaggccccatgccccgacacaacagacagcggcgcgacgacccaacgaccacactgccggacacacatgcgcgaccacgtggacaaaaccaccctgggaccaccgcgcccggcgaccgtcacactacgtccacccagacaagacgacaccccccaaccaccacccgaacccccaccaccgaccccaacaaccccccaccaccccacaccaaccacgcg

SEQ ID NO: 693233 - DNA, 839 bp, Homo sapiens
ggggaccccaggaccagctgtgtcagggagtttccatgtgaccacccatctggcttgctccctcaagcccatggagtgcagcatgtagctattccctttagcaccgagtcgtgtcccacctccagggtcctgacacaggtcagagatgtcccctgctcatgcagagcaggaagcctctagtctgggcctggacgtgtccctgtctccagctcctgccaggggacagggtttctcctctggactagctcttggcccacacgcagagtctgttagccagttcagcaggacggaggacgaacggagccgcctcagtcagacgtgggtgctaggtttctgcgtcatgacgcgttgtctcactttggcgttccagagcgcgccatgacaactgcgctgcctgggcgctgtaagctgttccagggtggccgcgtggcagtggcgggagccccacatgcccgttcagcaccgtccagccaagttaatccacaggctctggcctctgacgtcccgatcatctgcatgcttgaccacccagtctcaggggatccatgactagtcgtcgagtcatctctcacgactcacccagcgaggccgaacccttggtcacaaggtcatgttctgcagtgcccctagatgtgtatctggactatgcatgcaccagtccgtgtggtcgccaatgtctcaccccgtgggcttcccgcttacagtgccggaactgggggttttcgggcccactgagtcggatctgcgctcggagtactccggggatgggctgctggaggaccctttgcttccctacccttactcgtcccatccgctgggctgggccttttcacttccga

SEQ ID NO: 693234 - DNA, 802 bp, Homo sapiens
  misc_feature (396)..(396): n is a, c, g, or t
taaagcatttgggttattttaagttaaagaaaaacagctttctccaggggcgacaaagtgaactgaaggtcaaaaggaagctgggtgcgggctttcctgcaagctctgtgccccaaaaccgggaagtgaggaaagggcgctccggagctcgtggggaaggtgggtgcacacaggggttcccgtggcgcggggggaaaagagccgccagcccacacacggccacgggatggggtgtgaggtgggtccaagcgacggtgccagtgtgctagttccacgtgacagtgattgacattaacatttctgggggggcatcaaattaaggaagtgacacagggagccaagagaggtggctatccggagggatcctcgaatccacaactcaggaaactagccctntatctgggtgcacaccataaatctccatattccctgggggagcgaaactctcgacaggagagggtgaacactcggcccccggggggcttcgactgctcccgcacggcggcccgtgcccttcaggatgaagctgtgcatgaggcgggccaacgggggcgggggggggggttgcccatggtgccctcgagggcgaaatggccttctggtgtcccgaacgatgatccccctgccactccccttcgtggcgtctgacagcccgctccagttgtcctccttcccaccttcttgcccccaggttgtgtgagttcgccagtggcgtggcaggcccagcaggctcacatgtgcatcgcactgtgcaccttcccgtgggcgctccaggcgagaactttctcccaactctgcagcc

SEQ ID NO: 693235 - DNA, 451 bp, Homo sapiens
aaccccattgtggtaataaattcaaccccacagatgaagtaatcattggttgaagtaatcattgaagtaatcattggttgaacagtactttcttgattatccggccctaaacaatgtaatagtactttgatacacttctgaggagtgcctacgccgacaagtcctgtaacagcctttcatttaggccaattttttggccactggtttaaagcaatgatagagacatctgctccagtgtctaccaacccttcaaactgttttccttgaataatggccttacacacaggtctgctctctgagaactgacttgcccaatatgcagcctttcctgccggatcagtgcttccaaaccctcctttctatttatctcactgtttccaaccttaatataaggcaggagtaacaactgagcaatcctgtctcctggactggcactgcaaggaattgagga

SEQ ID NO: 693236 - DNA, 343 bp, Homo sapiens
ggggcagtgagcggggcagggatgaggcccgaggtgggggcggtggccaggacaacgggcctccccgggggtccccggacgctggctcgggactgtcttcaaccctgccctgcaccttgggcacgggagagcgccacccgcccgcccccgccctcgctccgggtgcgtgaccggcccgccaccttgtacagaaccagcactcccagggcccgagcgcgtgccttccccgtgcggcccgtgcgcagccgcgctctgcccctccgtccccagggtgcaggcgcgcaccgcccaacccccacctcccggtgtatgcagtggtgatgcctaaaggaatgtcacgcaa

SEQ ID NO: 693237 - DNA, 156 bp, Homo sapiens
gaatgcgctgatggcaaaggagggagaggtgtgcccccacaaagatacgtgcatccaactcaagagcgtccgcaaagggacaaaggggaaaagtgtggtccacatacgtgggacccacagaaagaggaaacgctactggagcgctgtccagagacc

SEQ ID NO: 693238 - DNA, 1278 bp, Homo sapiens
gggccgcttcagccgcctggagaaccgctacgaggcgctggccaagcaagtagcctccgagatgcgcttctgtgcatggacctctgtgctgctgccctgtgagcatggagaatgcttgcagtggctgtggatgttgctggtgcttgctgcttagtgctgcatgttgtggtgtgtggccatgtgccccatgtgacatgcctggagctctggccttgctgtgtgtgtgtgtgctgcttccttgtgtgactgcttgctgtcctcccatctgccctggtgtgccttgtcccttgcccagctgccaccatggcttggagtgctggatgttgggatggatgccttggagccatgtgccctgtcaaggttctgcagtgcatcgggtgttggcgttgtcgggactgggtggcttgctttctctacacatgcctctaccgctggccttcaaccttcacccctgcattcgtcgtgtgacccttgtggaccctccagtgcatgctgtggcctgtggcaccgtgagggttgggacccaccgatggcgcagagcgcggtgccgaatgcagccctggttcaggccctggagcgagggttttgcgggtagttgcacggaccaattcggcggggtgctgcctgttggctgccattagccccgtgcggcaggtcgtgggacgggcgcaggggtggggactggaccggcgggaccttgggccgtcccccacgctgctgcggtggcgccgcggcttcgggtgggcgtatttacaacaggttgtcgccattcatcgcccgagggccgggtcccccggaggttattgaggtggcacttgctgccggaccatcctacggcgagcccacatcagtcacggccctgtcgacggctaaggcaaggagcgggcctactggagagcatgagaactcaaatactggcttccagcgaaatatccatctatcacgacacacctctgaggacactcaattatgcagggtcggcaacagggagtcacatcctcagtggcacgtgcgacatatggggactcagagcccccaccacggacaacgagaggggagactgccgggacccacaaaagagcgggacgaaactcgacagagcgggtaagttacgaaaagacgagaaaagagcagaagcatacgaccgcacgacagggacgccaacagatcgcacacccgagaggagcccgaatgacgcgaaagcgcacacgatgacacagcaaattcctacgacacacagtagcatgcgacacaacatacagaagaaaaacgacgaat

SEQ ID NO: 693239 - DNA, 313 bp, Homo sapiens
cacacaaagcctgtttggtgagctcttcacacagacgcgcatgaaagggaagacatagggaaaactaggcctctgagggaggtactactgagacagccaggtgggaaggactccttggacaaactccaaccagcctgtacactgggaggaatgtgcactgggatggagccatagaagtttgtgtcgattgcagtggggaggagcctggtccctcctcttcctgtgaggaacctggaattcaatctgcgaggttgttctggagatgttctgtggagactgcattaaacacagcttcgcaccattgaataaactc

SEQ ID NO: 693240 - DNA, 718 bp, Homo sapiens
  misc_feature (16)..(16): n is a, c, g, or t
  misc_feature (20)..(20): n is a, c, g, or t
  misc_feature (40)..(40): n is a, c, g, or t
  misc_feature (73)..(73): n is a, c, g, or t
  misc_feature (76)..(76): n is a, c, g, or t
  misc_feature (90)..(91): n is a, c, g, or t
  misc_feature (96)..(96): n is a, c, g, or t
  misc_feature (121)..(121): n is a, c, g, or t
  misc_feature (129)..(129): n is a, c, g, or t
  misc_feature (133)..(133): n is a, c, g, or t
  misc_feature (139)..(139): n is a, c, g, or t
  misc_feature (155)..(155): n is a, c, g, or t
  misc_feature (161)..(161): n is a, c, g, or t
  misc_feature (172)..(172): n is a, c, g, or t
  misc_feature (177)..(177): n is a, c, g, or t
  misc_feature (190)..(190): n is a, c, g, or t
  misc_feature (192)..(192): n is a, c, g, or t
  misc_feature (209)..(209): n is a, c, g, or t
  misc_feature (226)..(226): n is a, c, g, or t
  misc_feature (228)..(228): n is a, c, g, or t
  misc_feature (232)..(232): n is a, c, g, or t
  misc_feature (259)..(259): n is a, c, g, or t
  misc_feature (272)..(272): n is a, c, g, or t
  misc_feature (275)..(275): n is a, c, g, or t
  misc_feature (290)..(290): n is a, c, g, or t
  misc_feature (293)..(293): n is a, c, g, or t
  misc_feature (299)..(299): n is a, c, g, or t
  misc_feature (323)..(323): n is a, c, g, or t
  misc_feature (328)..(328): n is a, c, g, or t
  misc_feature (342)..(342): n is a, c, g, or t
  misc_feature (359)..(359): n is a, c, g, or t
  misc_feature (366)..(366): n is a, c, g, or t
  misc_feature (376)..(376): n is a, c, g, or t
  misc_feature (384)..(384): n is a, c, g, or t
  misc_feature (388)..(388): n is a, c, g, or t
  misc_feature (406)..(406): n is a, c, g, or t
  misc_feature (420)..(420): n is a, c, g, or t
  misc_feature (428)..(428): n is a, c, g, or t
  misc_feature (430)..(430): n is a, c, g, or t
  misc_feature (446)..(446): n is a, c, g, or t
  misc_feature (482)..(482): n is a, c, g, or t
  misc_feature (493)..(493): n is a, c, g, or t
  misc_feature (543)..(543): n is a, c, g, or t
  misc_feature (569)..(569): n is a, c, g, or t
  misc_feature (619)..(619): n is a, c, g, or t
  misc_feature (628)..(628): n is a, c, g, or t
  misc_feature (642)..(642): n is a, c, g, or t
  misc_feature (690)..(690): n is a, c, g, or t
tccattcctacatatntttntttggttttgatgatggggnaccccgtcaaaaattcctgtgagggggactacnacncggctgtgaggggnnttgcnacatttacatacatgtggcttatcncatacgtnaacntttacncaaatagtacagcggngaaccnccaagttctcnttccncattcctttcccncnctgcgtttacctgcccnttcttgaaactgggtcncngggnagcccattgcatttcaacaggccttgngctgcttctcagnggnagttaactcaatggngcnaaagcncagggcagcgacaaggcattcacnctacncagacatgtgatcncttactgacagcggggnggggagngagatggggntcccgggngggnaagcgacaacatgcatcncaggggccatgtgngaggcggngngggccgctggtacgcngcgtcccttgccaagggatgcctcacagccatccgngaatgacaggnacgaaacatgagggccttcctcgggtcagttaagcatcatgctgggaggnctcccacgtgtcccggtacacaggtnctggcactcatccgaccacagcttgctgtttggtccccaaaatgggcccncacccaggngctgccaacacggnggctccgtctgagtcccttcgggtctccatcccatgggggtgcacgtntcagttttcctctaaccactgcttgagc

SEQ ID NO: 693241 - DNA, 297 bp, Homo sapiens
gcacgctctgagagcagacgagtctgatcgatagtctacagtgtctccttattggcataaagcccgaatgtagcgctagcggtggatgtggggttttccccaggacactgtcaggttttatcgttagatcgctgcccgggaggcacggggcagcccgaatgcctcgatcactcccagagatcgttgccgcgactgttgagattgtagataaggtcctggagattcctcctccccgcccccccattcccttcctcacttccctcttccacaaataaagccgcagctagaagatgaaaa

SEQ ID NO: 693242 - DNA, 488 bp, Homo sapiens
  misc_feature (292)..(292): n is a, c, g, or t
  misc_feature (295)..(295): n is a, c, g, or t
  misc_feature (297)..(297): n is a, c, g, or t
  misc_feature (304)..(304): n is a, c, g, or t
tgtggagaggggctcaccgtgttagccaagatggtcttgatctaggtcaaggagactttcatatcataagtctattgtgaaacaattcctatcttattcttagaaatccatagatacgaaatttctctgtgccttttattgactatgatagagaactcttgtgtcttccatggtttacaacatataagaactttgacgtttcgttcgtgttttctcatcttggtagagaagaaggttataagtctatcaaggccaggattcattgttctttcttggtcaacttttggaaatntangntgaagantctcaactaactgtattaaatctgcagaaagaattaatccttaagacctcatcaacaatcttttgtataaactagacttctctcttttagttaattctagccttagacatgaggatcttcttgtatccgctgtcaagccattagtgcatagctgaggttacacattcaaagaagatgggcttca

SEQ ID NO: 693243 - DNA, 176 bp, Homo sapiens
tcatcgagctcggtaccgtttcttcgttctgcggtactccaggcctcgttcatcgcctgttccgtccaagccctcccgatgaacacgacgcattccgttgcctccccatgaacacgacgcattccgttgcctccccatgaacacgacgatgacgctgtttctccgtttcgacccag

SEQ ID NO: 693244 - DNA, 147 bp, Homo sapiens
agctgttcaatggaatggcgcatgcaaacagcgcaggcagtggcagggtgtggtgggtgatggtggcctcactcgagagtggaccaaggcccagctccttgcccaaaaccaaatgcccttgggccccgaagtttttagcataacatc

SEQ ID NO: 693245 - DNA, 455 bp, Homo sapiens
  misc_feature (193)..(194): n is a, c, g, or t
ggcccttggggccagatttggcccagtgtaagttttcccccaccccccccggggcctggggtgggcaaaccgttttccatggggggaactatgggcccagggcccccgagttttaattttttcttccgtggaggaaacacccaagggtgggttggggggggggccccattttgtggggttccttttttcccannattacaggaagccccccccgttcttggggtgggggtttttccttttcccgggctggaagggattaaccccccggccgggttttccccccctccccccgttgtttggcagggggcccccaggattccccgccccccccgtgggtggcccaaccccccccctgtggcccctttggcccctttggccctttttttttccggggccccctggggccgggggtgttcccttaactgttccctttaaaatgggcccgttttggggga

SEQ ID NO: 693246 - DNA, 139 bp, Homo sapiens
aatgtcccttactcacaccacagcagtcctagggctctactaaactaccctggcaccctgacagagctataccctgacaagggggggcactaggtaccttaggcgccccaggttacacaagtgagtatcaagaggatca

SEQ ID NO: 693247 - DNA, 1423 bp, Homo sapiens
  misc_feature (282)..(282): n is a, c, g, or t
agcggattgagatccttttccggaggggtcagctcctgacgggttcctgagccagtcttaatctgggcaaaggagatgaggaggccgtacgtcctgatgtacttggtgtactgggtggcatgctgttacccagaatgttgggcccaacagcggagcaatgagttgtgcgtctgtgcaaaccgtgttcttgtaatgagcagcatgaccatcgttttgcaatgaatcctgttaacgtgactgatgcggtaccacgagcttccatggcgtcacttcagtctcccntctttgcggcagcgacgcgcggacgtccctcggcaccccatggactcgtcactggggacgcgaagacgttggacgagaggcgacagcaagggaagactcctagaagcgtttggacacgaagggaacgacgacaacgagaatcattgatgcgttgttgggacttattaaaaagaattcattgaaaagcagcacacgcttagaagtcaacacagtatgggaatcaagacatgacgcgtctagaagctccaacaggactcgtaaacgtatgttgggaacctgggacaacgagacacaaggacgactcggaaaagttttcccagacccaggaaaatctacctcatgggttatcaacggattgcaacggaaatttggacacatgcactcctggcgaagcatcgtttaatcttatggccatcccgagtggaacatgaattttccacttgtctgtaatttctgcacttcacggtaacacaaggcggggggaatttccttaacaggaaacggtcaaaacgcaacggtaaaaccatgttgaggatccacttatatatagaagcctgtggtcgacttctttgggggaattattggcggaacttgctttattgaatggtggccagttacccacgtaaggaacaggcacggcaatttgccccccttttttagattttcggggtagcctatgggttaaccccccggaatttggcataggcgttatttaatggcaagaccatgtgaacaattccctaacggtttttttcaaaacacaaaaccaggttgagagcgcgaaacaaaatctgaccccaaagaaaaacccctgctgtgaagggggcaagtgcatgggaataacaagggctatattaggccgaatgtaaattcttttctaaatttagagggtttggaatacccgcattaagttttggttcacaaccttgcggagagaaaacagtgaggtgccgggaaaaggcgtggggggcccctagaattcttttggacgcttatattatctttgcaataaacgtataaataggaaaaagaaacactttttgtaagcgtggtgggcagagggtcaaattataaacgttaaggttgtctccatcaggtataggagaggaaaacttatagagtttgtagagaacacatattc

SEQ ID NO: 693248 - DNA, 447 bp, Homo sapiens
tgctttctctcaaattattgctagaagtgaatcaattctaaaatcttagctatttttatcttaacagaggtcccttctcaatttctacagaaatatctttgattttttaaaaaatatcacaaaatggtaaggttgagttttataaaataacatctgctttgtcctaatttttagtttttttttctcttctcacatcttaaactggcaatctattaaatgagcaatagctttggggcttgcctgatttatttacatttataatgatatgaaactattgatttgaaaatttttcttgccatatgtgtaagaattatgctttgacattttggattggacactgtggtaatggtgccagccttttagtgtagattgctggtaattggagtggtggtttggtcacctaaagtcccggtggtgctggtgctggccagcacgggcttggtcccc

SEQ ID NO: 693249 - DNA, 106 bp, Homo sapiens
ctccttctgcacgctccttctggccctccttctggacacgctccttctggcctttgcaccttttgcgtggccagaaggagcgtgtccagaaggcgggccagaagga

SEQ ID NO: 693250 - DNA, 1034 bp, Homo sapiens
gactggcgtcatattgcccgtgccatctacacttactttgtccatcctccggactcgcgatcttccttccggagccatgtcagaagggatgtggatctctggatttgatatatattgcttgatcgaggagttcaaccaaggaccccagtagtttcataccaagtgacaggatcatgagttcgcacctgttcatgatcggatgtagctggaccagtcctaccatcccccacgccctacttcgaatctgtcctcccttcgggcgccttcccctggatgtgagtcgtgcccccgacccgagcagagtttccgagcccccgagcatctcgtggtccgtcaagctgtgttgggaggttctccgtgcctgcgcgttccgtgccgttgcgtgagtgcgacacgtaaccctatgtcccttactccagtagtccgcgtcctttctctacccttcgagtttgagtccctgcactgcgtatcctgtggctcgcgccagacttaccccccgtgggtgtggggctatcccccgaggcctgggtctccttttgcgggccatacagagctccctaggcccttttgcgtgacctttccccaacccgacaacgtgcttgcatacacgtgggcgtgccctgcccacccacatgtatgcgtgtgcccactatctttgctaccggggacatgcgttcgccgcggtctgttcatttatagacgacccccaatttggggttagggtctcgtgcgcatttcttgcgagccccttcgccaagcccttgcgctccccgggtggagggtgtacaaggccagtagctcacttgcaacgaagtgttgcgttcgaaggggccgtgaggacgcgaaggcctattacctcccgtggcccccgagtcgctttgtcgcgccagccagaggacttcctcgggcagggcctgatgtcgggggggagagttctcccccgcggaaggtctcatgggaaggcctcgctgtgcctcgacagagcggctggtatgtttcttctcgggggcccccttggttaggcctacctggtc

SEQ ID NO: 693251 - DNA, 841 bp, Homo sapiens
gttgcgaggccgggtggcctcggtcggtaccctgggctgcggagcagttgcctcattagtattcgtacccactgatggcggtgcagcgggccctcggggacagcgagctgtcgcggccatggcttatcactcgtggctacggagcccatgtgtcacagcacagggccctgggtatgcccctgggatcccctctccccgtcttcgatgacacgaagcgggtggtatattccaggccagcccgggggtgatacccaagcccaccatggaggcagacggtgggcctttccaggtgtcaagcaactttggcttgtgtgggggaacccaaattggcccaaatgttggcttaatgggccctaattggccaagctccaatcggctattccccattggcgaaacggacactgggtcgcaccaaggtgagcttgcaccccgttaagaagtgtactgttgaggacaaacttcaacaggttactcttgttaagctgggtgacacacaagcgccctaccggttggcgccacaagaaagcttagggcggggcatagcatgaggttctttaccactgtagaacaaaaccaagaaaacctgtggggaatcgttgcacggtacaacgtcggatgaatggcgtccttcttgccccccccccgggccatagaccttcaaactgcccgccgtgcaccctcttaatttccccgagcggatgggcccttcaattcactttaccgttgcctcccttgggtcttggagattgggcacctggggcattttcagacacacggtgttctcccccgggaggggttgctgtggcccttgtgtgcaaagccacacgcggcctcggtgttg

SEQ ID NO: 693252 - DNA, 106 bp, Homo sapiens
  misc_feature (56)..(56): n is a, c, g, or t
gctggcatttgaacttcgcccactggcagcactgacagaactcacaatcaagcagnctgggctcacccaccctggcttctccagctcacatggcgccagcactggg

SEQ ID NO: 693253 - DNA, 102 bp, Homo sapiens
  misc_feature (12)..(12): n is a, c, g, or t
tttggcaacganccgaagttaaggatgtttccccataaccaatgtacatagttcgtgcatcactctgctgttccctacacataaccgggaaacaggtttaat

SEQ ID NO: 693254 - DNA, 140 bp, Homo sapiens
gtcgtcgtgtcattccgacgagtaaatgttttcccacacttagaacagacaaaatccgcagtgactaagttggcttcgtgatagcgcttgaagtgcatgtcgagaagctgcttctcccggaaggtcttatcgcagtggct

SEQ ID NO: 693255 - DNA, 245 bp, Homo sapiens
atttgcttttctggggagtcctggcggtttttattgagcctgttcatgtaaaagcccaagaggatgaaaggattgttcttgttgacaacaaatgtaggtgtccccggattacttcccaggatcatccgttctcgcggagatcctaatgagcacatgtgtgagagacacacccgaattaattgctcctctacacacacagggagaatatctctccatccaacctcaccatagagcaccagatgtgt

SEQ ID NO: 693256 - DNA, 121 bp, Homo sapiens
cagtttacagcgtcaggggctgttcacctcagtttacagcgtcagggcagtttacagcgtcaggggctgttcacctcagtttacagcgtcagggaggggagagtgttaaagggagaagtgt

SEQ ID NO: 693257 - DNA, 709 bp, Homo sapiens
  misc_feature (3)..(3): n is a, c, g, or t
  misc_feature (80)..(80): n is a, c, g, or t
  misc_feature (529)..(529): n is a, c, g, or t
  misc_feature (545)..(545): n is a, c, g, or t
  misc_feature (550)..(550): n is a, c, g, or t
ctncccggctgcaggaattcggcacgagaatggattgaattagcccaggatgacgacaggcttcgtgaagagcgaatgantgcttagaagaacagagacatgtatgtaggggtttactcagacagagttggaggattcagatacagtgaaagatatgatcctgagcccagatctgggatgaggagtggcatattggaagcacaattgatgacaccatcagcacgttacggaggaaagatcgagaagactctgcagatagatgcagcgactgcgatgaggaaacgagagctagacgaggcagatcttccacaggtgaattcatagatgacgaggagactgtgacgacacagcatattcatatgacacatgccacatcgaccaccacagccatgacacaagcgcacagttacttacacaaccattgatcttgaagcagcagcacactactcacgggatcaagcaaggtcagatcagcatgcttctacttgcacacctgagtcttgagttaagacttcagagcctagtgcgngtcatctgttgacgtngtcanctagtcagtagcaccagactgcaacatgagatcaactgactatctgagatagctgacttgctagtagtgatatgcagtgccgtccacgttcagactcgtggatggaacttgttacctagtgcttcattccacagctctgcatggtgctgtctggcttgt

SEQ ID NO: 693258 - DNA, 732 bp, Homo sapiens
  misc_feature (732)..(732): n is a, c, g, or t
cctgatatgaagtgtaaataaattagaatgacataaaagagaaaacgatgaggtgatggagcagcatataaatagtgtggcaccatagacgaaaacacggagcgacgcagaagtagaccagataaaggcacacgctgaaacgaccacactgagagaacataacccagagaaatggacagaagacgagaagacatatactcaacaaaaacccctaaggcaaaaaacgcagatagacaacgaaaaaaacaacatacgcgaaataaatgaatagaaaacgcggaaaacgaagaggaaaaaaaccaaagagatgaaacagataagattggaaaggaaaagtggtaaaaagctaaaaataacactttacagtttacaatattaaatgaataagaagtcagataaaataataacgggaaaactggattaatacgataaaatggcaatataaattaagcataaagcatcaataaaaaacgatgcaatacaaaagaaaaactaccaaaaaaagaaaaaagactgaaaaaaagagaacagaaaaacaaacaaagacaaacaaaaaaaaacagaagaccaaacaagaaggacaaaaaacaaggaaggcagaaaaagagagaacaaaacaagaaacgcgaaaaacagaagagagaacacagagaaacaaaaacaaacaaaacaaaaaaagcaacgacaaagaaaccaagacaagcaaaacaacaaagaaaaacaggaccaaan

SEQ ID NO: 693259 - DNA, 161 bp, Homo sapiens
cttggaatgcagccaagcgggtggtaactccatctaaggctaatacgcacggacgataacctcagttaccttagggaaggtggaaaggctgcaatttctctggccctaggtccaagtgtgctttgtgcgaagagttgggtgtcccattgtggaggtttcaa

SEQ ID NO: 693260 - DNA, 133 bp, Homo sapiens
ggcaggatacgacggcagtgtaaactgacggcagtgtaaacctgacggcagtgtaaacgaccggccagtgtaaacgaccggccagtgtcaaccgaccggccagtgtacacgacggccagtgtcacaccgacgg

SEQ ID NO: 693261 - DNA, 291 bp, Homo sapiens
cgttcttggcccgctgggagggagtgggcccccgtgtctggagatggagagactatggacagtcatggcgtgtgtctgaatcactcccttttctttcttgggccctggccagcctcctccccagaccagtgtgatgtcaggcccagccgacctgaaggtgcagggttgcctggtgcaggttcctctgggatgaggttctgagggcacccagcctggccttgctccagaagcctgggctctgcgcacagaggggtgagttaaggctgactaaacttggcggggccttgtacg

SEQ ID NO: 693262 - DNA, 961 bp, Homo sapiens
  misc_feature (44)..(44): n is a, c, g, or t
  misc_feature (76)..(76): n is a, c, g, or t
  misc_feature (139)..(139): n is a, c, g, or t
  misc_feature (144)..(145): n is a, c, g, or t
  misc_feature (174)..(174): n is a, c, g, or t
  misc_feature (178)..(178): n is a, c, g, or t
  misc_feature (181)..(182): n is a, c, g, or t
  misc_feature (195)..(195): n is a, c, g, or t
  misc_feature (202)..(202): n is a, c, g, or t
  misc_feature (205)..(205): n is a, c, g, or t
  misc_feature (207)..(207): n is a, c, g, or t
  misc_feature (211)..(211): n is a, c, g, or t
  misc_feature (217)..(217): n is a, c, g, or t
  misc_feature (221)..(221): n is a, c, g, or t
  misc_feature (223)..(223): n is a, c, g, or t
  misc_feature (234)..(234): n is a, c, g, or t
  misc_feature (255)..(255): n is a, c, g, or t
  misc_feature (263)..(263): n is a, c, g, or t
  misc_feature (272)..(272): n is a, c, g, or t
  misc_feature (297)..(297): n is a, c, g, or t
  misc_feature (300)..(300): n is a, c, g, or t
  misc_feature (305)..(305): n is a, c, g, or t
  misc_feature (309)..(309): n is a, c, g, or t
  misc_feature (315)..(315): n is a, c, g, or t
  misc_feature (317)..(317): n is a, c, g, or t
  misc_feature (327)..(327): n is a, c, g, or t
  misc_feature (332)..(332): n is a, c, g, or t
  misc_feature (341)..(341): n is a, c, g, or t
  misc_feature (359)..(359): n is a, c, g, or t
  misc_feature (365)..(365): n is a, c, g, or t
  misc_feature (369)..(369): n is a, c, g, or t
  misc_feature (377)..(378): n is a, c, g, or t
  misc_feature (385)..(385): n is a, c, g, or t
  misc_feature (390)..(390): n is a, c, g, or t
  misc_feature (395)..(395): n is a, c, g, or t
  misc_feature (477)..(478): n is a, c, g, or t
  misc_feature (532)..(532): n is a, c, g, or t
  misc_feature (534)..(535): n is a, c, g, or t
  misc_feature (542)..(542): n is a, c, g, or t
  misc_feature (553)..(553): n is a, c, g, or t
  misc_feature (639)..(639): n is a, c, g, or t
  misc_feature (643)..(643): n is a, c, g, or t
  misc_feature (645)..(645): n is a, c, g, or t
  misc_feature (655)..(655): n is a, c, g, or t
  misc_feature (690)..(690): n is a, c, g, or t
  misc_feature (724)..(724): n is a, c, g, or t
  misc_feature (748)..(748): n is a, c, g, or t
  misc_feature (760)..(760): n is a, c, g, or t
  misc_feature (797)..(797): n is a, c, g, or t
  misc_feature (829)..(829): n is a, c, g, or t
  misc_feature (833)..(833): n is a, c, g, or t
  misc_feature (864)..(864): n is a, c, g, or t
  misc_feature (919)..(919): n is a, c, g, or t
ccaccaagggtgtccaggcttcagcacctagtacagcatgagtnagtacattatcaatacaggcaacttgggaggnatggagtggggaagattccacacaggaaggagactagaagtccttctaggcttggaggctgangcatnnattgtactgagcacaatccacttatgganaaanaannaagtctagatttncattttncananaganaggaangaananattccctatanatagacgggaaaaagagaaanaggattanctggagggnaattccttttttatatatttagaanaanaacanattncacctnanaggtgggtanagganggaaaaaanaaagtttattttaaatanaagcanaaanaaacgagnnaaaaaangtcantttgnagaaggaaaatgcttctgggatggtattcactggccattccattcccaggtaacaggaaagagacacatacgcaggaaaggnncccaggagactacagaacaagggaggtataccccacaggcaccaaaccctccangnnatcccgnccacagcggancagatactacataccactgtggtagatgacacagcagcactttccccacgccgggaagctcaaactgggtcaaggtctttgcagcnagtntngatcacagangagcccgcactggccctaatggggttttgcaccantcctggggtgctagagggcctcaaagctcctganggagaaaggcatctcggggagggngcccccccgctntcacaaagagccaaacacaactcactagtcggagggnagccagctcagatgggtctcctaggactttangggntccattctcatttttctgcgggggccccaangcactccaaatagtcttcccaaccagaggcccctgcctgggtgccatctcatctntgggcaggggtctctcctgtgcaccttcttcagctgcagtcc

SEQ ID NO: 693263 - DNA, 807 bp, Homo sapiens
ggaagagtaggccaacagaactgtactgcctcatgtctggggaggtcttctccattttgccatacctgtggatcctctatttctgcttctccactacctcatagaaggctagagtaaggaggtaatccgagaaataggacaagctaatgaaatattacaagtacagccaaagagaagacaattaaagtggctggaaaaaacaggttactcacaacggggggcagcattagaaaaccaggtaatgtgaatgtcagttcccgggtacaagtcaaccttgcatatgtgcctctgggtagaccaagtcttccactgacataggaagaggagtacatattcgagtcatgcccatggtctgaatatctgagctaaaatccctaaaaagaaatacgttgatgacgtatattctaacataccttaaaaggctaatccagcaacccttccggccgcgttgcccaaaattacttcgcattcagaagcacaataaagtagttcagtactgagcctgtagaacgcaaagaggaagcatgaccacctcaaggttcagactacctaacaagaatgatgaagaactggaaaacagaagagaatagcgcaatattgacttgcaggtacagacaaggcttgtgggctaaagattggcaaggatgtggaagtgaacaaaggtattggagaccatttatagggggtaagaaagatgaacaacgacattggcgaaggttggaaattgaagaataagaatctaggacaataaaaactaacaagaaaaataacaatataacatgaacaaaatagacaaaaaaaataatg

SEQ ID NO: 693264 - DNA, 683 bp, Homo sapiens
  misc_feature (62)..(63): n is a, c, g, or t
  misc_feature (77)..(77): n is a, c, g, or t
  misc_feature (95)..(95): n is a, c, g, or t
  misc_feature (101)..(101): n is a, c, g, or t
  misc_feature (105)..(105): n is a, c, g, or t
  misc_feature (114)..(114): n is a, c, g, or t
  misc_feature (117)..(117): n is a, c, g, or t
  misc_feature (123)..(123): n is a, c, g, or t
  misc_feature (173)..(173): n is a, c, g, or t
  misc_feature (192)..(192): n is a, c, g, or t
  misc_feature (224)..(224): n is a, c, g, or t
  misc_feature (405)..(405): n is a, c, g, or t
  misc_feature (411)..(411): n is a, c, g, or t
  misc_feature (426)..(426): n is a, c, g, or t
  misc_feature (548)..(548): n is a, c, g, or t
  misc_feature (659)..(659): n is a, c, g, or t
ccttttggccaaatttgggtccgggcccccccctcgattttttttttttttttttttttaanntttgggcccttttnttggggattttcaccagnggaccntggncctttaaancanttcttngggattttaaaaagggctcccaaggacagctcctctgctttaaggacctntcctgggacaataagcagnccccagtatgtgcagaagttgtcagggggttncccaggggtatggtgaaggagagttagtccccaagggcaccccagcggggccggtagatctggaagatggtgatccaggaggtgagcactatcacccagaagaggaagcccacagctgagcgccagacatagcctttgatttggctctgttctgtgtaggctgggacaaggaaggcctctnggaganccagaagatgacaancagagaaaaggcaggaaagcaaacccccccaggtagtacttccggcacaggttcaatttctcctcattggacactcgctccaggttcatagtgcgctggggccgggtcgtcccaagggtctncggggcaagacccaagccttgaccctaagtaacagatgcaaggatcacgaacaaccacgccccaggagagctcacttcctccggctggggtgccttagctactttcagttntggacgtttgctcgtgccgaattc

SEQ ID NO: 693265 - DNA, 556 bp, Homo sapiens
  misc_feature (421)..(421): n is a, c, g, or t
  misc_feature (532)..(532): n is a, c, g, or t
ctcccccacacgccgctattggatattcggtctccccttggccccccggtgataggattccccttattggcctcccggctctcccttctcggaattgtgtcccgaaccctccccggttccccccggggcttttttaaatgggtgagaaacccccgccccttgtgccttggccccgggttctcccttgggcacccgccttttggcccaagttccaccttaccctaacttgggcccccgccgcccaaccgaattggtctcttaaaaaccttttctcaaggcccaagccgcccacaaaatttttttttttttttttttttttagaaagttagggtccctttattgggggatgtccagccagagaacgctgggaccatgaaaacacagtcttaggagctttgagaaaggggctcccaagggtctncggggcaagacccaagccttgaccctaagtaacagatgcaaggatcacgaacaaccacgccccaggagagctcacttcctccggctggggtgccttagctactttcagttntggacgtttgctcgtgccgaattc

SEQ ID NO: 693266 - DNA, 947 bp, Homo sapiens
gcagctgcatcaacccgggccaggcagctgccatcgcctcgagcaccatcatggtgcccttcggcctgatctttatcgtcttcgccgtaccacttctaccgtctcatctggattagccataagactgaccgacagtgccaggagctcaactgagctggcgggaatttgcccgctattacaggagcagctatggtacccaactagaggggaacgcaaccccactagacgccgcaggtagaacaactgatgcctaggtcccatgtggtacttgggcccttccaagtagctattggccttacgcccttcccccttgaaccttgtcactggcacccagcctcacggaacagacttgcgcagggcggctggtgcttcagtctaaggtgcggcagaagcactggacggcgaacgaaggatgttgctctatctaccgaggaatacttgcgtgcacttatatgaataagcttgatcctcgtaaggtacgatataacgcaacttgccttgtccttctccaggctccagggtccaccctcgcgtgttatggtgaaggcggttgaggggggccaaaaggtggggccacgatcaacatctgatggtggttcccgatcatccctcaccttgatgaccatttgcccgagcatgggggtgtccgtccgtcctgtccatgacgcggacttcaatccttccacttcacctgctccaaagcaatctgacgctgtagtacaattgtggtggtggtgcagcaccagtcagatagtaccttcattaacggtatcaccgtccatcgccagagttcgttgtgtaagtttggggcatgggctacgtgctcacacctggattatgggtgaggctcttaggaaaaagattatgccaagtctttaaccggaagttattgggtgggccaataccatgggggcccaggcaattcctggaaggccaaggctggcgta

SEQ ID NO: 693267 - DNA, 1139 bp, Homo sapiens
tatgtctcctgctcttgaaaaatcgtgcatatttctaaggttttccattttctggttccaccttttcctggaacctcgaaggacttctcgctcaccttaataagatttagttgccatccagtcgtatgattcatggtttctgctccgttccacccttgatgatggtcccggacagctgttccagccggtacagaaactctaacggggtaaagtggatccaaccgaaagcccactgctggctaaaacttcggctacagcggttgaccagttgatgatatccagaccatatcttctggttctgaaggtgatgactttgaggacaagaagaccttgactggtccaatgaagcgtctagtgctagtaacatctacccgagcgctttgctcttaaatcaacccatgggattgcaattaaatcaaccaactatggcctctgtggacaaggtgtgagagcgcacctgttcgtaagaacacaccgccaattctatgatggcgaggagtcttgctacatcattgatagccaagcttgaaggcaacctgggccgctacctcaaccacagttgtcagcctccaacctgtttgtccagaagtgtcttcgtggatacccatgatcttcgcgttccccatgggatggccttcttttgccagcaaaagaatccgaggctgggacagtaacttacttgggactacaactacgagagtcgaggcacgatgtcggaaggcaaggagctactctgttgctagtggggccactagaatgcagaggacgctctgtctcgtagaggacagccttcttcccgaacccttcttgaacgtgtcgatcttgccatcaggaactagggtgctttccatgagtctcgcttagaatcccctgaacgcgcagaacttctgctagggactagctactccaccaccagctcaatacgttagatatgaaactggggcgattctggactcagatgatgccctgtccaatgtggtgctagacaggcaggatcccgttctccacctccaaaggccgtaaagggtggggagagatcaccactctaacctcggcctgacatccctcccatcccatatttgtcgaacgtgttcgtgcttataacagactttgttcttagtaaagagcctggtattaca

SEQ ID NO: 693268 - DNA, 797 bp, Homo sapiens
  misc_feature (23)..(23): n is a, c, g, or t
  misc_feature (103)..(103): n is a, c, g, or t
  misc_feature (108)..(108): n is a, c, g, or t
agcaaggaagtcggcgccgtctnccgcaagttcatgcaggacccgatggaggtgtatggaatgacgagcagaagctgcttcttcacgatctgcagcaatactnctgcnatctgaaggacagcgagaggaaccgcaagctcttcgacctgctcgacgtgctgaagttcaccaaggtggtgatcttcgtgaagtctgtcaagcgctgtgtggcgctctcacagttactggtggagcagaatttcccagccatcgccatccacagaggaatggcccaggaggagcggttgtcccggtatcagcagtttaaagactttcagaggaggatcctggtggccacaaacctgttcggacgaggaatggacatcgagagagtcaacatcgtcttcaactacgacatgccggagaactcggacacgtatctccacagggtggctcgtgcgggtcgtttcggcaccaagggtttggccatcacatttgtgtcagacgagacagacgccaagatcctgaacgacgtgcaggacagatttgaggtcaacgtggccgagttaccggaggagatcgacctttcccacttacattgaacagtccagatgaaggtcttgacgttctccgaacagcagcagatggatcatggcggagcgctgaacctccgattttaacgcctcctttttacctcaaacccacagttgtttttaccgcttctctctctgaggaatgggcgagatgtctgttttatgatttttgtcctgatgtttttgtttttgggttttaatgaaattaaaactttttatatccta

SEQ ID NO: 693269 - DNA, 317 bp, Homo sapiens
tccgctcgatatgaggatgtcgaacaagcatgggaggtcgcagcgtattaagtgaagaagtcagtaggacagaggaatttctcttgtcttaggagatcttcatttagtgtgactcccatggggaggaacagactggccggcagcacacaggggtcagcacgtggttgacttgaataggattattcgatattaaaaaatacttttccatgtttcctgagatgctctatgataaatcagttgcttctgtgataatacaatacatatgtggacataaacagggatcaaataaaggaggttattgggaggttacttggctt

SEQ ID NO: 693270 - DNA, 384 bp, Homo sapiens
gtctggcccaacgtcgtggaaacccccatctccgcccaaaatacaaacaattagcccaggcatggtggtgcacgcccgcaatccccagcctaatactttttaacactccttaagcttttactaacaatctcctcaaagtccttccagcttcttcccacttctcagttgtaaagttacttctacatttgaggtttctgttatggcagacccccattccagaaaccaaagtctgttctctgttactgggtaacaaattactacaaactcagcagcttaaaacaacagtccaggtgtggaggctcatgcctgtaatctcagcattttgggaggccaaggctggaggactgcttgaggtcaggagttcgagaccagcctggccgacag

SEQ ID NO: 693271 - DNA, 879 bp, Homo sapiens
cacgccggtcttgagcatcctcaagccctgatgcagccagccccagacgaggcccgcaggacagtggccggggacagccagtggtccatggcccgagtgccaggcatggacggggacgctgctgctgggcatcgtgccattcatgtacatgtcagtctccgtcatccaagctagtgcaccgatcttgacacctgtcatccagtgagtccagagacgttcagcgctggaagcaacgaatggaggccgggatcgtgctcagctagcttcgttctgggtgctactgccatgacacaggttgtgagctggcagctcgggatcggattgggggtgagaaggtcatcctgctgtcagcctctgcctggggctccatcacggccgtcaccccactgctcgtcccaccttggaggcagtgccctgctggtcttcatgaccttctcacgcatcctcatgggcttgctccaaggggtttacttccctgacctgactcagcctgctgtcgcagaaggtgcgggagagtgagcggagccttcacctacaggatcgtgggcgcctgggtcccagatctgggacgctgctgtaccgtgggcggtgtggctcccttgtcctggcatggtacgggtggcacgagcatcttcgtatgtctccggcggcctcaccttgcttgggtgtggtacgtgtacaggtccctgctgatgtgcatccaagatctcattctggccttgggtgtcctgggcccaaaagcgggccggtgtccatggcacgagcgcaggggtccccatggagacgggctcttcccggaaagcctgctgtctgggcagccgctgaatcccaggtctctgcacgcatgctccgttcttcatccttctctcctgcgtgccc

SEQ ID NO: 693272 - DNA, 906 bp, Homo sapiens
gcggagtcggacgcaggcagaccatgtggaccctgtgtgagctggtgtggccttaacagcagtggctggtggctggaacgcggtgcccagatggtcagttctgccctgtgtgctgctgactggacccctggaggagccagctacagctgctgcctgtccccttctggacaaattggccacaacacttgagcagtgcatctgggtgtgcccctgccaggttgatgcccactgctctgcctggccactcctgcatctttacctgtctcagtggacttccagttgctgccccttcccagaggccgtggcatgctggggatggcatcactgcttgccactggggcttccactgcagtgcagacgtggcgatcctgcttccaaatgatcagtgtaacaactccgtgggtgccatccagtgccctgacagtcagttcgaatgccctgtgacttctccacgtgctgtgttatggtcgatggctcctgggtggtgcttgcccatgccccagtgcttcctgctgtgaagacagggtgcactgcttgtcctgcactggtgccttcttgcgaccttggttcacagcccgctgcatcacacccacagggcacccatcccactggcaaagaagctccctgcaccagaggactaacagtggcagtggccttgtccagcatcggtcatgttgtccggacgcacggtcccggatgccctgatggttctactgctgtgaactgccaagtggacatattggttgtgcaccagtgcccaaagacactgatgatccgatacactggaatggtgaccccaggacactgtgtgttgcctgaatcagagtaaagtggctctccaggagcacggctacaccgagcatctcacataaggtgactggcacaaagggggatgtgaacagtgac

SEQ ID NO: 693273 - DNA, 273 bp, Homo sapiens
  misc_feature (59)..(59): n is a, c, g, or t
ttacattcgatgtcgaagcactgatcaagctgcgtagccagacgcgggcgatctccgangcgctgaaggcgcaggcggcggattaccttgccaccgtggcgccgctgatccgtccacaaaccctgtttggcgaatacttgcaaggcgcccagcgcagcagcgggcgcgaaacgcagggccatttccagtccctgatcgaactcttcgatcgcatcggctcggccgcgccgtttcagctggtcaacgaactggaagtgccgctgaacctgatca

SEQ ID NO: 693274 - DNA, 129 bp, Homo sapiens
cgaggtgagaggacgaacaaaatgtgacacatgcagtggaatagtattttatatacatatagcacacagcacacacacacgcgcacagacacacacacatgcatatacacacacacatagtatatacat

SEQ ID NO: 693275 - DNA, 173 bp, Homo sapiens
cttcaaaattaccttttcaaatccatgattttgagtccatttgggggatttttaaaaatttgatgtatttcaaaaccctgttcaaaattaaattgtttaattttaaggatgaggaaggatgttcctgaagttggtcctatttaaattatttaactattggaactttaaaaaaa

SEQ ID NO: 693276 - DNA, 222 bp, Homo sapiens
gcacaccatgcacgattcatagtcggcaataatacatagaggaacaagtctctacccgtgaaagaagatgtttacatctcaggtcctgaatgagctcagaataggggccagatggtgactatctgttggtactgcaggtccatgcaatctttgatggcagttcttttctttttagaactgtaaacaaccataccatcagcttgctgtgttgtacagtgctac

SEQ ID NO: 693277 - DNA, 511 bp, Homo sapiens
agaccgagaacggagagtaacaaaagatacacacagagagggagagagagagagagagagagagagagagagagagagagagagagagagaaagagaagtaaacccaaccaccatctccttgtatctgtgtcagggggtctgtggccttgtgggagaacgttcagcgacaatgctgtatttgggcgcgttctttttttcttcttcttcttttctttcttttttgtggagtgatgtctctctcgctctgtcacccaggggtgcggtgcggtggcgctctctcggctcagtgaggtgtctctgcttccgcgggttccgtgtgattcttctgcgagagcgtgggattacagggtgcgcaacaagacgggcggctcatcgttcatatatagaatagagacggggtctctccatgtggcgcacgcttggtctcgaactcgtgaacacaagtgatccatctttgtgggcctcacagagtgctggaaaagacaggcctgagccggcgggattcacgct

SEQ ID NO: 693278 - DNA, 882 bp, Homo sapiens
  misc_feature (31)..(31): n is a, c, g, or t
  misc_feature (83)..(83): n is a, c, g, or t
  misc_feature (86)..(86): n is a, c, g, or t
  misc_feature (90)..(90): n is a, c, g, or t
  misc_feature (99)..(99): n is a, c, g, or t
  misc_feature (102)..(102): n is a, c, g, or t
  misc_feature (132)..(132): n is a, c, g, or t
  misc_feature (141)..(141): n is a, c, g, or t
  misc_feature (150)..(150): n is a, c, g, or t
  misc_feature (178)..(178): n is a, c, g, or t
  misc_feature (180)..(180): n is a, c, g, or t
  misc_feature (182)..(182): n is a, c, g, or t
  misc_feature (186)..(186): n is a, c, g, or t
  misc_feature (189)..(190): n is a, c, g, or t
  misc_feature (195)..(195): n is a, c, g, or t
  misc_feature (201)..(201): n is a, c, g, or t
  misc_feature (205)..(205): n is a, c, g, or t
  misc_feature (207)..(207): n is a, c, g, or t
  misc_feature (212)..(212): n is a, c, g, or t
  misc_feature (222)..(222): n is a, c, g, or t
  misc_feature (250)..(251): n is a, c, g, or t
  misc_feature (260)..(260): n is a, c, g, or t
  misc_feature (264)..(264): n is a, c, g, or t
  misc_feature (267)..(267): n is a, c, g, or t
  misc_feature (283)..(283): n is a, c, g, or t
  misc_feature (285)..(285): n is a, c, g, or t
  misc_feature (288)..(288): n is a, c, g, or t
  misc_feature (300)..(300): n is a, c, g, or t
  misc_feature (304)..(304): n is a, c, g, or t
  misc_feature (333)..(333): n is a, c, g, or t
  misc_feature (336)..(336): n is a, c, g, or t
  misc_feature (340)..(342): n is a, c, g, or t
  misc_feature (350)..(350): n is a, c, g, or t
  misc_feature (355)..(355): n is a, c, g, or t
  misc_feature (357)..(357): n is a, c, g, or t
  misc_feature (359)..(359): n is a, c, g, or t
  misc_feature (369)..(369): n is a, c, g, or t
  misc_feature (371)..(371): n is a, c, g, or t
  misc_feature (387)..(387): n is a, c, g, or t
  misc_feature (390)..(392): n is a, c, g, or t
  misc_feature (395)..(396): n is a, c, g, or t
  misc_feature (410)..(410): n is a, c, g, or t
  misc_feature (414)..(415): n is a, c, g, or t
  misc_feature (436)..(436): n is a, c, g, or t
  misc_feature (438)..(439): n is a, c, g, or t
  misc_feature (446)..(448): n is a, c, g, or t
  misc_feature (452)..(453): n is a, c, g, or t
  misc_feature (471)..(471): n is a, c, g, or t
  misc_feature (651)..(651): n is a, c, g, or t
  misc_feature (668)..(668): n is a, c, g, or t
  misc_feature (673)..(673): n is a, c, g, or t
  misc_feature (685)..(685): n is a, c, g, or t
  misc_feature (689)..(689): n is a, c, g, or t
  misc_feature (691)..(692): n is a, c, g, or t
  misc_feature (711)..(711): n is a, c, g, or t
  misc_feature (728)..(728): n is a, c, g, or t
  misc_feature (737)..(737): n is a, c, g, or t
  misc_feature (871)..(871): n is a, c, g, or t
ttgacaattggcctaaataaaaagactctgnctctaatacaagtccccttactgataataggcatgaaagagcaccatttttnaantttnaaccctttnaantcatttacggcaattcatttaaggagcttnggggccgtnttaaaaggngccaggttttcacaagacctcatccacntntncacnttnnttggnattttnacantncagcntccgatttgntggagtacagaccacagcaccacgtttnntacggtganttcnttnccagcgagccaagggntnttnccaagagcagantttntggaggggaaaacaggggttttttttttnttntttnnntttttttnttttnantngcattttttncncagtttttttttaggnttnnnttnntagctttttttttnttgnnaaacagagagaacaagaaacntnnatttttnnntttnntttttttggggcacatcntctggttgttgattttcatctgcgtcttcggcacattcttccaaattaaagtgaatcccagctgatagtcttggcggggctgttttttattctgttctccaaagcacttgagaaggttttcaggcacgctcttgaccgaggagtgcgtgtgcaccgtggacaggaccctgaagtgctcanagagcagcctgtgcagnacaancaggggcgaggngccncnnggccgggtttgcgttgatnacgatgttttttagcgncccgtaatncttcccaagcactgaattcaagtccagcgcattggtggttaaagtcgtgggctcatccgcttggattatgttggttacatccaagtctgcatcttggtgtttgaatcatcttggagaggccatcaactgcagcnttcaactcata

SEQ ID NO: 693279 - DNA, 361 bp, Homo sapiens
tgatgctactgagcactacataggggagggaaacgccaggagtggctctgacctgctgccgctgccaccacctcttatgccaagaatgtagagcctctgggcgtgatctggatgctctcctgagtgttggaagggcagcctggaaaggcatttggtggtgaaacaccgctgctccagacttacgctaccatctattgttgggggcccagagtccttggattcactgccaggccttcttccagatcggactgtacctgtgtgtaagggctcctactcccacctctcccaggcgcagggagaggacaaaaagcataagggactctgttcaacccagcaaaagtcagtatcccagtgaagaggc

SEQ ID NO: 693280 - DNA, 593 bp, Homo sapiens
  misc_feature (336)..(336): n is a, c, g, or t
acaagctgcctcccctcattgttgtggcaccaggtatgcctgggcccaggacctgcctgctgattgtgcagacagcatttcctcatgagctcgaaggtgcctgctctgtcagagtgggcagctggctcagcatcctgctgtgtgacctcaactgccaccttcccctgggccaggaggtgaacttgtgcacagctagcactgtgcgtgtgtgcatgtgctttgatggtagggtgatctctatgcccctatcttgaccacacatgcaatgccgtggcagcctagcaactcagtgatcaagacactcaggttatggccaggtgttggcttgactagagntgatgtgattgacgggggaagcatgattgttggattgcctggctattacccatacttaccttgtggagttgatgggaacctattagtggcgcacgggcacttgggacgaccagacattgcacgaactattgcttacagactccacaagggagcggttcgtgagaggtcgcacgcaaagaaatcaccccatcaagaggtcgcttgggcattgacttgcgtccggtggggcttgcagggaaggtgaaggaacgggagct

SEQ ID NO: 693281 - DNA, 623 bp, Homo sapiens
  misc_feature (24)..(24): n is a, c, g, or t
  misc_feature (64)..(64): n is a, c, g, or t
  misc_feature (91)..(91): n is a, c, g, or t
  misc_feature (111)..(111): n is a, c, g, or t
  misc_feature (130)..(130): n is a, c, g, or t
  misc_feature (159)..(159): n is a, c, g, or t
  misc_feature (187)..(187): n is a, c, g, or t
  misc_feature (266)..(266): n is a, c, g, or t
  misc_feature (336)..(336): n is a, c, g, or t
  misc_feature (345)..(345): n is a, c, g, or t
  misc_feature (362)..(362): n is a, c, g, or t
  misc_feature (371)..(371): n is a, c, g, or t
  misc_feature (383)..(383): n is a, c, g, or t
  misc_feature (386)..(386): n is a, c, g, or t
  misc_feature (388)..(388): n is a, c, g, or t
  misc_feature (411)..(411): n is a, c, g, or t
  misc_feature (447)..(447): n is a, c, g, or t
  misc_feature (451)..(451): n is a, c, g, or t
  misc_feature (472)..(472): n is a, c, g, or t
  misc_feature (484)..(484): n is a, c, g, or t
  misc_feature (522)..(522): n is a, c, g, or t
  misc_feature (551)..(551): n is a, c, g, or t
  misc_feature (618)..(618): n is a, c, g, or t
cccccaggccgcctctccactccnaagcctcacatgtcgtccttctggcttgaaaatttctgcnataattactgtttttcctccttttgancttccttttgttccccagtnccagaacttccagagcctnctggctcagatgccatctttttgtatgcnattgcgaacagcttaagtaaagcgtgcngaagagaggatgcggcgtgtgtaaaattttctcctgtgtcgctgtgttttctagccaggagcgccctcattttggaaangtctgcttttagcttgtggcacttatcagcaggcaattggtccttgaattcttccatcttggtttctgtnttgtgaatnatttcttcagccatatnaactgcctnaactcgttcctnctntngccggttttcttcagcatatttnttttcatttttaaccatatattcaatataatctttncttnatccaccagaagattggattncaatttgctgcncacgttctgttcctttatttttagcagaaacatgttcnatcccatttgcattaattttaaatgttanttcaattttaggcacttcacgaggggctggtggaattccaattaaagttaactgttcaaggagtttnttgtt

SEQ ID NO: 693282 - DNA, 449 bp, Homo sapiens
gctgattcttgagtatcctcgtaaatggtcgatccagaccaagcagttataaaaccaagacaaggaggacttcgaaacgctcatcttctggactgcggtctccagagtagatcctgaaatgaggatccgtctatactctaccccagcccaaggatattcctgatgaggttctgcagctgattcatgagagagataacatctgtaaacagatccacctgacagcccagagtggaagcagccgtgtgtcggaggccatgcggagcggagtcaggcttgcttggagcagggggcatccctcagttttccatgtttccttaatgaccaaacagtgtccttgtagccaagaacctagcatagtgtgtggcacaaagtagctgctcagtaaatatttattgtatgactaagccactgggcactggagtttgcttctgctcacttcatacgccaag

SEQ ID NO: 693283 - DNA, 1468 bp, Homo sapiens
  misc_feature (1)..(1): n is a, c, g, or t
nagatgagtcgctggtgcgttttttttttgttgtgtggttgtctgtttcgttgttctttgttgctgtgttgtttctttcgtgcttttgttggttgtgtttgtgtgttggttgttgtttgtgttgtggtcttcgtcttgctctttggttgttgtttgttgtgtcgcgtgttctttggccactatctccctgggttgacacgcgggtgggccgtcgttattgttcgggtgggctcccctggggtctcaaaagatgtgtttgttgttctcgccgtccgtttgttttgttgctgtttttatggttggcgaccctcggggtgggcattgttggcctcccgcggggttctgtttgctggtggtttcttttcgcaggttttatgtggagtcccacaccggtgtgtgtgggagatatatgtggagggtgggcctcccagcttgttgcgtgtgtttgggcgcgggagtcctcccgccctcctctttggtgggttttgtaggagccgttgtgtttgtgttcttaagtgcggtcggttttctccggggggtttttatatgggttattatagtgggggggtgtcctcccccccgttgtggacctcggtatccccccccgtgggcatcatcatgtgcggttttcgtttgtgctctctcgctggggtgttgtgtctcactttttttactggggcgttattttgttgtgtgctgcccctgttggtggataccccccgcgcgaatgacccaccccgccgtgttggttggtggttgaacacacaaaaaggtgggggtaaattttttcccgtggtgtgtgtgttgttaaataggggaaaatagagtaatatatatggttagactcttgtgctcgtttaggagggtgtgctgcttggttggttggttttcgccccctgttctgagtaggcttctgtggggaggggggatagtggagggtgagatctcctctccccgcggtgcgcgcgtgtgtcgcgacaccgcgcgggcggtgtgttatcctctccaaggagatgtctctcctcttttctctctccgccccgcttctcttgcccacccacttgttttgtggggggaaaccccccacagagatgttaaatttgggtgcccactctgtgtgtaaagagagggtgaaaaagatttttgggcgccccgacgtggttgtaatagggaaataattcacagcgcgaagataatagggcgcatttttctcacggcgccacaaaattattaatagataataagagggagattcctcaatggagtaggtttcataatagacgcccccaggccccacccccgcggttcgcgggtcaagaacgcttttttgtgtaaaaccccgtgtttgccctctaagcccacccccagatgggtggccccgtctccccccccttggcggtgtggtttttttcttaataggaatggtgggggaggttcccaaaaacacccgttttttcccattttgtga

SEQ ID NO: 693284 - DNA, 875 bp, Homo sapiens
aattcacgggcgtgccgttaatatgttacattgctgtgccctcgggttcttcatatttacaccacagttcgcgcaagtggagctatggaaggcccatggctgtgctgttctaatcatgtgagggattcttaggggttgagggggaaggactgaaaacggctgcagaccgtttaggatgcctggagtggagacaggagttaagccccttactcagagtcgctcttaagaactgcccagggccgggcacagtggctcatagcctagtatatcctagcactattgggagtgccacagtgggcaggatcatcattgagctcgggagttcgagaccagcctgggcaacatggaaacaactctgaatctagtaccctatatcctcgatttacacccttggctactggtagtgagtggctgcactattaaagtaaccaagatgacctcagagaggagctgagggctatggaggaaattcgggtctgcacacacataacgtgatgagccggaagggctaagctgtttcatactgcacgatctactagcaacttgttcaatttgcacaagtcgctggagttcgaaacgtacccagagaacatcttgtccattccagaggaacattcccccagtgcacgggacataaacttccctgaccgccaaagtcggatgtgtagaggggtcaaggccagacagactcgcgcggaagcgccaagaacgtggccaggtgttcaacgcgtggcatggcttgaacaccctggtgccactcatggtctacccctgtgtgaccaagacctaccgacgtgttctcggcccccttttagaggaagtgacacccttgaatactcacagaaccacgcaggtatgagcgccaactccatcac

SEQ ID NO: 693285 - DNA, 169 bp, Homo sapiens
gagtagatacggggtttcatcatgttggtaaggctggtcttgaactcctgacctcaagtggtccactcgcctcggtctcccaaagtgctgggattacaggcgtgagcccttgcaccctgccgtctccagccttttgagtaattgcccttccccttctgtcgtcttctcg

SEQ ID NO: 693286 - DNA, 277 bp, Homo sapiens
tccattgctggttactaccttcatggatgaatgtataccagagaatttaggccaggtgttgttgtcacgcttgtcatcccagcagtttgggagtctgaggagtgtttatcacctgaggtcatttaaatgtgtatgtgcgctcactcacatacacacagaactgcttcattttctctaaagtgtttacgtttgaatacttaaagactgagttatctgaacactgtttcattatagaaatctcaataaagattatataaatgaaagatacaaaaaaaaa

SEQ ID NO: 693287 - DNA, 475 bp, Homo sapiens
  misc_feature (349)..(349): n is a, c, g, or t
  misc_feature (359)..(360): n is a, c, g, or t
  misc_feature (368)..(368): n is a, c, g, or t
gcctactactactaaattcgcggccgcgtcgaccctgtatacctttttcatgttttattttttctccaaagccaattgtttgtctgttattatgtttctacttcctgctaggacacgttttgtcttgtttcttgttgtattactagcacttaacacaatgtctgactcatagtagatttactaaatgtttggtggataaaaggatgaatgaatttttcttaaatatttttgtttaccagttaacataacgatctgaaagaggtcatttgattggtgggatcaggtacttgtaccaggatagaggaaaatggtcagaattttattttggggggccatactatttaaagcngaaaaaaaannaaaagtcnacgcggcctcgaatttattacaagtattcgacccgggaattacgggaccgtttctgcaggcgttccagcttttcctattgagagtggatttaatctttggcgtattc

SEQ ID NO: 693288 - DNA, 165 bp, Homo sapiens
cggatgcgatgtgcgcagctacaagaaggacggagctgagttcgccaaggtggcgttgtgtgctgaagattggggaacacagccccttcagaccctcgcacatctatggtgaaactgccaattgttcatggacctcgttatgactcagtatcgtgccaggcagta

SEQ ID NO: 693289 - DNA, 1639 bp, Homo sapiens
agcgatgccatcgatcgggctggaagcccgcgtctcgacctacgggcgtgactctaaggactagatggtcctggtttgtggtctcagggcatgtccgggcgtccgtctggcgcctggctggcggcgtgtctacagttagccctgtggcgctcctgtggtcacctgcctgaccagtacgtggtaccatgcctcgagagcgcgactggacgcggtgatggtccttgtctctaggtgctcgacgactaccgtccgattactcgcttgcgattcatcggctacccgtggcattgccgcgggagcgaaggagacggggagcatcgagagaggcgacaccctctgagaacagagccacgtaggataagtcaagttctgcaatcaccctagcgtcgggatgaaatcagacgggcacgaaccgagtggtgccgcgagatatcgaaagatgcggagaccatggaggaaagcgacgcgaaccggtggggggttccggaactctattgggcgaaaaaaggaactcgttagggagattctcccccattttaggcgtcttgcatgctttatgggctcggaagtgcgacacgcgatgccactacctcgggcgatggtaaccaaatgattgcggtatgggccctccggttttggagaatatcccccctcagaaatggagatacgccaatatgccacacggtgtccctcggttcatcctccaagctagattcggtgaagagtctagaccagaaggtgcgacgagaggtgggttctgtcccgtttgcgagaatggggggtcgcacggttacgccgaaagcggcgacattaacgtttgggggaggccaaaaccttccaattgaggttgtccttcccatttcggagggagctcgggaatcaccgacgatctagcaacgggttcccttctcatgaaacgggttgtgcaaagatacagaggatagaaatacctttgtggcattggtggtctgccactccgcgccctgtgtatgtaccgggccttgtaaaggtacccggggggtatggaaggggctaccattgtacctccgctatggcggccgtgggaccaaagtggcttggaaaacggtggaccggccgagagacatcaaaacgcgcaagagcttatagggggcgcctgggtgaaacccgccagcgccggactgaacattagtgccctgggtgttggcctttggtgttgggggcgcacccgcttggagcgttggggttcaccacgttcgcgttggtgctctggtcggcgatttgcctcccgccatacggggttaagctggaacaggagggttatcggtctcgcagaaaataggcgcgcctttaggaaattgggccccaagggcaggtaacgccattaggagtatgagcgaaaggagcgcctcgcgaggcaacttgtgaccacccatgcagtgggtgtctgatattccaagttcacgagttgggggagatcaacaaaacgggatcccctttggggaaagaaatcccacgaagagaccacaggggcccatttgtcacgacggtagatatccgtctgatatacaacaggtccccccccagtgtgacggtagacacctttcacacacaacaggggattctgcgcaccacataaagtagattgaaaagactctac

SEQ ID NO: 693290 - DNA, 827 bp, Homo sapiens
  misc_feature (22)..(22): n is a, c, g, or t
  misc_feature (71)..(71): n is a, c, g, or t
  misc_feature (93)..(93): n is a, c, g, or t
  misc_feature (123)..(123): n is a, c, g, or t
  misc_feature (164)..(164): n is a, c, g, or t
  misc_feature (168)..(168): n is a, c, g, or t
  misc_feature (175)..(175): n is a, c, g, or t
  misc_feature (188)..(188): n is a, c, g, or t
  misc_feature (220)..(220): n is a, c, g, or t
  misc_feature (286)..(286): n is a, c, g, or t
  misc_feature (317)..(317): n is a, c, g, or t
  misc_feature (345)..(345): n is a, c, g, or t
  misc_feature (424)..(424): n is a, c, g, or t
  misc_feature (462)..(462): n is a, c, g, or t
  misc_feature (501)..(502): n is a, c, g, or t
  misc_feature (510)..(510): n is a, c, g, or t
  misc_feature (518)..(518): n is a, c, g, or t
  misc_feature (607)..(607): n is a, c, g, or t
  misc_feature (625)..(625): n is a, c, g, or t
  misc_feature (657)..(657): n is a, c, g, or t
  misc_feature (705)..(705): n is a, c, g, or t
  misc_feature (727)..(727): n is a, c, g, or t
  misc_feature (734)..(734): n is a, c, g, or t
  misc_feature (756)..(756): n is a, c, g, or t
  misc_feature (822)..(822): n is a, c, g, or t
ctcgggcttcgaggccgtcgangtggcctggccagtacgcggagacgcctgaggcgctggcgcgcgccgcnaagaagcgggagctgcggcttntactgatcaacacgcccccgggagaccaanaaaagaggggaaatggggcatgggggccgtccccgggaganaagnggccttncgagagggactgnagcaggccgtgcggaatgggcattgcttgaanggcaggaagttgagttttccttgcaagggtgctgtggcaagaggaggcctggtgtatttggcagcnttcctagaggcatggacatgatccacctganggctggccgaataccccaggaagctaancgaatagcagtaaaggctgaaatggaggccgtttttctggagaacctgaggcatacagctggggttttggctcaggagnacctcgtgggactactggagcccataaacacccgcatnactgacccccagtacttcctggacacgccccagcaagcnncacatctnacagaagntaggaagacccaacctccaattacaaatggacatattccactggcagatcatggatgggaacctgacaggaaacatccgggagttcctncccattgttgggcatgtncaggtggcacaggtcccaggccgaggggagcncagcagccccggagagctgaatttcccctatctgtttcaactgctggnagatgaaggctacaaaggcttngtgggcngagaaacagtagagggcttganttggctacgttcatacttgggataggcggggccacccagaggctggccagttaaggcccgcacacnaccca

SEQ ID NO: 693291 - DNA, 346 bp, Homo sapiens
gccagttgagggggtggtccgcccgataccaaatgttcaccgcgatccttccgaactgcgtctgaaacacggggtggcacaggtttctcctggtctttcccaggactgctccgaaattggagatcaccgcgcctgtattccacaaacacatccccatgctcgctgtctcgttccagaatggaagacaccaccaccatgtcatggttcttcgccagcttctcacagaatctggtggtgggccacatcctgtgctgactcagcaaattctgtacaagaaagcttctctctggtacagaaggcaaagggcatagtccatgcttcctggacacagatgatgttcactcca

SEQ ID NO: 693292 - DNA, 273 bp, Homo sapiens
tgatatgctgttcattggattgaattgattgaattgtaaaatgaaattaaactaaaccaggctgggcatggtagctcaggtctgtaatcccagcactttgggaggtcgaggcaggaggatcacgaggtcaggagatcgagaccatcctggctaacagtgaaaccctgtctctactgaaaatacaaaaaaaatcagccgggcgtggtggcgggtgcctgtagtcccagcgtgctcgggaggctgaggcaggagaatggcatgaacccaggagtt

SEQ ID NO: 693293 - DNA, 998 bp, Homo sapiens
attctacttgtatgttgctatgttctcatgtactactcagtgtacttctacatatgcccaagttttgtgtgtaccctctcctatcatagaacttcaatttctgctcttcatggattaacagtacttctgtcaccttccgattgtcaattatccacatgatcatgctaagggaattgggcatgtagtcgtcctatcttcacactttttcccattctggatcctttcggtgtctaatagtgtcttggtttggtatcttcattgacgccctatcgcgaggaagtcggggtgttaacatgaaccaattacatgtcttgcccatggtctgctaaattagaagctacgtggagagcaagcaatacaggaatacgaggaagtaatactctgtcacaagatggaatttgctcgtctctgtcgtgtgttgacctaatctaccattcgttaatctcaaggtaaaacccgtatggataacttctgggtttcaacttgagcacctttgctgcgccagacttcgtcactttgggcacttggttcgccgtcgtgatagttcttcccaaccgggttcctttttttaccttcccttccaattttggttaccccacccttggaagacaaaggcatggcaggaagacacttgcggtaaaccttactttatcggcatccattataccgcctttccctaaacctagcgaaattgtaaatggagacagggctcaagcaaacaattgtgatcggaaggaattaggttaaattggttgggcggcctagaaaccggtaatttgggtaccggcctccgaggtattatggccaaccacaacaaagagagagttccttgccgaaaaagtttttgagggaacgccattcaccttacaacttgtatggaaccattgtcgcttgaacccacatatttggagatctattacaggtagaaggttgccgttgtttgggacccatttacggcaattttctcccaggaagcggttcattttggcaatactttt

SEQ ID NO: 693294 - DNA, 428 bp, Homo sapiens
ctgcatgatgctgctcagatgcacttctcgagacggtcaagtggcagcgctcgtaatgcatcgattgttgcccctttaggtcttgtagcatttccagcgcagttccggattcggcgctaataggccctgagcctgtaccagtggatctaccacacccattaggatgcccaggaagcacgagccattctggaggcctccactgaggaccccagtggccgacgcaggccctaggaggaacgaccaggctgattcagccttcccagtgctgttcctggttccccgggcgatgcctgtgtgaggactgccccatggtcacccttactgtggacaacgtgcacctagaacacggcgtggtgtactgagtatgtgagcacggcaggcgtctggtgccatgtgctgtagaagatcgtggcgccccgcgggtgctt

SEQ ID NO: 693295 - DNA, 523 bp, Homo sapiens
atgaaatgtaaacgtcacttattaactttacattttcggtttgcaatgagaaagagtggagattttgtatttgtgttttgcttatagaatatacagacatgttgtggaagtgtagagcttaattttgctttgtcatagaggcggaaagtaggaaccagatagagatgaaaaggggccactgaaaagtgaattgggtagctcagcatataagcatgattacatatccagatagctctatatggctttctatacatttatgctttgtgtgtgtagtattagatgtaagtttacgctttgaaaggaaatctatgtctcattgtgcattataaaagccttgccaatttagtagtgatgctttccttggttgtacaggtgtgcgtttgtaaaccttcatgctgtactgggcatgggttttgtctcttggggatacattggctttgcagtgtacatttacgtccctgccctctttgacctggcctgatagtgttgtataatgtaagtttatttctccaaatcgagagtg

SEQ ID NO: 693296 - DNA, 572 bp, Homo sapiens
aattccctcccacgcgtgggggccctgggggggatcacacaacaaacccctcttttctcccccctctttgtcccaaaaaaacccccctcttaaaagaggggggggaaaacctcacaactcctttctcccgccccccgcggtggaaaaaaaaaacactcaaaaaattttttttacaccacccctattttgcccgggtgttttggactctaaagggacaaaaaccccaacaaaacccgagggttaattttttcccctcccagtaaatcaaatcccctaaacccccttctaaaatttggaaaaacctaactctgggttaccttttcccgcggggaaactaacaacaaccccaaagcgtttggatgtcctccctgccaacttggtcttgtggcgctcctaggcctgagccaaacggaagcccccgacccttcaccctcacccctgtgacctcaggtaccaaaggggaagggctgctcactgcaggaggagtgacctatattcgggctaagacagctgtgccatgcccacctattgacaatgataaagggaggtctctcttctcagcaaaaaaaaaa

SEQ ID NO: 693297 - DNA, 134 bp, Homo sapiens
catctccacaccagaacagcataaggttcacgcaataaacgcccacacctggcacagcaacggtaatagcccacagtaagtttctacattacattaccaacaccgcatacagtgtacaaaagacagcaaaggct

SEQ ID NO: 693298 - DNA, 755 bp, Homo sapiens
tggcacttcgcccaacacaggacagtggagccccacctggtcggtcccacttccgggtcccccatgcatcttgcccaagggggcctcttggggacggggaatggttatgaggaaacacttttaaagaaaaaaggaagacattgaaaaggttaaagtttctctcccatatcgtgcatgtccctcctcattatagaaagcccagaataaggggctagaacctccaggagagggctcctccccgactctacatctctcgcgtgacggtctccaccaggtattgcagaaattagggacgatggtttacggtgggggccaaagaagtgccccccttcccagggcctctcgagggtttccccttccttcgcgcccccctgtacaatctcttatgtgaggaggagtttcaagtgtgccatcacttctcccagacagtcgtgaggtcgcccaaaccgtgtatactcgcagggtagactcacgcccgcggcaaaagaagaagacataagggctcctcatgtggcgggacaccctctcatgtgcgggagagggccccggaatatccttaggaagcaagaacgactatccccagcgcttagcccctttttagctcagctcgagtgtaggaaccgaatgcaacgaacgggagaaaacatactcctatacagaggaaggggtatataactttataaaaaaaccacaaaagggcctaacaagaaaaaaccagtcaatctaaaaaaatcattcaaaacttttctgggaaa

SEQ ID NO: 693299 - DNA, 735 bp, Homo sapiens
  misc_feature (122)..(122): n is a, c, g, or t
  misc_feature (161)..(161): n is a, c, g, or t
  misc_feature (238)..(238): n is a, c, g, or t
  misc_feature (277)..(277): n is a, c, g, or t
  misc_feature (285)..(285): n is a, c, g, or t
  misc_feature (288)..(290): n is a, c, g, or t
  misc_feature (658)..(658): n is a, c, g, or t
atggcatgtagtgaggacaagacagagagaggaaagaggttccacagccttttaaactactagatctcatgagaactcgacgtcactatcaggaggatggcattaagggcttagtgctttgncattgtgaaggatccactccacccctttatgattaaagntttttccacctaggccccgactctaacattagggagtgtactttcacatgagcttggaaggggcatagagaaaaacngtattattctgtccctgaccccacaaatctcatgtcctnctacatgncannntacagtcatgccttgccagcagtctcccaaattcttaactcatttcagcattaactcaaggttacaaagtccaaagtctcatctgggtcaaggctacattttctttggcctacgagtctctgaaataaaaagcaagttcactgcgtctaaggtacaatgatggtacaggcatttcgtaagctttccatatccaaaagggagacattttccagaaaccttcttatttttatctgaggccccttcagtctggccttcactgtccatgttttggtcagcattctggtcacagccatttaaccagtctctaagatggtccaaaaatgttctcattggtctgtcttcttgggagccctccaaaatcttccaanctctaaccattatccagttccgaagttgcttccacattttcaggtatctttatagcaatgctccaaagcctggtagg

SEQ ID NO: 693300 - DNA, 379 bp, Homo sapiens
  misc_feature (32)..(32): n is a, c, g, or t
  misc_feature (56)..(56): n is a, c, g, or t
  misc_feature (112)..(112): n is a, c, g, or t
  misc_feature (121)..(121): n is a, c, g, or t
  misc_feature (154)..(154): n is a, c, g, or t
  misc_feature (165)..(165): n is a, c, g, or t
  misc_feature (172)..(172): n is a, c, g, or t
  misc_feature (232)..(232): n is a, c, g, or t
  misc_feature (241)..(241): n is a, c, g, or t
  misc_feature (262)..(262): n is a, c, g, or t
  misc_feature (266)..(266): n is a, c, g, or t
agaatattgacaacgccactatctggcacggnacgctagatttaacttataaaatntattaggagacattatggctgaagcacaagcaaattatggtggcaagattatcatngcgtcacgnaaattatcagcacaaggaacagacgcaggtttnaagtttgcgtntgaaacnacacatgactacacaaagtcacgtgataacaactctacggctacaaagtcaggtactttnaacgcaccnggttcacttgaaacaaagttntcanttgatatggtatcaaacgacagcgcaccgttaaaaatgcacaggacgcattgacagcggtgagtaatggaatactggcgtatctttactggtattaatggtcagtaaagggaa

SEQ ID NO: 693301 - DNA, 187 bp, Homo sapiens
  misc_feature (41)..(41): n is a, c, g, or t
  misc_feature (77)..(77): n is a, c, g, or t
  misc_feature (87)..(87): n is a, c, g, or t
  misc_feature (127)..(127): n is a, c, g, or t
  misc_feature (163)..(163): n is a, c, g, or t
ccatccaggcatgctcttaccggcgtgtgtgtgtgtgtgtnagagcccatccaggcatgctcttcccggcgtgtgtntgtgtgtganagcccatccaggcatgctcttcccggcatgtgtgtgtgtnagcccatccaggcatgctcttcccggcgtgtgtgtnagcccatccaggcatgctcttccc

SEQ ID NO: 693302 - DNA, 469 bp, Homo sapiens
  misc_feature (261)..(261): n is a, c, g, or t
  misc_feature (297)..(297): n is a, c, g, or t
  misc_feature (356)..(356): n is a, c, g, or t
  misc_feature (369)..(369): n is a, c, g, or t
  misc_feature (375)..(375): n is a, c, g, or t
  misc_feature (431)..(431): n is a, c, g, or t
  misc_feature (465)..(465): n is a, c, g, or t
tggtggggtgggggtgcggagacagagtctcctttgtcatctacctatgctgtggtgtaatcatagctcactgcagcctccaactcctgggctcaagtgatccttccacctcagcctccagagtagcagggactacagccatctgccgccatgcctagcttggtttttttattttgtttttttgtttgtttgtttgtttgtttgttttttatttttttgagacagagtctcgctctgttgcccagggctgggagtgcagtnggtgtgatctctggctcactgcaacctctgcctccngggcttaaaccattctcccacctcagcctctctgagtaggctgcaacttacaggtatgncaccaccatgccngggttnatttttttttgtatttttgggtaggaaacaaggtttcaccatgttgggttccagcngggtttttgaactcctgtcctaaagtgtatctgnttcg

SEQ ID NO: 693303 - DNA, 252 bp, Homo sapiens
  misc_feature (154)..(154): n is a, c, g, or t
  misc_feature (177)..(177): n is a, c, g, or t
tcctgtgctttgggacggcggaacgggcaggtacatgggcataggtaagcggaagggtacagccacatgcccgacatgccagacgaaggtcacatggatgacggagaatgaggattttgcgccggctgctcacgcagatacctgtgaatctaangaagactcgactcgccacacggntatcacagccctgtaccctgaacggtgaacggggaactgtgttcaacaaacacagcggacttcctcatggaaaca

SEQ ID NO: 693304 - DNA, 1510 bp, Homo sapiens
gtgacgcgtgggtcgacccacgcgatcaggtgacagatgctacatgagaccaccatcaccatgagctggagaaccaagactagagacgatcactggcttccaagattgatgccgtaccagccaatggccagacatccaatccagagaaacctatcaagccagatgtcagaagctacaaccatcacgaggtttacaaccaggcgactgactacgaagatctacctgatacaaccttgaatgacaatgctcggagcatccccatgtgagtcatcgacagcctcacactgaccatatgatgcaaccatccaacactgaggttatcctggaccagacacaacccaagtatccattgactgcgttatcatgcgcacacaggaccacgttgccagagatttacccgggactaacagtcatccaaggtatgagaaagcactggggctctcacgtacaccaagaagagaggtggatacccactcggaaaccacgtaccttggaagcgtcacaggcagagcctaacatacttgacactgggacctggaacacaccggaggacaaccggaacataatagcaccgcgccactggtacactaggacccgtgacaagcactaacgcccagaaacgagcagaaaccccacagcataggagacagagaaacaacccgcaccagggcacacaggaaagccatagtcggcagccacaagacacaccacagctccattgtgcggaaccccagaagatatccacatcgggcaagagcctatccaagacaagtacccagtcaacaactacacaatgctcaaatcgccaggataggagacaccctagacatggaatcggaaaacggccgtaagaaagggacgcacaggggagagcccatggggtaggccaacaacaacagaaagagggccaccatcgatgagagaaggagcaatcaaaccataggacggataccaacgccataagacagcccagcacaacaatgggaagggccagatgaccagcgacaccaaataacacacgagcaaaaagggactccagcgacctaagaggtagtcaaacaagagacgtaaaagacgacgacaacacaacaaggtgaaagagacaacaacagagactaaacacgagaagacaaagaccaagagacacaaacggacaaaggagaaaacagaaaaaaagaagaatgacaagaacagaacaacacgaaccagagctcaagtggactgcacgaacgagctacggaagcacgagatacgaatacagacagagagaagactgagagaacgcaatcgaaggaaacgacacaagccagcagagaggcacaaggcagacagcacagcagagcagaggaaaggagggaagagaacgaagagacagaggaaggcgacgagaacacaggaaagaagaagaagagtagcaggaagagaagagaggagaaagaaaagaaggaacgaagaagaaagggaagagggaacaacgagaaatgatggacacagacgccaagaggagaag

SEQ ID NO: 693305 - DNA, 197 bp, Homo sapiens
gcttctactcctatttttccccaagcagcaggacctacttttacccctttattaccccaagtacctagtatcccccccttggtacagcctgttgccaatgggcctgctgtacagcagaccctaattcatagtcagcctcaaccagctttgcttcccaaccagctggacatttggaaaaataaaactttattaaatca

SEQ ID NO: 693306 - DNA, 194 bp, Homo sapiens
gcctagaggacccgctgatcaacgttttatttccttcttgatgtactgcataaagttagagatacttcattggcttaactccagatgtttctgccagtgcgcggggaatagcttcaaatgcctcagcaaacttcttaatagcatactgttcaagtccaggacatgtctctcccttaagcggatcagcgggtacc

SEQ ID NO: 693307 - DNA, 157 bp, Homo sapiens
atgagcagaatggtcaatggctagttcttgttggctgatgtggctcaggctgcagatgtggccatctgaacaccggaatgaggctgagctgagcctcgtatatgtcccactgcacgggagccacagatggggccaccgctgtaaggatgctcgggcc

SEQ ID NO: 693308 - DNA, 635 bp, Homo sapiens
tggttgtttttaaataaaaggtttaaataaggggaaaaatttaaaaaaaaaaaaagaaaaaaaaaaaaaaacaaaaaaaaaaaaaaaaaaacaaaacaaaaacaaaaaaaataaaaaaaaacaaaattattccggcctctttgacccactccctttttaccccggcccacctcttcattggcccccaatttaccactttttgacccaatgcgcccttttgggccccgttcccatcgcattggccctgttttcccccctctctgctggggaaacccctgtttccccccaacttacaccccttcccgccattccctcttttaccaggtcgctgattactcaagtgcccccccctgtcggcccttcccaactttcgcccctcctaattggcaaacgcttttgccaagctttaaattttgggtaaaatccgcccaaattttgttgaaactcacctcttttttcaacccattgacccaatttgaaaaaccccctttttaatcaaaaaacttgcccccccattggctctggtttttcccccctgttctcaacaaagtgtccctttttcacacgtttactctcctccccttattgtgttcccgttttattcgggctttggctcacttcccttacttcccctt

SEQ ID NO: 693309 - DNA, 182 bp, Homo sapiens
agcgctcggaatcccagacagtacgatatagccactgtctcggatactgcgtaaaggacttgcaatgtcatcagtagtactttcgcatctagagccaacaatacctatacaaactccttcagcgtattagtgtcagtaccgctgtcaggatagtgcagctagtttagctagatataatccca

SEQ ID NO: 693310 - DNA, 202 bp, Homo sapiens
tgtattgagaaccagagtattaagaggggaaacgcccctgtttgtatctgtaggggtattttacattcaaaaaggtatgttggtttgcttttcaaaagtaaagtatttgggactgaattgcactaagatataacctgcaggcgtataatacaaggaaaaattgcaaaactgtttagaacgctaataaaatttatgcagttat

SEQ ID NO: 693311 - DNA, 348 bp, Homo sapiens
ttgaaatgtaagcattctaaccgccccagcactaagaagaggttcagttttgtaattggaacgcctgatgagcatctgatgagtggatccagaggttatcccctcatgtcgagttgatgatgatattttagcttctagacttgagccagatgacagcaaagggaagcggaaaccctgggtcactggttcaggaagacggccaggtttacatcaactttgcaacaaatctggtggcttggtttttcggttcgagaggctgcaccttttcttcctattaatatttgggtccggttgctactttacttggattgattttgcactctaccccactacacaacgtactctttg

SEQ ID NO: 693312 - DNA, 234 bp, Homo sapiens
cgcatgaggagtgaccacgtccgtcatctgtgtccctatcacctacatcaggccaccaatctatccgtgtgtgtttgttggacagagttaaccatgatgagcggccgaaggcaccgggaaatatgtaggagtttcgtgataacgtctaatgatattgtcaggctctaggctagtgtcagtcatatgaggtcagtctcagtccttggagtggtgggatggaaaccagacgggtga

SEQ ID NO: 693313 - DNA, 385 bp, Homo sapiens
  misc_feature (167)..(167): n is a, c, g, or t
ggcgctcctagaggatcccactctaccagaaaattaattttaaattaaaacacgaacaaaaaaaaacctttgttaattttatcacaaatgactcccaaaactagtatttggcctgaaccatcttattgcactgaaacctaacatctattaacatcctataaaatgcnccactggagcattcaggaaatgctggttacagctaaaatatattacttgagttgtagatgttcttttgtaaagtgactagaagaggccagaagagatggctcacgcctgtgatcccagcatttggtgggaggccaaggcaggaggaacaacttgagctcaggagtttgaggccagcctgggcaacatggtgaaacccccgtggggtaggcggtggtac

SEQ ID NO: 693314 - DNA, 316 bp, Homo sapiens
agagctactgacactttatgaggcacgcgactctagtactgcttttctttagtctgctctcctatttcctgtgtgaccttgttctccgacacataggacaattatcgagtagtatcatctcaaactgcaccggaaatagagaccgtttgaactatgctgcccggccatcatcctagtgcatcgtcggccctcccatccctacgcatcctttacataacagacgaggtcaacgatccctcccttaccatcaaatcaattggccaccaatggtactgaacctacgagtacaccgactacggcggacacgaatgttcag

SEQ ID NO: 693315 - DNA, 914 bp, Homo sapiens
  misc_feature (883)..(883): n is a, c, g, or t
gccctgcgatccatgcacaaactttggtccaagtcctgtgactatggcagaaagctcaagtgccaaaaggaatctcaattcgcacaccatcggtcatagctctcacctatctagccacttgtgaactctttcgacataaaggggattattcgctagagcagcgtgactgacattactcgataggcctgtgacatgaaagcactggacatagtctgtggagtacatgacccagatggctcttctgatgggcaggcgtcggcttgttacctctctggaaaacttctccaatcgccaacgattagatggtagatccagtggctggcataatgtttggaattcttgcaccattcatgggagtgacaagatatacatgtatgagccttttctccgcaagcggttcaccaccaaagttcaccctaggtaagtgtggtgtgtgctcgtctttgttttattaacggctacaacatttatctacttgatcaactttgcttttcattagtcatattttgacaaagtagaaaatttgagttaacaatctctcgatttgttcttttccaaagatgtctcgtctaaatctgtgtgtgctagtcatatgaatactcttgttctcttctgactagcttgtacgcaagttgatctctgtctgggaatccagatggaagttcccaaataactgtataagaggttatcagacatctgctaatttcggccatgtgccagtttatacagtttacggcaatatacgcagatgcaagatatatgggggaaatcctatattcagagtactgtataaatttttagtgtactgtgtgtatgtgcgtgtgattaccagcgaactacttaacaataccaactgctattgtaaatcgctattgtgtagttnaagtgtcatgcaaatagcatctaatgaatga

SEQ ID NO: 693316 - DNA, 431 bp, Homo sapiens
caacagtttttgatggcaggggttttaacgcttaacaccgggagattttaagaggggcagcccggtactcagagggagcgacttactcctctaaggcactagtctccctactgtcggcatattgccgggacagccaagtgactactacagtattcatggttgtcacttgggtaactcttgtacgcacgctactggtggaatcgactcaagcgtaattaattcagcataagagggactctgcagctctcacacaacttatccttgctcggctatgtggactactctcctcgcgccctagtgacaagtgtctcactatcccaagatgcacctataacgactcgctcgcaactcctcattcttacgcatgatccggcctacagcagtgtagtcccttgccgactgttcgagtattctatcctgctgaactggtc

SEQ ID NO: 693317 - DNA, 341 bp, Homo sapiens
  misc_feature (8)..(8): n is a, c, g, or t
  misc_feature (88)..(88): n is a, c, g, or t
  misc_feature (90)..(90): n is a, c, g, or t
  misc_feature (99)..(99): n is a, c, g, or t
  misc_feature (118)..(118): n is a, c, g, or t
  misc_feature (132)..(132): n is a, c, g, or t
  misc_feature (166)..(166): n is a, c, g, or t
  misc_feature (185)..(185): n is a, c, g, or t
  misc_feature (270)..(270): n is a, c, g, or t
  misc_feature (320)..(320): n is a, c, g, or t
ggcacgancgctgtcgagaatgagttttctgtccagggggttgatggtgaaggggtccagcacgcggatgttgatcttttttttcttnancagttcggnagcagccaaggcctcgtgnagggtcaccctatncccgataacggtcacctggtcatccttgctcttnaggactaccttggcttgtncgaactggaattactcattgttgttatagatgatggaattttctgggcgggtggtccggatgaagtatataccctttgtattggngggtagttccactgccttctctgtagaaacgacatcacttgggataaaanaaagttgatgtggggactgac

SEQ ID NO: 693318 - DNA, 662 bp, Homo sapiens
  misc_feature (598)..(598): n is a, c, g, or t
caggagagaaagagaataaaacaaacaaactgcatctcaccagaaaaaaaaaaaaagagagagaggccaggtgcagtagctcacgcctgtaattccagcactttgggaggccgaggcaggtggatcatttgaggtcatgagtttgagaccaccctgaccaacatggtaaaactccatctctactaaaaatacaacaaaattagctgggtatggtggtgcatgcctgtagtcccagctactcaggaggctgaggcaggagactcatttgaacccgggaggtggaggttgcagtgggcagagatcatgccactacactccagcctggccaatggagcaagactccatctcaaaaaaaaaaaaaaaagagagagagagagtccaggtgcgatggctcacacctgaatctcagaattctgggagccaaggcaggcagatttcttgaggccagtatttcgagaccagcctgggcaacatggcgaaatcccatctctactaaaaatacgaaaattagctgggcacggcggcacacgcctgtaataccagctactactactctggaggctgaggcatgagaatcacttgaacttgggaggtggangttgcaatgagctgagatcgtaccactgaactctagccgaggcaacaaagtgagaccatgcatc

SEQ ID NO: 693319 - DNA, 158 bp, Homo sapiens
agcgcatcagcacagccgcaggtccaccccaagtatctctgatcagcagatgcggggagctgagaattggcattttttttccgagacagggtcttatcctgtcacccaagctgcagtgcagtgcagtgcagtggtgtgatcacggctcacgtgtagcc

SEQ ID NO: 693320 - DNA, 475 bp, Homo sapiens
  misc_feature (327)..(327): n is a, c, g, or t
  misc_feature (344)..(344): n is a, c, g, or t
  misc_feature (353)..(353): n is a, c, g, or t
  misc_feature (357)..(357): n is a, c, g, or t
  misc_feature (373)..(373): n is a, c, g, or t
  misc_feature (377)..(377): n is a, c, g, or t
  misc_feature (408)..(408): n is a, c, g, or t
aaacatttatggagcaactgaaatattcaggatagaatgtttaaattagcgctggtctctgccttccttcctgcctgtgtgtttctctgttttgtaccctagcccattccggcaacgactatagagcatcacacttatcagatgatgtcataccgtgcccggatgaaagctagttctcaaggcactcagatcatgggcacaaaacaaagagggaaagatgtgtctttaagtcattcatttaggcactattaactgcattttcagaggggaacttcttatccatgtttatttcttcaaggattggaagggactcaggtggcaggcttntcgtggggtggacaggntggggctcnttcnttgtggtggttttttnctcnttggctgtttagggacggtaagggacccccntttttcttccccaccttcaacagggggctaacagttttgttaattttcaggataattttttaaaaaa

SEQ ID NO: 693321 - DNA, 453 bp, Homo sapiens
cgctacagttatgaggaactatatacaacatcatagtgtgcttgatgtcatatatcaaacttggtatcctagtgcttattgctctgacatgtatgactcttcaattgtaatgactatcgagactgaacgctgcaatattcaataaagtcacagtttcacttcaaaccaaacaaaatgatcaatcttctgtatatatcaaaatcataatatcaagataactataaaaatttaactaggatttatctgtggccaatgatggacccagtacaacgttgtcttatggcattctgtggacagtctttgtttgttccttctttactttcgagcttcttcttctgaaacatcttcttcatccgcctcttgttcctgctccacttttttcaaaggttgtgcagattctgataataatttttttgaagggtatgggtatggctgtggtctgcgcctttttga

SEQ ID NO: 693322 - DNA, 553 bp, Homo sapiens
aaggctagtacgaggctgggtgtgggggtggctcacgcctgtaatcccagcactttgggaggccgaggcgggtggatcatgaggtcaggagatcgagaccatcctggctaacaaggtgaaaccccgtctctactaaaaatacaaaaaattagccgggcgcggtggcgggcgcctgtagtcccagctactcgggaggctgaggcaggagaatggcgtgaacccgggaagcggagctgcagtgagccgagatgcgccactgcagtccgcagtccggcctgggcgacagagcgagactccgtctcaaaaaaaaaaaaaaaaaaaaaaaacccgggggctcaagtgggggggggggaagaaaggagggtattggaattgtggcgcgacagtgggcgcatagcgcgtggggtctccgtggagcccgaggctttctcttggggtgaccaacggggggtgaagactcttggcgcgcggtcccccctatattagggggaggctcggatattaaaatttccgagaataagcgcacagggtgtaacccgggcattataagtga

SEQ ID NO: 693323 - DNA, 425 bp, Homo sapiens
ggcgactcatacacggatcccgtcgctactgtgtgtacatataccagtcatagcatgaaaaacgggtatttaaatcccgcgctaagaatatctataataagtgttgctatctctatagagttttaaaactaatgttgacctcataatgttaaatcgctttacactcattgacactcgaaaccttttaccattactttgactcactccaacgttcgatagtacttccaaattcatttgttccctaagtctatgtgaatgatttactagcaagtatctctgcaacatcttgcgtgtctaaatttcgcagatgtgagtccctgagatcatgtgagtgaaaggaatttcagattgtaggtagccagtgtttttattgaactgattcctgctgcctatcttccttatcttagcactgtctttattctgcc

SEQ ID NO: 693324 - DNA, 461 bp, Homo sapiens
tctgatgttgctggcaaaatggcataaaaatgagtgctagctcaatacctgggttcatggaattatgattgaggcactacccttgtagtggcccggttgcagttttaatggaatgggtattaaaacatgtgctggatattgggcggtaagttgacaacagatgtatgttgacctgttaagcagatagcttgcttcataatgagacatttcatagctcatgactttatacgtctttctattttacatttacaacatatcttgaactggttttaaaaataatcagtattgatattactagtttgaaaattgtttaaagagagacaaaacagcaatatcaaatttgctgttgggtttgccaagatgccagatttttggggtaattattgaatgttaattgatttaaaaatatttttccaatttgggtgataatattcagtgtttttataaatccatttttgttg

SEQ ID NO: 693325 - DNA, 931 bp, Homo sapiens
cgtctttgttggagtgtgctgcgcgttcctgcaagccgtcgtgcgggcgttcacttctctgggtggttttcgtgcttcggccccttcccctcctgtggagggggtctgccttccccagctgccccccgcgggtgtcggcggccccaatttccgcgctctacgattccgatggggtccccccctgggccgccccatgggtcagattcttccaccccccgacgcaagtacttcgtgtggatccggtggctccatcctgcctcgctggcacctccagcacgatggtggattagcacgcaggggttcacgagtcgggcccctccatcggccaccccgccaatgcttctatacggacctcagcagatgcgtagcactttgctgcactgggttaatttgagaattagaaactttgcccctggccaatgcacacaccctcatgctagccctcccgaactgggataaccttcgaaagaaattgtccctgaaggcttgtatctgatatcaagcacctggattgtagaacttgttgctgattttgaccctgtattggagttaactgttccccctggtattaacgttggtcagggctgagtgttctgggatttctctagaggctggccagaaacccgtgtgttttgtcttcgcgggtctgtcagggttggaaagtcccagaccgtaggaccccgtttcccttcttagctgatgtctttggcccgaacacccgtgggctgttacttgctttgagttggaagcggtttgcatttacgcccgtaaagtattcattcttaatttaagtaaggttttttttgtaccccattctcgattctttgaagagatgaccaccaattttggttttctactgttatgtgagggaccttaggcccccgccacacgtccttgtgtaaggaaaaataaaagtgctgccgtaacccca

SEQ ID NO: 693326 - DNA, 190 bp, Homo sapiens
  misc_feature (29)..(29): n is a, c, g, or t
aagcagttaactacatgactcagtatcanaacaacaacaacaacaacaacaacaacaaaacaatgagcagcttgactaacatggtgaaacccgtctctagtcaaaatacaaaaaaaattagctaggcttggttggcgagtgccggtcatcccgagctacgtgcggaggttgcagtctgtattaaacttgc

SEQ ID NO: 693327 - DNA, 821 bp, Homo sapiens
  misc_feature (1)..(1): n is a, c, g, or t
ntgtattcgcccaccgcagcgagctgcttcttcctgctttgggtgggcgtttgctcgtgccgccccgtccgccgtggggtttgagtactacccgtccttttccttaggattatggggtgctcccccgtccttcgtcgggccgcttcaccgtccgcctctccgcccccctcctcatattcgggcgagctgcttctaggtgagcagtggtgcctcccctctctttttttttgtgtgtgtttgagtatgttgtagagcagcgcgcgctggtcgccgctggtggtgtgtcagcttagcttcatgttagtacaaatatcgttttcgaggagcatcagcgcgcggtggtttttcatcacagagaaaataagctgcccgtcgccactagagcgcgtgttttttgtgagagaccaacgcagagacgctggtagcatgctgctcttctgttctgtgtaggatattttgtagagagtggtttctcccgcccccgagagagaaatataggtctcaccgcgcagctggatacttggttggcggcggcttcatctatagataccctccatggccgcccgcccatttataaacaaggtttcgcgcacccactcgtgttagtttgtgtgtccttggtgacacacaagcgctgcgcacgcgctgtgtgtgtgagacaccgtcgacccacatatctctcttatttaacaccacttggaggcggtgcggcggtataaacacctccagccatgattctctcaccacctgttgtcttattctgggggagtgagaatgatcgtttagcgcacaaaacattgtattctccacaatagcaagaa

SEQ ID NO: 693328 - DNA, 931 bp, Homo sapiens
ggtttcattgttccttccgttgggaccatgcccgttggttaaccccccgagagtgtttcacccatatggcgtcttccactgggtgtctcggcccgcttcttgtgggactcgcccgccagttttgcgtcgacgcgtttcaagtgtcccgttgcgggcccgtaaatttccccggtgttggcccattcgccccggggctggttcccagggagcacccagcggacccctgtgtgctagtttctgcgcctcccaccccttgacggtacgacaccgcgctgtgtttgtctccggcgaggttcggcccccccacttccgtcgcgctcgggtgatctctatggcccccgcccctgcctttgtagttccccccgcggcaatgtggcgctcctccctttcctcagatacctggggtggccccctagggctccttctttcgcaccccttggtgtgacctctccgggggacccccccagtccgaaccacatgggttattcgtctgtctaagcccggtccacgagtccggtacgatacgtctgggggccctcttcgtcttcatttgctccttctcccgtgactcgtccacccatgaggaccacctccgggcacagcttttaccaatcaatctgtacaacgtcgggccgcttgccacacatacgaaatttgtggttcccaccccgatgcggcaaagggatgacagatagtgacgccccgtccgtaagacacctactctggagatggttgcgcaaaccactcgcacgagtgggggcgaaatccactcctacgcgtggccgcacacccgatggctcctgctccctgatgccgttggggctacctcctctcccgccccaactcccgcaccatctgtacccctagctctttttcctcaccacggacccccaaaaagaatttctttttttgggaccccccaaacaaaaca

SEQ ID NO: 693329 - DNA, 342 bp, Homo sapiens
ttctaccccacgttggtcaacctctggtacaaccccctactttctgtttctacgagtttgacttttttagattccacatattagtgacatcagcatttgtctctctgtgcctgtcttattttacttcacaaaatgtcctccaggttcaatgttgtcacaaatgacaaaatttctttcttttaaagattaaataataggccaggcatggtggttcacgcctgtaattccagcactttgggaggccaaagccagcagatcatttgaagtcaggaggcggaggttgcagtgagccgagactgcgccactgcactccaacctgggtgacacagcaagactctgtct

SEQ ID NO: 693330 - DNA, 112 bp, Homo sapiens
ggcacatgtgcggcttagatgtaattaatcttgtcactatactcctagtaatttccagatttgtttttagactggaaatacaaagatgtatagtgcatgttttttaaagaag

SEQ ID NO: 693331 - DNA, 683 bp, Homo sapiens
agctagcagaagaaaagaaatacctaaaatcagagtagaacggatgaaattaagactcaaaaatttatataaagaatcaacaaaaccccaaatggttatttgaaaggataaacaagatcaatcaactgctacctagattaacaaagaaaaaatgagagaagatccaaataaccacaattagaaatgacaaaagtgacattgcaaccagtccttcagaaatgcaaaaaaatccttagagactgttatgaacacctctgtgcacacaaactagaaagtctggaggaagtggataaattcctggaaacacacaagatcccaagattgaatcaagaagaaatggaagccctgaactgaccaatattaatttctgaaattgaaccagtaataaaaaaaaagctactactactaacaacaacaacaacaacaacaactctatcagatgtgcaaagaagagctggtaccaatactactaaaactactgcaaaaaatatcaaagagtagcgactccttcctaattcattatatgaggccagcatcacccttataccaaaacctggcaatgacacaatgaaaaaagaaaaccacaggccaatattcctgatgaacatagacacaaaaattctcaataaaatactagcacactaaatccagcagcacatgaaaatgttaattctccatgacca

SEQ ID NO: 693332 - DNA, 174 bp, Homo sapiens
ggtcgacctcccataagaattttcatctgttggccaggtatggtgtcccacacctgtaatcccagcactatgggattacatagtgcccaagggggcagattgctgaggtcaggagttcaaaaccaggctgaccaatatgatgaaacactgtctctactaaaaaaaaagtcgacg

SEQ ID NO: 693333 - DNA, 135 bp, Homo sapiens
ccccctccccgggtagggggggtgatcataaaacactctttacgccgggttttattgacttgggttaatcgtgggaccgcggtggctggcacgaaattgaccaaccctggggttaggatagcttagataaacttt

SEQ ID NO: 693334 - DNA, 214 bp, Homo sapiens
cgcgaaacctgcgctgacacggatgtagagcaaagcaatttattttagcgtgtatacaatatctatatgaggagactaactacttatttaatttttgaaggacattcttctcagagacagagtctcactggagagctcagcctctgttctgaggaagtgatcctaggctactggacactgactcgcgtgggaggaagaccatgtggatggggca

SEQ ID NO: 693335 - DNA, 879 bp, Homo sapiens
cagctgaaccactatcacgaaataaaactctacctctctatactaatctccctacaaatatctccttaattcgatacacattccacatgatcaccagaacaataatcgaatatttaatgtcttcttctgataagctagacttatctcccaccttgtgcttatcatctacccgatgaggcaaccattgccagaaacggctctgagcgcaggggacatacttcctattgtagacccgtagtaggctccgctgtgcgccctactcatcgaagttaatttactactcacaaatatcgcggttaggcgtcatcataatacattcatacttactcacatctcactgcccaagaacatatcgataactcctgagcctatcaatttaatatgacatagcttacacaaatagcttttatagtgaagataccatctttacggactccatttatgattccctaaagcccatgtctgaagcccccactcgctgggtcaatagctacttgaggtggtactcttgaaactaggcggtatggtataaatacgcctcactaaatcattctcaacccgctgacaaaacatatagctatccccttccttgtgactatccctatgaggcataattatacgaagctccatctgctacgaaaacagatctaaaaatcggtcattgcatatctcttcaattcagccacatagccctcgtaggtgacaagccattctcattccaaaccccctgaagcttcaccgggggcagttcattctcataatcggccacggagttacattcctcattacttaattctggcttagcaaaattcaaactacgaaacgcactcaccagtccgatcataatccttctctcaaggacttcaaaattctatccca

SEQ ID NO: 693336 - DNA, 112 bp, Homo sapiens
tcgcaactacaagagcgagctgttacggatctggggtgctgatgcatcatctgtgtgtgcgccagatctgcgctgttattccggagtcccaaccaaaggagcaatattccct

SEQ ID NO: 693337 - DNA, 104 bp, Homo sapiens
tcggtggttagtttctgttcctgtgttagttgctgaggatgatggcttccagctcctgaaagggagaggccaggtagttctctgttttcctcaaccaccagtca

SEQ ID NO: 693338 - DNA, 663 bp, Homo sapiens
tactttgccatataactttgaacgtgcaccccattgtatgtatgtgaatgtatttatgaatttatatacctgtaagaatagaccctattccttatccataattcaaaaatccaaaaatattctgaaaacagttataactgttttgatggcaagacctgagctgaactgctttagtatttttagttgcttttataccaacttggtacatttttattgcatttaacattcctatgtaagttattgcagtattaatgtttgtggctttttcatgctgaggatgtaaggtaatacatagtatacatactgtatcacctttcgaaaatccaaaaaatcctgaattctgaaacatattgtccacatcataaaacttgcacagaaaaaaaatgaaattaaaatagaagaaaaaataagacactatggtattctgctgggcaccactggcttgtctggcccttcccatgttggagacactgccctagatatttgtcttgtggaactgaatttctgctggcatatatccttatgcctgtaaaatttgctaatctaacctggcttagctcctcttgaagagcccctctaggttcttatgaattataataattaagttaagtagattcaaagtagtcaggaaagctgtcttatacctcatacccttgcagtgtg

SEQ ID NO: 693339 - DNA, 278 bp, Homo sapiens
gtcgacaaatattatttgagttcttggcttacataaggtaggccctcatagtcttatagcccctgtggctctgattcagtgaagattttgggacttcttgtaatgtaccctgtgatttttcattgatactcttagacatggctaaaaattagagagtatttagagatggggtttcactgtgttgcccaggctggtcttgaactcttgagctcaggcagtctgcccaccttggcctcccaaaatgctaggattacaggcgtgagccaccgtgcctggcc

SEQ ID NO: 693340 - DNA, 755 bp, Homo sapiens
cagtctttattctcaggctcactgaattaaacccaggactaattccacagcacaggcacaagaagcctgttgtgtagtgtactctgccagtaccttggatttaggagctccatggggaactgactaaaccaggagagagaggatttggagctagtcagtcctggtaatctatgaaatgctcatttatacccaggttcattaaggtttccaattctattagcaaaccacaggcctctagaggtgtcagagatatttcctatattcatgacagtgtcctcttgtctatgatcccgatgacccaacagttgacacgttggtaacggacttttctacagtctgaacacaacctaaagccctctttcattgttcacacactaactcctactgccgacgaaccgaaaaataattaatgcagaggagatttatgtcttagccataactccagttgtacaactcaatcgccccattctcttttacggttcaaaatgtactgctgaccttgggttagtaacaagtaatagtccgtctttcctgttaggatttataaggggacttttggtagtctaacactctttaaccttttccttgccgtgtactgaggaaagctacagctgttatcaacttcttattcctacgatacctaacacgggatctcagtgtcaggaagaacccatcattcactcacatactgccgtgatgtgacttacctcatccactcacattgcactatggtgcctatatcaaggtaatgaccc

SEQ ID NO: 693341 - DNA, 870 bp, Homo sapiens
gagattcaggagactaacatgccccaggtctcacgaggatcagagaccccagaggccaggaaggagatcaaggtagtcaagcgggggtcgtctcagaatctggttgtgctcgagctatgcaaatgcctctcacggagatgcgaggacctatctattatgatgaccagggcacatccggaagggggcgaacagactttacatctatcagcccttttcaaccacctgatctactaaactggaaacactctgaaaccctgacatcttgctcctggtatcagagagccctgttcgtgcataactgtgtagaaagtgtaggaactccggtttacatccagacagacctgatctccgggacagccttggggcgatcagtagactgaaagctatatgtggacaggagacagttcaatcaacccacacggagagagatgtgcgggatatgtggtggaacgcctggaaactgtcgttgaagaccaggatcgttgctccaaaggcactagcaaacccagaaagatgagctcattgctttaatttgggcctagaactcccgccaagggaaagaataatgcagcgatttacaactgactcgcggatgccaaactaacacctccaaaggacggagaagtatatataggaacagggacgtgaacccgggggacggacacaaaggaccggaggatgaacacagaaccaagggtggagaggtcacacagagcgtaggcaggggcacaagagggaaaggaagacaacacaaggaagcaagacggcaccggcgacaagaaggcaggagaaaacaaacagcaaaaacaaggacgcccccgacccagcgtagacggagaggccacaaagaaggcagcgcgacagacggga

SEQ ID NO: 693342 - DNA, 445 bp, Homo sapiens
ccgcccacgcgtccggtttaagaagtaactatttggaaattctgaagacacataatttgccttttctgaaccttaaaaaaaaaggtacttctgtcacttataattgttttagctcagtaagctattttttttcaatgtgaatctcttttgagagctgaacatgtccattcttaaccacatttcaataacagttactgtagctaaggagctaaatagtttcatggattaatttttttcagaataaatttaaaatatccatgattctgatagtgggcacatgaccaaaagaaaaaagtaaatcaatatatttagccaatggtacatttactttgttaggaatgtaatttatgttcattatagaaaagaattagaagaaaatttcaagtaatagaagataagtaccttcccaagtgaataaatactgcatggaaccactcaaaaaaaa

SEQ ID NO: 693343 - DNA, 408 bp, Homo sapiens
ttcacccatgttcctcaggcattgcttttgcatctgtcatgctagggtcagtctgtgttgcagtaacaagcatcaccaagcctaagtggctcaaaacagcttcctgagtactcagcactgaccgtggctgtgtcctggctgagagaccagcttgcctggggaaaaactaatggctgacagaaatattcaggaactggggcagtttctgcctggaaataggtgatgccacgcctacctgcatttcattggctagggtaaagtcacatgacctcacctagggcattggtcccagtgtgtgatctttatcaacccgcttgccaggatcagtcagagtgggccccagcttgcttccccatggcggaagagcaagctctgtctgtctccctggttcacaggaccgggtcagtt

SEQ ID NO: 693344 - DNA, 114 bp, Homo sapiens
atcctccgcctcctggctccgtgtcctcggcctttctggtgcgcgcgatgcgcttggagcatcgcgtggtccaacagcctggatacggaacggtttggacggcaccacgcctct

SEQ ID NO: 693345 - DNA, 119 bp, Homo sapiens
cacagaggaggcagtggtgggccttgttggcatgctggctcgggagctggcttacaggagggcagctctgcagttgggaggggcacctgtccggagtgagaccagtgcctctgtgctgt

SEQ ID NO: 693346 - DNA, 337 bp, Homo sapiens
gaccagtctttctgatacctatgggcccatctcctcacttaatcatgcatctatggggcccattctatggtagtagacacacacaggatccattgttttacctttctacaaactattccatatgttaaagctggccataatgtaatataaccattcccctgtatataggtggcactctccaacttagagctataaacaatgtttcaacaaaaactcttgtacacaaagtaccttgtacacaggtacaattctataggagtagcatagctagttcacagagcttacgcattatgcactatagatagaaaccgtccatctgacccatctcggggatcct

SEQ ID NO: 693347 - DNA, 654 bp, Homo sapiens
gctaacgataaaggtcaggaaaaaaaaagaaaattgtatgtaaaggaatgtctggagagagttacacaggaacagaaaggtccagcagcggtttctacaaccaatcatggatgttgatataggatgttattttgaagagaaacgctatgcgacaaactgttagacttcatcagatatgacgttaaaacacctaaaaagactaaatatatactacaaaggcctacggcgacagatgaagagagtgtacgattacaaaggttttaccaattaggagtagatctaaaattgaagtattccaagcggaggtcattgaagaagcaagggcggatcaagaatgctactgaggaattgctgcgattagccaatgaacagttgaaacttttcaacagaatagtagaaagagaaaccaattggataatttatccgctgtgggtaatggctaaacaattaattcgtctggcaaacgaatctagtgaacttaataaagactcaattgaagaatgcggacgcactatccatagaagctttactatatgcctcaatgataggaacccaagattgaatgaaagtaaaaaaatcgggtgttatatgtttgctaatctagagttttccatctaccatcggttaagtaataaagatatgattaaaaattta

SEQ ID NO: 693348 - DNA, 337 bp, Homo sapiens
cctagaggatccctgctgtgtacactcctacggtcactcttgcaggtgtaaagccatttaccaacgattgttcgtaggtaatgaacgtggcacatctagttagagaaattgtgaaaatatgttgcactgcgcagcacaccatagaatgggctacctgcaatgaggcaggggctggaggaaagttttatagggtcctgctgatgggtgccccgtgtggaatgaggtcattgtgcccgcaggttgtttgtgattagctgtttctaacaattgttcatacaataattgtccattattgttctcaacttggggctctccccagcctggggacccttcctta

SEQ ID NO: 693349 - DNA, 310 bp, Homo sapiens
aggtaggatccagaagcaacaaaggggacagagatagtggatctgtgtatgctaacagaatgtcaagaattcagctcaattttatactgaggtggtagtaaagagctaaagcaaattgtacaatatctcgcattcagtagtatgaagcatcacgaaggaacagtaatacaagattttcccttcaaaaatggctacaggaaaaggattttattttctcctgcttgggacaggagagagggtccaggcgcctggaccctctctcattcctctcagagttacagtatgatggctgattttgtttattgagcag

SEQ ID NO: 693350 - DNA, 2070 bp, Homo sapiens
tcctaaggtccatgggtattttttttcccccggggaacaaaatatatatgtggaaaaaaaatctccaaaaaggaaacaaagcagggttgacaaaatatgacaccagggcagcgcgggctctcaggagttcaggatagaataaagtgggcgtgcctccacaggggaccgtggttcagtggcccgtggttttcgtgggactccacatttgtgccccgttctctaaaaggtgctccactctcagaagggtggaggagtggaaacagctgagggtggaaaacggtgctgtgctctacacaagagaacaagagtggactctcacatatccccagagaggacaccgagggacacaccaaaaacctctcccctctgtcagaaagtgggaggataacacgagaactaagaaagtgagagaggggcctagaagtgtgtccacagaaacaaaccgtgagacagtaacctaaacatagggaggccacacgtggtggacgtgcgcaaacacggggccactggaaccgggggggacgtaaccggggcgagaacgcacgttctcacaggatacaaactgggggagacaacgtccaaagctcccaagaactcgagcgcccgaggggggcaacctataatacacccacaagctagcgtgttcatcaaggccaaataaccttccaaagggacaactgcgggccattacgttggaattcaacaaagcgcaaaatcttgcccccaagaagaggaatgcaatctccaatgcccaaaattgacatggggaaataaacccctggtacccaaaagaaccggacacactcaaagaaccagaatggggcaggcgacaacaacaagggggcccccacacgcgtgagcaatgtgacacagcacccagaagcgaagaaaaacatcaaaacacgggtcgcggatggatggattccttcagcgtcggtccgggaaacaacaacacacccgtcaaaggcgacagactaacgagcacagagcaacgggtcccaccacgagactcccgagaggagggcccaaaagaacaggaggaattgtcaccaatttgcgtggcgctgtctggcggcgctgcttgtcttccttgctctccgttacctcacaccgactaagctaataaaaaaaaaacacaacacaaaaacaaacaaacaaacatcaaacaacaaaacgaagcaaacacaaaacaacaacaaaaaaacaaagagaaacaaaacacaacacacgtacaagaacagacaaaacgaacgaaactacaaaacaaaacacaacacgaaaaacagaagaatcaaacacggagagcaacaccgacgagaccagagagaacgagcgaaagaacagacacaaaagcgcgacagaacacacgagagagaggaacagaagcaaagaaagcaaaagcaaaaagcgggagaaaaaacgaggacgaaagaggaacgaaagagagcataaaaaaagaaaagagaacgagcgaaagagaaaaaaaagacaagacaagaagaggacgagaagaacagaagacaaagcagacaagcgagcatagcatgagcgcaaagagcaatgagagcaaggagaaggagagacaacaaacgagaaacagaacgaaaaagatcagacacatacgcacgcaaacgaggaccaacaaagcagactaagaacacaagaagagaaaggaacgaaaaaaccggacgaacgaagaaaacaaaaagaacaagcaaaagaagcaaagaacaaagagaaagaaagacaaagacagaaacaagaaacacacacagcagaagaaagacaaacacagacacagacagagaaacacgcgaaaacgaagaaagaaagaaagaagaacaaaaagacaacaaaagaaagacgaaaagagaagagaacaacaaacaaaacaacaaaaaaaaaaaagagacacaacagacacaaaaagaaacacgaaccaaaacaaaggaagaacaaacacaggaacacaaaagaacgacacaagcaacagcacaaagcacaaaaaagaaaaacaaaagagaacaaacaacaacaaaaaacagaagaataaaaaaaaccaaaagacga

SEQ ID NO: 693351 - DNA, 989 bp, Homo sapiens
tctacatataatgagtgacgcttctggttgcatatcttagagtgagactacctatgaaagcgaccaagcttggcttcctcacagcaaacctcaaaacagttactcataaataggagtacatagtctatctgaataatccgaccatgtatctcatcgaagagttctgtcactcagccagtccgcacatatcttcaacttgtccaaaattctaatgctcgtactgagacgtatgaacaacatgcttggaaacggtcacagcttcttatgtcagtggtgtgtgatacatctccttctgtgcaagcaattccataacgcgaattgatcacatacatccgtaaagagatagcttgttgctgagacagtgcttgtaccaacatagcaccagtggcaagcgcataccttatcatcataatgtgccgaggcctattggtctccggtagtcgacactttgcaacggtctctgcggctcacaactcgtcgggcacatcgcaaacacgcaacgacgaatttgttgattcctgtctggcaaatgaatagaaacacgaggacacagtcccatgagcagacagtacttgtaggaaattaactcctaaaaggggttcacacacttccatccatgcgagaggacacgccttaggcaccgcagaaggcaccatcgattcgcacacgagtgccttgattgacttctcacgcactatcttttgactaactttcggaatatttcatgaaaatgaacaacaagtggacgagacagaaactcaattcgaacagtgacacgttcatattaatccgaacttcgttatttgacacaaaaggttctttggcccggtgggactaccaatgttgtggcttcaactggccctttggtaataattcaccacaaaagcacctattttgtggggaggcggccaaagggaagcggctgggattccacgctggcacgggtacactggcagttatcgaagaacccaggcttggcccaagcatgg

SEQ ID NO: 693352 - DNA, 200 bp, Homo sapiens
gcttattgacggtgtctgtttctacaaataatttttaaaatagcctagtgtggtggcatgcacctggagtccctgctactcaggaggctgaggcggaaggattgcttgagtccagcagattgaggctaccagggtactactgtgagccatgattatgccactgcacttccaggctgggtacagagcaagacccttgtcac

SEQ ID NO: 693353 - DNA, 84 bp, Homo sapiens
  misc_feature (32)..(32): n is a, c, g, or t
acatctgtgtacttctgtgccagcagtttaanggcagggggaaatggctacaccttcggttcggggaccaggttaaccgttgta

SEQ ID NO: 693354 - DNA, 926 bp, Homo sapiens
  misc_feature (52)..(52): n is a, c, g, or t
  misc_feature (65)..(66): n is a, c, g, or t
  misc_feature (117)..(117): n is a, c, g, or t
  misc_feature (122)..(123): n is a, c, g, or t
  misc_feature (137)..(139): n is a, c, g, or t
  misc_feature (149)..(149): n is a, c, g, or t
  misc_feature (153)..(153): n is a, c, g, or t
  misc_feature (156)..(156): n is a, c, g, or t
  misc_feature (192)..(192): n is a, c, g, or t
  misc_feature (195)..(195): n is a, c, g, or t
  misc_feature (200)..(200): n is a, c, g, or t
  misc_feature (202)..(202): n is a, c, g, or t
  misc_feature (295)..(295): n is a, c, g, or t
  misc_feature (318)..(318): n is a, c, g, or t
  misc_feature (323)..(323): n is a, c, g, or t
  misc_feature (347)..(347): n is a, c, g, or t
  misc_feature (531)..(531): n is a, c, g, or t
  misc_feature (540)..(540): n is a, c, g, or t
  misc_feature (601)..(601): n is a, c, g, or t
  misc_feature (607)..(607): n is a, c, g, or t
  misc_feature (628)..(628): n is a, c, g, or t
  misc_feature (684)..(684): n is a, c, g, or t
  misc_feature (732)..(732): n is a, c, g, or t
  misc_feature (756)..(756): n is a, c, g, or t
  misc_feature (766)..(766): n is a, c, g, or t
  misc_feature (791)..(791): n is a, c, g, or t
  misc_feature (805)..(805): n is a, c, g, or t
  misc_feature (821)..(821): n is a, c, g, or t
  misc_feature (825)..(825): n is a, c, g, or t
  misc_feature (857)..(857): n is a, c, g, or t
  misc_feature (910)..(910): n is a, c, g, or t
gcccccgctggcgtcatcgagaagggggggaaaaaggccggacaggacagancgaaacggaaagnnaggaagaggccacgcggacagggccaggacaaacaaaaaaaggcaggagcnaaaannaaaaaaccacaaannngaaaaaaccngggnggngcggagaaaacgaaagagggagcgcaccagcaacancgnaacananaaaagaaggaaaacccgggaaggaaaaaagcacgaggggaggagaaaggggggagaaacggaaaagggacaaacgagggaaaaccgggaagcncggacggggcagaaacgacacanagggngcaggagagggagagggggaacancaaaaagggaggagggaggaagcggcaggggagcgagcggcgccccaggccacccggcgccgaggaaaaccggaaagggaggagagagggaaccaggcgaaggcgggcagcagagccagggaggggaaccggccgagcaggaaagccggccacggggggcccaagggggagcggccccccaaanagcgaacgnagcgcagggagggggaccccgggacaccccaggaggcacccaagcaaagcggggggaaggnggaagncagaaaaaggagggggaacanaggcagccaaaccggcacggaagccgggggggccaggcgggaggggaaaaggaaangggggcagggccaacgggggcaccgggggcaaagcgggcgggggaagngcagacgggccgggaaggggaganaccgcgaaangggggcccgccaaggcaaaggggangcacaggaaccggnggggggggggggaaancgcncacgggcgcggccggggcggggaccggggcgnaccaccggcaaaaaggaacggaaaccgggacggcgggggccgggacggaaggngcacccccgggggggg

SEQ ID NO: 693355 - DNA, 163 bp, Homo sapiens
tttttaaaaaaaattttgggggggggggggggggttccccccccccaacccgggtttaaacccaaaaatttcccctttttttttttgggggggaccccggggtttgggggcccccccccccttggggaatattttttttttttaaagcccccccccttttgga

SEQ ID NO: 693356 - DNA, 402 bp, Homo sapiens
cggaccgaaacttatagtggtaggaacgaagtcctggctttgcgtttcagcgtaggcggtggccgtgatgctgctgatggccaaggccagaagcgctttgctgctcagtttcatgggtgaagctcctttggttctcttttttaatgccggtctttttgggtgatccggctattgggtgtggaactcgttcaagctattgcaaacgtttggcgtaggaaatttcccaacaaaagcctgcacgtttgccggggagcgtatttcgctccccgccatccggttattttcttatgggttgatgctgacgcccgagaacacgttgcggccgaaggggcttaccttgaagccttcgactttggcgcttaacggctggttgaccgtcgagtggcactataagtttcggcc

SEQ ID NO: 693357 - DNA, 163 bp, Homo sapiens
cattctgtacttcccatgagcaggagagtcgagtgtatcagtgcaggcatccagcagcgggcgcaggctagccggagtagggggctagcagcttggcgctggttacttggtgacgtgcagagctctctactggggggctgcagctcagtcttgtggggagctt

SEQ ID NO: 693358 - DNA, 417 bp, Homo sapiens
agtggaccgaagctcgtccatcagatacaggttattttagtttctgttctgtggaaagtgtaaagcattccaacaaagggtttaatgtagatttttttttggcaccccaggctgtgatggctaaaggtaacagtctgatgggagcaagatgcccatctggcgtcccatcagggagttctatacatggacctctggtgggttatcaaaacagaagtccaagaggtgtcacacaatgacgctggttggatggtagctgatgggagaagacgggccatcttcgtcccatcaggaggcttcactgagctgtgatggcgccatggtgctccagcctgaggaagagaacaagactctggttacaaaagtttcatccacattttctttggggaattaatagtatccggatgggacgcaagacgg

SEQ ID NO: 693359 - DNA, 1604 bp, Homo sapiens
  misc_feature (191)..(191): n is a, c, g, or t
  misc_feature (300)..(300): n is a, c, g, or t
  misc_feature (487)..(487): n is a, c, g, or t
  misc_feature (1431)..(1431): n is a, c, g, or t
attttagttttttttccaaatggaatatttaataaacagggtagtggccttggtaacaggtgcacacaaactcgcaacacttcaaaaagggatcggccgtgggggacaaaatacactcaaattatgcctagaggggcaaatgtgcaagaaatcaaaaaaatcccggggagggtttccaattaatgggtggngcgacatttatgtcccactatcaatttaacaaagagcctttattggcgccaatatctgtgctcccagaggagagagccagagagttttgtgacagagtgtgagagcggnccataaggggacacgaggagacactctgtgggggcgccaacaaaaagtatctcacacacagaggtgggcgccatataacgcgagaagaggctctctctcagaatatagtggagcaaaagagggctgtggcgacataataagagtgtggtggccactatatgtggggcgggtgggagaaaatatctcnctctctatgtgtgtgccaaaaatttagtagtggggggagagaggagggggtatatcactcacagagtgggggggcagagaaaaaatatataagagagagaaaggggcggggtgtgtgagaagtgagaaggggtgtatatctaggagaaagtcacaaaatatattcctctcacaacacagagtgtattcgtggtggggcaaggggggggctctatttccagagagaaaaatagtgggtctataaaagtgtctataattctctggtgagagacaccccagaggtgtttctcccagacacactgtatatctcccacaaagtggggcgcaaagggtggtctctttgtaaacccgctctccaaaattctctccttatagagaggggctgcgaaacaaggagaaccccacaaatctgttggaaggggggacaagaaggcgtccttttttaaagagagaggggggctcccacaccaaagaggaggggcgcagcaaagtggagggctactccccgggggaggaggtggaggacccccataataaaaaagcgcgacaaaacacacgaaggggggccaaaaaacccgtgaggaaaaaccctctggggtggttcactccacaccaaaaaaagcaggcggggggggagccaacggaggggggaacacccaatcacacacacaaaataatgatcagacacctcaccccgggggagaaatatgtagggggggagcctaaacaccaccaaaaagggcgcgcaacgaaaaatcaaaaagaggcggggcggcgggggggaataagattctacccacccaaacccctgcttcccccgcctaccaaaaaaaacaaacacaacgggggggtgcaagtatggcacaccaatcaacttattgtgccacggagcagaaaaccgcgcgcagacggaataataataatataagaagcgccgcccggtgngtggggggcggacagcaaaaaaataataacgagggggcaagaacataaaggggggacagcgcgcccccaaacaaaatagagaaaactcaccaccgaactaacaaaccgtgagaggggtggccgacactcaacactaaaaaagtagggtgatggcgggcgggtcgactccatag

SEQ ID NO: 693360 - DNA, 550 bp, Homo sapiens
tctagaagagatcccgtttccgagagttagaagcagggtgaacatggactgccaattacaggacagacgttagtaatataagtcgtagtgtgagaatagcaatgtagctacttactccatctgattcccacccactgacttctatacagctctctggatctttgtcctatttccctggctctaatagcaagattaaggtcccctcttcctcagagccaaagaaaaacaattgagctgaggtctctcatattccagttattctaggtcgttgacttggaaaaaccctttgggagtttttcaaatatttgcagattatctttttgaaatccacctttaatcatttttacttgtaattgttccagatattttatagccttgcctacctcagcaagcagagcatataacacacagttataattttgttttaaaaggcaatgtggaacacaggctattgaaataaatctaaagtctacaactgaataatttttgaccttgtgcaagacacttagcctctatcagcccatttcttcatccacaaaatgggactctt

SEQ ID NO: 693361 - DNA, 1173 bp, Homo sapiens
  misc_feature (315)..(315): n is a, c, g, or t
gagaactagtctcgagtttgtttttttttattttttgcttttaaaccaacagctttaaatggcaaaaggtaaaagaccttcattacaaaaaactttaataattaagcattactttcttgtcacatgtgggtggaaagttcttataccgagcttgggtaggtattccgtagcaccgttgaaacactttcactaaagtagctcagagccatctcagaacgccgcatggtggcgtgtgacgaggcgtgccgtgccttcccatcgtgctctcccgtgggaccactctccaggggccagccactagccctgtgttctccncgagaaggagaagacgcttcgaatgctgtgacccctgtgtgcaccctgtgtgtcccccgaatgtgatgtggcggggagacgcaacgtgcggcgtgaggctccccggtgttctatgtgcccttgtgggtgccctcccttcactttcgccgcagaaccgcctcgagcaatttcggggttcatctgagagcctctttcccccacaggtgtgggagaggtgtgagaaggagacaggggcgaagagacttgcgctaggactccaaaccgaattttgcttccgtggagaggtgcgttcaacaccatcttgtgggggagcacacaagagaaatgtcaatgggcagaaggggagaaaggccgttggctatctggagaatcatacaacttcgcgggggcacattaacctgggtgggaaatagcggactacagaggtgatatcagtcggaaaagggggcaacccacagagaagaaagccaatacacacgtgggaaaaaggggggttcccaacaaggagagactgtgggagaaggggtatacgaccaaggtgtgtgaaagaaacacatgggggaaaaatgacaaacaacagagacacgtataaaagagggagcagcgctgtggacaacacaaagggggtagaaagtccccccgagggggcccacaaagagtcagaaaagcccagcatgggggaaaagccacagagaggagtcccacaggagagaaagccgacaggagctcaccaaagaaaaaaaagagtgcgcgccaaaagggtcgcgagacagaatcaacagggtctgtggcaaccacctgcaagaccccaagagatagaaggatgaccacaataatcaaccaaccaaggaagggggc

SEQ ID NO: 693362 - DNA, 156 bp, Homo sapiens
tggtgactctacaggatcccctctctccacactggtgaacatctattggttcatcccaagtcactaagcatatttttattaggtacacctgtttttccttatacagctgtttctggagtatagggtcgcatacccataaacccagtgtggagagag

SEQ ID NO: 693363 - DNA, 200 bp, Homo sapiens
ttcattctcatccctttatttagagcctatgtgtagtcttatgcatagtagatggatctcctgaatacaggagaccaatgggtcttgtctctttatccaagtttgccagtctttgtacttttaattaggggcatttagccccagattacacttgaacgattaatactggttatagtgtgaatctagatcctactcatata

SEQ ID NO: 693364 - DNA, 414 bp, Homo sapiens
tatcaacccaagacggaactcggtcaaactggctacagaaaaacgcgaaatggctctactacaacggtgtgccgctactggaacgggtacaataacgcggtgccgaagtattcgctcgcggttgctcttctcttcgttcctgatgggcgaaatcgctgcggcgactatcttcaagcaaatgcactacaacagccgcgaactggtcttcccagaggcgttccgcaacatcgggcgcgacgaagggcgccacatggcgatctgcatggcgttgatggagcgtgactatccgaaactccccgtcgaggacaaagcgctcgtcaccaaacagatccgcgctgggtacctcttcctctcggcggtgctcttcgaaccgccgatggagttctaggatctgcccgaagacttcatcccgac

SEQ ID NO: 693365 - DNA, 808 bp, Homo sapiens
ctctggttacattacctgacagacaagatgctgaaacaaatgaccttcaagactaaatgtaacactcctgccatgaagcaaattaagagaaaaatccaggagttccacaggacaatgctgaacttcagctctgccactgacttgctctgcagcacagtctgtttaagtaagctaaatgtatcttactgccccgaaatgagaggagactgtcttgaagcctctgtgctgtttcaacctccgtccccacaggagggtggaactcccattctcacaggtttccagtcagcttttcaaacaagaatttgtttccaaatggaaatgaaatattttgtcgaaagtgtttaacattgtgctgataacaaatgttctgaaaggaagtaaactagccgggcgcagtggcgtgtgcctgtagtcccaagtagctgggactacaggcgcccgccacacgcccggagaatttgggtatcagtagagacgggttccaccgtgtaagccaggatggtcctcgatctgctgaccttgtgatccaccgcttggcctcccaaagtgctgggcatcaacagggtgtgagccaccgaacctggcccaatttgtggttaatatttcctcaagggaggaaactgacaggtggtttaagagctgagtgattgagagtccttctgaacggactcggcacattactcctaattctttcccatgtttactggcctcatcgtcctagactcgggttaatactgagactctgtgtcatgtgaacgggggacggtaagaacgcttaatacgggccgcagttctacggtgacggacg

SEQ ID NO: 693366 - DNA, 1651 bp, Homo sapiens
  misc_feature (1308)..(1308): n is a, c, g, or t
  misc_feature (1391)..(1391): n is a, c, g, or t
agcgcggcgtcgactctgatggacccaggttgtgttgcgctacaaaaacaccgcgggcgtgtgtctacctcggtggctgtggattgttctcccgggcgtgatattttttgtcggcgaccaccacggctgttcgaggggcgggtccaaccacttgcggccaaccgagagggaggcgtttggatcaaccactgggccccgagggcgacaaaatttttttgtggagcacccgggggcctcagtggaggcgggggggcatctgcctcaagtgacgcaccggagcggcccttattttggggggcccttttcttgctcagttggcggccgccatgatgttttatagtgatgccccccgggggcccgctggctttggtgtccccgctcggccacaagagaggacctcacggggttgtccggagaagggcctttctcttgtgaaggcccccttcttccccgggggtgtttctgggtgtctcgtagaaaaaccgtctggctgctccccataatatatatgctggcgtgcccccccccccccgcgtttttttgcggggggctgtgccatcatgtgtcctgtgccactctggtagccagtcttcctgccgaatgttctcccgggagtgttctcctcggggccacaatccgtgggctgccacacgccccaaagattccccgggggtggtacgccacccgggccgctttatgaagggggctctttcgtggtagactgtgagcggcgcccaccaatagtaggagcttatcctgggggcgcgggtatttccctcccggcggtccgctgtctctcgtcgggacgagagcccgcggggtgtggccacacagcagcgccgcgagggggtgttcaccaccccgcggggtggtgccgccacttttttcgcggggcaccacagacagcccagctgccttgtgaaggggcttctcacaacagcccaacaggtgggcgctctataacggggtgggcacacagagataccttcgggcacacacacgcgacaccacactgtttcccgcgctgtcgcgccgccttcggtgtcccacaaacacacaccacgcgagaggtgtgagagtggccccctctctggggggagaagacacgcgcgcgaggggcgcaacgagacctcgggagacctcatatgtgagcacacactgggcgcctcgtgcttttgtgagacacaagccacactcgtgggaggcgcgctgtagggcgctgtctcgtgtggcgcgctttcacacgcagcacatgtgtggggcacaccttctctgtgtgtgtttcctcgtgtcacagtcacacggggntgagagcacagctatatggagaagcccccacattcgcggtgtggcacgccacatagagagagtgccacacagcgcacatgccncacaggggccacaacacacgcaccacaataacgctggagaaggccacatggagaaggcacattttctactccagcctatgtgtggaggccctttgcacggtcaccgagtgaaactctgaggtgttgtggaatggaatgggtggatggaagggtggcacaggtggggcgtccccacagggccacacttcttggcacagaagaactttgggtttttaggggtcctcaagtgcctttgtgattaaagaatgttggtttatgta

SEQ ID NO: 693367 - DNA, 333 bp, Homo sapiens
agagcctcagtgtgagcgggaaagacaccaaaacacagcagtatgggtcctgtggagggggcaggtcagcatccctcaaaagccccctgcaaacctggagccccaccatggttgggggccgcacaggcaggccaggtctgctgtgtgactacagtgggaagaggacatgagagactctggctctccacaagcagaggaggccacagcgcatggagtccgcaactggacacagtcgccccaggtttagggtcaggattaaggggacccagagctcctagacctcatggtgaggacctctcgtaagggaaggcgcggtccagccacgggcatcgt

SEQ ID NO: 693368 - DNA, 387 bp, Homo sapiens
gaggacccatgtgcgctcaagatctatggtcctttttttttctgcaacttctaatagtgattttatttttttttcttttgggtcaccggccaacagtttttaatttgtttgtttgtttgttttttttttttggagacagagtctcgctctgtcacccaggctggagtgcagtggcccaatcttggctcactgcaacctccgcctcccaggcccaagcaattctcccgcctcagcctcccgggtagctgggaccacaggcacatgccaccgcacccggccaattttttgcacctttagtagagacgaggtttcaccatgttagccaggatggtctcgacctcctgacttcgcgatccacccgcctcggcttcccaaagggctaggatt

SEQ ID NO: 693369 - DNA, 838 bp, Homo sapiens
  misc_feature (252)..(252): n is a, c, g, or t
gcaagctgggatgatgcgtgcgggacggaagacgaaatctatgaggtgagcgtgctgatgacatgtatgtatcagcgggcacctctttcgccagtagatgtatcgctagttctcaggctcagtgcaggatccagggctgcatgtgtgggggcgtgaaagaaagttcgagatcggatgcctgtggtccttagatggacctctgtcgtctaggttgctccagggggacgtcctactctagtgttgcagcactgncctagaagaggtttcccatctgcacctgtggataggccagcagtcatcccgggatgagcagggggcctgtgccgtgctggttgtgcacctcaacacgctgctggaagagcggcctgtgcagcacctgggagggtgcatgggcaatgagtctgaccctcttcatgagcttactttcccagggggccttcaggttaccaggaaggtggtgtggaagtcacgcatttcaccaaagacctccaacagggagcccccagttgccatcaaagaaaactctaccaaggtgacacggggaaagaagaaccattccggtgccaccgaggggcacctgaccttggggacagcttccaaccatgggggactgtttcattccgtgaccctggggcaagaacatcttcgccccggttgtgtgtggaacggtccaaacatccttggaaccgacacagggggagggaactggcctggcccatccgggaacagtgagcgcaaggggcaagcccacgtggggattgtcactgcgtggggagggccttgtggaatgaccacgtccgggccaagcctgggctgaaggggcacctctaggaaactc

SEQ ID NO: 693370 - DNA, 937 bp, Homo sapiens
  misc_feature (151)..(151): n is a, c, g, or t
  misc_feature (195)..(195): n is a, c, g, or t
  misc_feature (229)..(229): n is a, c, g, or t
  misc_feature (232)..(232): n is a, c, g, or t
  misc_feature (359)..(359): n is a, c, g, or t
  misc_feature (432)..(432): n is a, c, g, or t
  misc_feature (490)..(490): n is a, c, g, or t
  misc_feature (689)..(689): n is a, c, g, or t
  misc_feature (737)..(737): n is a, c, g, or t
  misc_feature (815)..(815): n is a, c, g, or t
  misc_feature (826)..(826): n is a, c, g, or t
  misc_feature (831)..(831): n is a, c, g, or t
  misc_feature (892)..(892): n is a, c, g, or t
ataaactgtgtacccctcctttctttaccatcagtcaaggggcgcacccatatttactcccaaccaaactatatacccctccctttctcactctttctccacaccatcaattcactctacctccattatcaccctttcaaccaccatcttnaccccaaaaaaaaattctaccacataactcctcttttcaacatntattacaacaacttattttctgaagtgacggccngantaaccccacaaccaccacatttatacacgacactatcccttattacccctgatttaaacctattttacccatatcatcaacagccaataacatttaactccccttttataaaaaccaaattaaactnattaacgttcatacatacaggtgcccccaactttccccataattttcttaaaaatactcactctcacttacanatattacgtatttcctactccaaattctacatcaaccaataagtcatttccccacaanaaaccagcccattttactctattactccctagtattcacacactgcccttcctacccctgaccattaattaaagagccgcactaacacgaggcatcttctttctccttaaatacaatctttccttaaacgctctcaatatttttaaaaaagaccaccttatatccctatacttttctacttaacaaaaactctcccttnccaatacctttttaataaaccaataaacactcttcacccctcctcaantataatacccctcccggaaaacctcaataccataaacaaaacttattgaaaaacgccttaaatccctctcttatattntataaaaaaanattanaaaccaaaccgatcttcccttatacaaatatggaggattttccatttttatatttccaagncctccaaaaagcccccctccccccccccattatataaaatttcca

SEQ ID NO: 693371 - DNA, 653 bp, Homo sapiens
ggggggacaaaaaaaaaaaaaaaaaaaaaaaaaaaaaaaatttttggccggcccggcccccaaaaaattttttaaaaccttctttgggggccggggccccgtagaaccttggtggtcaattactgtgttccctaagtaaaatactccggggcgcactacgacctacggctgtgggtgttctctcaccaaaatataaaaaccgcccggggcgggcacccggagcgcgtcctctggacacacatccaacaagtgggcttgtggagcgggacctacacggggagatctcttacacaagagggtctccacaggcgaggagcccaagatatcaaacttttcccccccggctgggggagcagaccattgaccaaccaacacccaaccccacagcccagcacgcgccgggaccgaacgccgaacaatcagaggagggcacgacgaagacgcaagaaaacaagcgaccgcacaggacacatcgaggagaacatcagcaacgctccgacggcagacgccaacaacggagaaaccaacagggaggaaacaccaacaacaaccaaacgaacaaacgacagagacaaccagcgacccacacacagacaaggaaggaggacacaataaaccaacaccaaaagcaacaaaccagcagacaacagaca

SEQ ID NO: 693372 - DNA, 279 bp, Homo sapiens
ccagagtacgctagattcatccaagtgttttcatgagtcgtgagcgcacgccccatgttcctcatctctcagctgtccctcggtccctgtgtgagattgttactcgctatgagggggctcagatggtgcggcctgagtgtgcggccggcggcatatgggatacacccgtagggtgggcggggtgtgtcccaggcctaattccatctttccaccatgacagagatgcccttgtgaggctggcctccttggcgcctgtccccacggcccccgcagcgtgag

SEQ ID NO: 693373 - DNA, 452 bp, Homo sapiens
gaggatcccttgtcttgctggggagatgagggcggtggaaatgactcctttttggacttgatagatttgaaatctgtcccatgaggcatccaatgaaggtgtcaaaataagttagacataggtaattggagccctgagatacatacacatatgtaaaggagaccttaccaaaacagagggctcttggggtgtctttgggaatgccttttctcttctcctagaaaggaaaggccatcattgaagaagaggttgcccgggattgaagactcaggcattctgggcatttagaagtttacactaggaaaagccagcaaagggagaccgaaggcaaatccagagagtgtggtataagaaaagcagtgagtgcgaaagtttttgaggtaagagtggatccagtgggaaattggtgctgtgcaggtagaaaaagatgaagaccagacaagaaccacacg

SEQ ID NO: 693374 - DNA, 163 bp, Homo sapiens
ccccaagcctctcttctgcttcactacattaatttgttttgaccacagtcattcccaacatctctgttgccattgtttcttatagcaggttagggtgataaatgcgtctctgcgattccaatgttaaacagaaaaaaatggagcctgaatctaacgtcgacgc

SEQ ID NO: 693375 - DNA, 398 bp, Homo sapiens
  misc_feature (154)..(154): n is a, c, g, or t
  misc_feature (265)..(265): n is a, c, g, or t
  misc_feature (274)..(274): n is a, c, g, or t
  misc_feature (360)..(360): n is a, c, g, or t
  misc_feature (385)..(385): n is a, c, g, or t
  misc_feature (390)..(390): n is a, c, g, or t
atcaatcccctatgtgtccatcaacatcattcagccttaacaaggaaggaaattctgacacatgctacaacatggatcaactctgaggacatcacatcatgcctaacctgaaataagccagtcacaaaaagacaaatacctatatgatcctacntagagtagtcatgaaaattcagacaccgaagtagaatggtggttgccagggcctagtggcaggggaaatggggagttgatgtttagtggggcagagagtttcagtttgagnatgaagaanaaagttctagagatggatagttggtgatgggttaccccaaccaattgtaaaatggtaccatattatatttaaatggtacacctttnttttttttggagaccagaggtttcntgccngcccaggc

SEQ ID NO: 693376 - DNA, 328 bp, Homo sapiens
gctaatttgagaactttcaaacagagttagaagtatggctattaggcctgatgtggtggctcacccctgtaatcccagcactttgcgaggccaaggcgcgcggatcaccctgaattcaagatcagcctgggcggcgtggtgaagccccgtctctactaaaaatacaaaaattaggcaggtgtggtggtgcgcacctgtggtcccagctactcaggaaggtgaggcagaaaaatcgctagagcccaggaggtagaggttgcagtgagcccagatcgtgccccactgcactccaacctgggcaacagagcgagactgtctcaaaaaaaaa

SEQ ID NO: 693377 - DNA, 425 bp, Homo sapiens
  misc_feature (139)..(140): n is a, c, g, or t
  misc_feature (145)..(145): n is a, c, g, or t
  misc_feature (200)..(200): n is a, c, g, or t
tctcactcgaccgccccccgatcttcagtccaccccttcccgtccatggtcttctgggtgggccctcccttcttcatcagtcccatcctctcctgtccattgtcctctgggtgtccccccccatcttcatcaggccacnnttccngtccattgtgttctgggtggacccccccatcttcatcaagcccaccccttcctgnccatggccctctgggtggcctccccatcttcatcagcccacagcacctggtgctgctttgtagtcactgtcccccccccccctctccgctttgcctctgtgtcctcccagtgtccatgtggtaggaacaaggatcacagcattgatggagaccacatagctgtgcagactagtctcgtctaatttcacagccaagggcttggatccaccgtcacttgcctagtcc

SEQ ID NO: 693378 - DNA, 1033 bp, Homo sapiens
tcaacccaacttacacttaggagatttcaacttaacttgcacgctctgagctaaacctagccccaaacccactccaccttactaccagacaaccttagccaaaccatttacccaaataaagtataggcgaatagcaccattggcaaacctggcgcaatcagcatcatagtcaccgccaaggggacaagcatgcaaacaattcataaccaagcatcaatatcagccaaggcactaacccctcatcaccttctggcattcacttgcacttttcaccttcagccacaattacctttgtgccacagggcagcagccgaacaagctagaagaacccccgaaaacccagcacggagcttcaccgtacagacacaccagcgtcaagaagcagcaacaccccggtcttaatgttagccaaccacatagtggggacagaattctatacgagttagcaggccgaacaaaacacttaacccgagcccttgggtggatacgcttgggcttggtccaaagaagtacgacactctttacaggtttccaacgtttttacacacttttgcccaactagacacgcccttcctactcaaattccgcgtttttggttacaccactttttcacaccgtgggttataggtacccaaaccaggacgtgacaacaacgacctcctttgtgggaaccaactaaggcgcacaacgcagcgcaccccttttggtaaaggcacggcacggcaggtacaaagctcgcacttttaaagagaccccaattaagtgacaggccctacacacaggcagggcgcaaaccacaatttttcaaggaaaaacggcggttccaaacggcgtatccaaagcaccccaaacagtaaacgtgtaaaacaaaattcccccaaagacaatttattaaagtggaaactgtccgttcacaaacaccacaaagttgggcaccacattcttataatacaccccttaatgtagggaaagacacactcaagggggtcacgcactaacgcgtccgacaatcggcaccacgaagttgtccgac

SEQ ID NO: 693379 - DNA, 313 bp, Homo sapiens
gtttttttggggggggggccccccccccggggggggttctctaagggccccccttttaaagggttttttaccccccccaaggggtaggggggctttttcccccccattttcaacctttgagggcccccattttttagacattttttggggcgttttaaaaaagcaacctcccaaaataaattctcgggcttttttaattctttaaaaggccaacctcggccccggggggggaaaaaacctttcccttttaaaacccttttttttaaggggaaaaaaaaatttttttaaaaaaaatttttaaaattgggcccca

SEQ ID NO: 693380 - DNA, 155 bp, Homo sapiens
ttagtagtacaaagcccagtgacaagtccccagtgaaatgcgtgcaaatctctatgtcgctactgatgcagctgtagggtgggggactgcaggatgctcggcatcctcccattagaaacttgtttacatgccagaccttgaagcctacctatttt

SEQ ID NO: 693381 - DNA, 337 bp, Homo sapiens
caatatgatgaacagtaagggagcagagatgaataaggactttcaggaacttaactattctggaataaggaatgaatcaactgaccttgaggaccagcaggtttataactaaattgttacttgcctatctcacccagttaatcagactctgtacttgtttccctttaagaaacaggtgtcatggattaactaattctgttttatggttgtgctaaattcgtaacaggtgccttattctttgcttttagtcaaaccattccatatcagaattttccttgagttactatagatatttggctttaagttgtagtttgtgtataataatgtacaatgttca

SEQ ID NO: 693382 - DNA, 559 bp, Homo sapiens
aggtgaatgccctgcaggtgctcacggccgcgtcagtgcttcgcatacagacagttatcgacgaatgcacgcagattatcgcccgcgctcgagccccgggcacctctgcgcccacgcccctgcccaccgcctgtgtccccggcatcgcacctgcgcgctgcgtcccgtctgcccactgctggtgcgtcccccgggaacccggttgctgcagcacagccgtaagcatgcgccagccctgccgcgtttgcagctgccaagcgcccccaaaacaccctgccaaaggctgatggggcctgaattcttgacccttcatgtgtcgcagcgaccccgtataaagacagaatgatcaacgaaagtaatgcaccaaccgaaaatagctgacgaggaacacacgaactgagacatcaaatgcaaaagaaaataagggcggacccaaaggcaaaagggcaaggacaacaccaattcaattccataaaattctagtagcttgattccctaacaggtgaaatgagaaacaacagcattacaaaaaacccctcacacacgacacgcgactaag

SEQ ID NO: 693383 - DNA, 81 bp, Homo sapiens
cctgaggacacggctgtgtattactgtgcgagagattggggggatcctaggggtggggttattgactactggggccaggga

SEQ ID NO: 693384 - DNA, 242 bp, Homo sapiens
tggggtagtttaactacggaaagagattagagtggcgggagtgaggtcagacctatatacccaggacttagggaggccagggcaggcagatcactcgaggtcaggctttagaggccagcctaaccaacatggtgaaacctcatctctgctaaaaatacaaaaattagctgggcgtggtgacatgcgcctgtaatcccagctacttgggaggctgaagcaggagaatggcgtgaacccgggag

SEQ ID NO: 693385 - DNA, 970 bp, Homo sapiens
gggaacaccagcggctgacgtctgcttcagcgtgatgtgcgggcgccagaaaggcccgatcgaaaaaccgtggagaggtgcgccgaactacaccccgagtgggatcagccagtccgaagccaatggcgccacggcgtcaaagcggagacgaggcagcattcgacctccatggcgccactcgcctggtgtgttgtccacagtgccatgggatgcagtagataaactggtagctgatcgcaggaatgaagttgttcagaaaaattaagagcgcattgggaatggttcgttatggggaagtttgctgaaggatgtgataatcggtacccaggtctagtcgttgctattaaaatcatagtacttgatggaagcctgatagatgaaatagaagacgttctgtaatgaaataactgtcttgagtctatgtgtgacaggatcactattgtaaagcaaattacatagtgtggtcagtatttcatacagtggtgtcttaacagttgaattggactcataatggtaaatactgtggtcaggattgatatgaaccatgggaagtctgtgaaggagggttgaacaggtgagacggacaatcgcgtatcggcaaaagaaagttaaagagtgaacacttttgtgacgggctgaaggaaagattgaggataagacaatgaacattggcagcgaaagcgtaaaggggttgacgtgtcatctggcacttagaggggcaaggatctgtacatgagattgagggttaagcaagttgaatgtgatgattgacagattgcatagaataataaggagtagtaagtggaatagcgtttagatgagaagggaagataagcaagagatcagcttgaagcaaagacagagatcataaggggaataggtgaaatgaataacgacagtacagagaaaacttgaatgatcataaagcacgataaaaaggaggaacagagatggagtagtaagtaattat

SEQ ID NO: 693386 - DNA, 284 bp, Homo sapiens
acgctgagtgtaacccgccgccagctcatcacagtacctcgagctgtacagagttgctatgttctgaccgttccatcgtatacactggccgctagattgctacatggtcccactatcctgaaactgctggtcttttctcacatgtcacctcagtaaggctttatagtcccttatcatccttaatcatttcaaaatgaacctctctactcaacagtctgccccctataacccttttctgtcaaacttttgtccttacttcatgtcaccatttaacatactgtatg

SEQ ID NO: 693387 - DNA, 757 bp, Homo sapiens
  misc_feature (251)..(251): n is a, c, g, or t
gaccctcgtttagcgtaaatattatagtagcagtttaccatctcactgcatagagattagtaatatatcgcttgacagataatgtgctccctactgtgcctagaaggaatgtactatcgctgaacatggtggctactctcagtaacgccgtcatcacagtggatccctcttgagaccaagcatagtgcctattgggcatattggggtcattaggcagcgctgctgaagcactcggtggggactagaccctnactatgtatcaatctcgcaggagatatggtctagagctacgtacatatgctaaggctactctgatgttactcgtagtcggcccagcaattatgttaggtagctagctgtcgtgtgaacttgttcggaaagaagagccttagttgtcgcatcaggggatcattcgagagcccagtagtccctgagattcatgtagtcgctcggtccactctacctatgtacttaggctagatcgataacaagctagtttagcttgtcacacaaggcgtgttggccctgctcggatgcgccgcagtatggaatcagtggcctgccataagtatggtactgatagactgagttccataggcctgtcaccagctctttgtgtgaaggggattcgctaaggtgtatcctaatgtgagccgactagttcagcggactgcatggcttctgcctcgtgctagtgcctcaagtctttccgagagtactcggctgaatgatagacctttcagggtcgacggaaatg

SEQ ID NO: 693388 - DNA, 1450 bp, Homo sapiens
tcaactttcaactcccatactttatggggcacaaaggaggaaggatgcaaaccatcaccacaggcccacccgaccagagggtgctccaggctctcgagcacctagtacagcatgagtcgagtcacttttatcaatacaggcaactggggagggatggagtggggcaaatattccaccaaaggaaagggaacattagaaggtcctatctgaggcttggggcgctcgaggctatgtctctgctcctgggccacaagtgcccactttatggtatcgaaaacaaggcaggtctaaggagtctcccagttgtggcgaaagtagcatgaggcagaggacagcacatttcgccatataatattcgcacgcggcacacaagaggaaagaggcgatttcaccgtggcagcggcacaattcccttatgtgaaactaatatttggggaacagaaacagacgcaaaatttgttccacctctatataacacgggtgcgagcgacctaatacgcgaacgcgcgacaaccacactgcagcaacaagacttcaaatattataaacctatatctctagaccacacgtaatacccaagacaccgtgtgtcaaacaagcaaacacacgtcttatatttcgtgccacaagctaagagagtaacaaacaggagagaatactgagagggacgagcgacaagacaaacacaacgtaggggcaaacaaacatcacgaagtattcaccaaagagtatagaacacaggtgaaacagcggaagaaaccaacacgatacacgccaagggaaacaaagaagaatcccacaagagatcttcaagaagacaaaccaaggggaagagaagaaaaacccaccccaaaaaagggagaacacaaaacaacgccataccacaatgcacgcaaaatccccggacaccaacaaggggcagaggacccgacagaaagccaaagacaaccacaaatgtgggaggaggaaaacaaaaaaaagcatgcaggcagatgatccaccacacaccgacacgggaaacagactacaacaagtgcgcagacgagtaatatgaaagaacgtctagagagtacaacaagagagacacccagactactggcccaacagagatgagcaaaacacatcagagacacaaaaaacgcctaaaacaagcccacgaagaggaacgaaaaaggcagacagaacacacccacgcaataaacgaagacaacaaacacacccagcagaacgaggacacacgacaaaaaggaccccgcgacacaaaaggacacaacaacaataggtcgggagacccgccagacaaacgaaaaggattccaacacaagagagcaaagcgaaacacgattcgtgcacaggagctaccagcaacatcaacagagaatcaagcgccctgcgatgggaagaccacatggcccagacaaaggaggaacagatccaccaaccagagaga

SEQ ID NO: 693389 - DNA, 575 bp, Homo sapiens
  misc_feature (49)..(49): n is a, c, g, or t
  misc_feature (54)..(54): n is a, c, g, or t
  misc_feature (75)..(75): n is a, c, g, or t
  misc_feature (79)..(79): n is a, c, g, or t
  misc_feature (86)..(86): n is a, c, g, or t
  misc_feature (107)..(107): n is a, c, g, or t
  misc_feature (140)..(140): n is a, c, g, or t
  misc_feature (253)..(253): n is a, c, g, or t
  misc_feature (258)..(258): n is a, c, g, or t
  misc_feature (282)..(282): n is a, c, g, or t
  misc_feature (514)..(514): n is a, c, g, or t
  misc_feature (532)..(532): n is a, c, g, or t
  misc_feature (555)..(555): n is a, c, g, or t
ggacctgagagctggaggggcgtgcgcgcgccttcagctctgttgcgcncggtngtcaccttgggcgcgacgggngccncgccacnggggacccaggagcctgaggncattgagtggcgatggcggcgacggcgagtgcngggccgcgggatagacgggaagcccgtacctcccctaagtccgtcaagttcctgtttgggggcctggcgggatgggagctacagtttttgtccagcccctggacctggtgaanaaccnggattgcatgttgaagcggggaanggggccaagactcgagagtacaaaaccagcttccatgccctcaccaagtatcctgaaggcagaaggctgaaggggcatttacactgggctgtccggctggcctgctgcgtcaagcacctacaccactacccgccttggcatctataccgtgctgtttgagcgcctgactggggctgatggtactcccctggctttcttctgaaagctgtgattggcatgaccgcagtgccantggtgcctttgttggaanacagccgaagtgctcttatccgntgaatgccgatgccggcttc

SEQ ID NO: 693390 - DNA, 513 bp, Homo sapiens
  misc_feature (10)..(10): n is a, c, g, or t
  misc_feature (19)..(19): n is a, c, g, or t
  misc_feature (43)..(43): n is a, c, g, or t
  misc_feature (107)..(107): n is a, c, g, or t
  misc_feature (109)..(110): n is a, c, g, or t
  misc_feature (112)..(112): n is a, c, g, or t
aaaaaataancaaacacanaaacagcattagtttaaaacaacnagcaaaaaggcaaagaacacccccgccagatattataacaaaaaggaggcggcccaccaccaananngngagaagagaataaaccaaagaaataagaaaaccaagaaaaaaacaaagacctataaaaagagacaagaaaccacagtaacaaagaaaaccaaaggaaacgaaaaaagtaccaacaagataacgaaaacaacaaacagaccaaaagaaatccgtgacaaaaagaaagaacaaaaacaattaaaaaaaagacgacataatgcaaaaaaggaacaagagaacacaaaggatcaaactaaaaaaggacaatgaaaaaaacacctgacagcgcaaagaaaaaaaggacaaaaaaataaaaacaacgaaaaacaaaaaaacgagaaacgaaaaaaaaaaggaattacaaacattgaaagaacccaagaaaaactcccatatcaccataggaaaaacaaattcacccc

SEQ ID NO: 693391 - DNA, 195 bp, Homo sapiens
gtagcgatctagaggatcccggacacaggaaaaggaccctttgctctgccaggagagtcacagaaggctttgctggtggaggatgagatgcaatttcagcctgaaatgatgaggagtttgtcttcagccatgtggagaaaggagcattccaggcagagggaccagtctgagcaaacgcattcgggtgtaaaatta

SEQ ID NO: 693392 - DNA, 195 bp, Homo sapiens
tggctggggaagaggggattccagctcctcatctctgcagggactggcttgtgcctagggaacactagctgtccaggaaggggagagcttatccctgtagccccccgatgtgtgtgcagtgcagagagagagcaagctacttctgaggaggggagtttgtggggaagggcaacgttacgtctttacctgacgggt

SEQ ID NO: 693393 - DNA, 967 bp, Homo sapiens
  misc_feature (967)..(967): n is a, c, g, or t
tgaaaaaacttggcggggccccgggggtgggtcgaacccccctgggggggggccacccccccctttttgggcaaattttgttctccagggggcccaggcgtgtgaggttgggggggggggggagccctctacttcttagtcgcccccccggagtagtagtggggggggtctcctctaaatggtagagacttttttcggcctttcgtaacaggagggggtcctcacaagaccgaaaaaaatttataaaattaatcagcggcccgtcgtaaaacaaaagtaagtgaccgccccccacaagagtaatacgatagtcgtatcgaggtggggggacctactgacccggggtacgcccatacataaagtgcttgggggcctcttgcagcgagaatgcgagcgagagaagaatctgtggttggggagagaagaaagtattatatttatctccacgcggagataataaatatatagcctagacaaagagagtattcggggatagaatgtgcgcacaatggggggtacccgaggaaaaatggggaaacttctgggaagagggcccctccattttgatgggagagaagtgcccttatggtggtaggaacactagtgtggagggtgcgaagccaaacagattaatctgtttcgggtggttagaaacaaagtaacctgtagaaaggttggtctataatacaacagcgaagcggtgccctttgttgtagaaaggaaagttatttccttaggggctcagagcagtcgagcaaatcaatttatatattgcccggggagggggggagccagaaaaaatgtgaccgaggggggagacagataaatttgaggagaaaataccctgtgctcctaccaccaggtaagattgtgttgccgaacactgagacgtttatagtacaccttttagggtttgggaggttaaagaatgcgcggagaaaaacggcgttaggggatcgggcagtan

SEQ ID NO: 693394 - DNA, 675 bp, Homo sapiens
  misc_feature (310)..(310): n is a, c, g, or t
  misc_feature (332)..(332): n is a, c, g, or t
cagagggattttgacagtcatatgtggggttgacacgttcctagaatttgagcttctcaatgtataggcacagtgagagaataaagcaggactggcccctacttggagcagtttcaggagggagctctgctgagcactggccacacaagccagtggtgcatcacagagtaccagcactgcaaggatggggtgagggcaaggaaggggccacagaaaacagctaccatcttcccagcaggtgtggggcccagctagcccaggaccagagggatctttcaccccaggtgaggatttgtcttggcattgtcanggctaagcttggaatatctctngtcaagagcagtcctgaaagatagagcccggggagaccttagaaactatccagcccatggcttcattttgtaaatgaagaaagaaaaacaaaccaaaaccaaaatcacctaattgcattctcccaaataccagagaagttgaatagcttgttctgtttcaaatagtaacaagtaacttacactggaaacaacctcagttctgccgaaacaacactatcactatttcttcatgtaagagctagtctctcttcctcaagttttacagatcaaactcagacccagttttccctcaactaccagcacctgcatcctccatgtgctgagggatcctctagatcacctc

SEQ ID NO: 693395 - DNA, 153 bp, Homo sapiens
agcagctcatcttaagttcagctctcagacattgctggttgagtttggaacccaaaacctcttaacaactggcagataatagctaaatcttaacatacaaagaagaacatattttccttggcactagctcgctgtagttgagggtcaccgagc

SEQ ID NO: 693396 - DNA, 167 bp, Homo sapiens
tggacatgcacagaggaggtggacagcacagaggaggtggacagcacagaggaggtggacagcacagaggaggtggacagcacagggggattgttgtttggaagggggatgcgggggaaatgttgttagtaatgagaaatcctgcgaataggcctcctctgtgctgt

SEQ ID NO: 693397 - DNA, 149 bp, Homo sapiens
aagtcggtaccccccgatagcccgacaggacacaggcgagctcaggtgatgcgggcaccagcaatgccatggcctggtagctccggttctgctttcatcgctaagagagtgtttcttcagctcaactcgaggtggcattggtggtgtga

SEQ ID NO: 693398 - DNA, 537 bp, Homo sapiens
tggagacagagcctcgctcggtcgcccaggctgggagtgcaggggtgtggtctcggctcactgcaaggctccgccttccgggttcacgccattctcctgcctcggcctcccaagtggctgggactacaggctcctgccaccgcgcctggctgatttttggtatttgggtggggacggggtctcaccgtgtgggccaggagggtctggatctcctgacctcgtgatccactgtgcctcggtctcccgagggtgctgggattgcaggcttgagccaccgtgcccggccacagccattagttcaaattgactcttccagaggtaaatttaatacgccaatacgaaaccggtagggatatagatcctagttcgcttctcctttttcataaagaaaaaccggtagtatatcacggtactcgggtgagattcctatcccttataattccttataacaacaattcagagagtggggtctaacctacactggaccaggcagggcgttgaactgtgcccaagttgatcctcccattttgacctcca

SEQ ID NO: 693399 - DNA, 847 bp, Homo sapiens
agcgggccgggccccgccgcgcccgcgcgcacccgggaccccgacacacatgagattcttcagagctcactttcaagtgcttcgtggactgcttctgactgcgccgcaccgcgcccagaaaatcagcccaatattcgcagcaaagagaaaaaaacaagagcaaaaagaagacaagacacaacgacaagagagaaacaaaaaagaaaaacaagcacaaagacacaaggacaaaaacaaaaagagagaaaaacaacagcgaaaacacaaaactccaagagaccgacgacagcgagacagagagagacaagagcgcacagctgacgcgcgcgaacagagggagaaaagagagagcccacagaagcgacagacagagcgcggcaccagacgccacacgaggagagtagcacgaaggaacagccgacgaagaagcgcagacacaggccgcagaacgaacagtcacgccgccggacacgtgaaagcaggacacgccaagccggcaacatgagcgcccgcacggagacacgtccgaggcggcgagcaacgcgacacagactgcaacacacaagacgcacaccaccacgcagcagccgcagcgagacaagacaccgaaccacaggtggcgggaacacaaacgagacagagacgaccaccagaccacgagcgcaccagcaaaagacacgcgacgaagcaccaaacacaagcggaacagagacgcccaaactacacaaaccgatacaagccacagagatgaacagaaacgcgaccccaagaccgagagcagaaacagcgaccaccaccagacagacaagagaaagccaaaccagcggacgaacaaaaaggagaagaa

SEQ ID NO: 693400 - DNA, 489 bp, Homo sapiens
cccaaaggaagacctaaaacagaatcacgggctggtgggacagtcatcctgaaaggccagaggaactgttggagcacagcctagagacaaacactgagtaacgttctttaacaaggactgaacgtgaaagatggaaacaggagccccccacccactggggctgagctggaggctgcagcctgcccctagccaggaggcacagtatatggaagaagctgatgtcccaagagagcttcctgccaagcctgacgctcacctgcctggggtggtttatttgcagtgcagcccgaagatgggatatgctgccgtcccgcctctcacccatgtgaggaacaggcaaatgctcctctaagctcccatgtggggtctctaccgaaaccccatgctgaccccagaggcccacagaccctgccaagttcaccctgctcaggtgataagtcggagccccaaatgctcgccacagatgggtggcacttgtgaacgatttca

SEQ ID NO: 693401 - DNA, 109 bp, Homo sapiens
agaaaaaaggaaaacaccaggaatttaaaaaaacgaagaaaaaccgaggggttttaaaaaaaaaaaccccccaagctggagaagaaaaaaaaaaacaaacggaggaaag

SEQ ID NO: 693402 - DNA, 400 bp, Homo sapiens
tggaaacagagtctcactctgtcacccaggtgggattgcaggggcgcaatctcggctcactgcaacctccgcctccggtccaagcgattctgcggcctcagcctcctgagtagctgggactacaggtgcccgccaccacagccagctaatttttatattttaagtaaagagggggtttcactatgtgggccaggcgggtctcgaactcctgacctcaggtaatccacctgtctcagcttcccaaagtgctaggattacaggcgtgagcccctgtactgggcctatttttaaacttttctttacacttggagaaataacgtcggctatttcatagatgatgatgtactagtgataccctgtctctaaaaaaattgtaaaccgtgggcggggcatagatggt

SEQ ID NO: 693403 - DNA, 132 bp, Homo sapiens
  misc_feature (124)..(124): n is a, c, g, or t
  misc_feature (128)..(128): n is a, c, g, or t
ctaggataataccttgtagagagagtaaaatattgaagcacccatcgtaggcctcaaagcagccaccaagttaaggaaagcgttcaagctctacacccactaccttaaaaatccctcacatatnactnaacc

SEQ ID NO: 693404 - DNA, 326 bp, Homo sapiens
  misc_feature (29)..(29): n is a, c, g, or t
  misc_feature (46)..(46): n is a, c, g, or t
cctgtaggaattgaaataatactagtganctatggcgggcacaagngctcacgcctgtaatcccagcactttgggaggctgaggtgggcagatctcttgaggtcaggagtttgagaccagcctggccaacatgatgaaaccccgtctctactaaaaataaaaaaaaaaaaaaaaaaaaattaactgggcatggttgcacatgcctgtaatcccagctactctggaggctgaggcaggagaattgcttgaacccaagaggtgtaggttgcagtgagccgagatcatgccactgcactctagcttggaaaacagcgagacttcacctt

SEQ ID NO: 693405 - DNA, 773 bp, Homo sapiens
cacgaggcagcgacgcacggctgatcgccatcttcaaggagaacaagcggccgtccaaggagatgcaggtcaccatctcgcagcagcgtcggcttggagctcaacaccgtcagcaacttcttcatgaacgcgcggcgccgctgcatgaaccgctgggctgaggagcccagcacggcccccgggggccccgccggcagccacggccactttctccaacggcctgaggcgccccggccaccgcagccctcacacatgactacaacggcctgggcgctgtgcccccacagtcacctccccaacatcctgccaggcccggagaccacgaccaccaggggggaaaactgaagaggggtgctatccaggagacccgccacaataaccagcgagggaagggcggctaaagccagccacaacgacgcaagcatggaccacaatacgttgcacccaaacaaacgggggcccggcaattacatcacccatcagctattgacagaactactaccgtacaagcgcaacacagacaacagcaccatcaaacgaacccacacaacccagcaataaggaaacagcccagcaaaagagacaccacccctagcaccccgcacaccaatgagaggagcgaccagaccaggacccgaaacaaaaaaaccaggggacagcacggacgtgaacgaacagcgcgcgcccaacagcccccacatctaaacaccataaattcagacatataacaacgtggacatgaacacacgcaccactccgaagaataccatcaa

SEQ ID NO: 693406 - DNA, 369 bp, Homo sapiens
aaacaggctggcggaaagaaggctctagagcctgcttatagagccacaagagtttgcagacaactgtgatgtcagccaatgtcactcgtacgccgccagaaaagtcctcgtcttcaatgtaatgcatccagcagccccgcgaattctgcctcacttcctccgtttgcattctcatgtggccgtgtttgttgttggtgctatgatgccctaaggtgggagaacaccacaggtacttggcttttgggcactatatacggaatcagcaaagatcacccactgcaccacctgggctgctgcctctggagtacttccccgcagctcctcattgctcacatagtaggcaatggagttgctctcaaacacacagaa

SEQ ID NO: 693407 - DNA, 189 bp, Homo sapiens
cgggagaaagggcatcattataacgctatgagtggagatgtcctgtcaaaggtgtctcacatctacacgttggctgggaggcttttatggggcccggtccaggtagaaaagaaagggtatgtagagcttagatgtccctatggtgacagagccagggggtgttggtaataataaaaccaaagaaacatt

SEQ ID NO: 693408 - DNA, 230 bp, Homo sapiens
gcaggcccgcaagcggtgtgagccgtcgcagccgtggcatcgttaaggagtgctgtttccgcagctgtgacctggaccctcatggagacgtactgtgctacccccggcaagtccgagagggacgtgttcgaaccctccgaacgtgcttccggacaacttccccagataccccgtgagccagttcttccaatatgacacctggaagcagtccaaccagcgcctgcagcaag

SEQ ID NO: 693409 - DNA, 285 bp, Homo sapiens
  misc_feature (36)..(36): n is a, c, g, or t
cctcatccccgttttgggtgtcctcaccaacaaggnggttggggggcccctggtttgtccctaaccctttttcccagggcaaaaccagttttttttgttttgggttgggttgggttggtttttaaaccaatcatgttcccctaaaaaaaacttggccctcctgggccctttgcctggacaagcacaaaacaaatttaattttcctaaggcaggggggggcccggaacaatggggccttcagcgggagctggggacttttgtacaaaccctaaaattttgaagtta

SEQ ID NO: 693410 - DNA, 638 bp, Homo sapiens
ataaaaagctaaagctgccaaatttctgttgaactcttaaaaacagctcatgtttgttgtcctctcgggttgtggcctagcctattgcaatgtaatgaagctgcagggttcttgtatagctaaagcgttcaatgcatttcacgtgctgtggtggatgtgggtgctgtagacaggcttcttctcttcctgctctcaaaatacctcggcttgacatttggacagatcctgtcattgtttaagctgagcaaaaaaccacacaaaagttgtgtaagagatgagataacaaaggagcgagagaaatctcatgtgaatttccaagttttaattcgttctccatgaaggattttcattctcagtgaaagtcgcagcagaagagggaactttctgggagtttttgaggaatgcaaacacattttatcacacttcttggaaatcaatgcttgcatagaaaatcaaatcagggaccaagaattcagggaatgtctattgaggggttgaggtgtttattatggtcgttaatttaaaattcttacttggtctttttttctgtaaacattaattggtctgaaaagtgaagttgggtggagttgatgaggtggatggggtgcgtggactaggacaggggaggttcggattca

SEQ ID NO: 693411 - DNA, 113 bp, Homo sapiens
gttagagcatcacaaaaagaggtatatttacagatcccgacggctgagatagggcttacgaaggctgcgaactcccctactcgcgcgggtttttggacttgcctatcccaagt

SEQ ID NO: 693412 - DNA, 124 bp, Homo sapiens
  misc_feature (88)..(88): n is a, c, g, or t
  misc_feature (99)..(99): n is a, c, g, or t
  misc_feature (117)..(117): n is a, c, g, or t
agtgcagatgtgtagtccagctatcaggaggtgaggaggaggatgtttgagccagtagttcaagatcagactgggcagcataaggagnacccatctttncaaacaaacaaacaaacnaaaaaac

SEQ ID NO: 693413 - DNA, 1436 bp, Homo sapiens
  misc_feature (1436)..(1436): n is a, c, g, or t
tccagtaataaatatgaccttttattgggcacccgatgtggcaatacaaaatctcctgtggcaggtgggagtgtggaaaggttctcttctcttcaaattactttccattactattgttcgacccaaaggcaggactttggcagcaaggcctcacaaaccacccaaacaaattattttattggaggccccctgtgtgacttacttacagggccataggcattttggcatgggagaccatgtgggacagatgttgaagggaagtttattcctcacacctttgaatagtgtcttctcaaggggacgcttaaaaatgtgccagggtgcgattacaaacgcaaaaaccacatgtggcacaacaaccccaacgtctcacaaattaatctacatctcccggggttctttatgtgcgtcaaaggcggacacaattcttatattccaaaacgaggctaggggactgtgatcacctattaaggggattgtgggcccatttggccctatttccttttccccctctcttttctcaacttctacaaaacagaaaccattttctacagtgacagaggggcccccaactctatgtgtttgccccaaagcccacctttggggcatcacctagtgcaagtgcgtcgtgcaaaatttacagacgccaaaagaccccaaaggggtgttattcctgggggcgccccattccattttttatagcaaggcgccccgtgaggatataaggcggggggaaaagaaaccgcggacaaacatgttgcaccacccacaagtgtttaccaacagccggtttacgggccacttttgcttttcttaacttaaacacagcgtgcggccaaatctaccacgtgttggcccctcatcgttgcaccggggcgggtaaacacatgtcgacaccccacgacagcaactatgtgcttgcgcgttaggacacagatggcaacccccagcagcaggaacgagcgtcctaccgcgaaccctctgcggccttccacagcggggcacccgctgttgcgacaaggcggggcgccccccccgggtggtgaaaaaccagttttgggcgtacccacaaccagcacaaccttgtatcgcagacggaggaacaagacgaaaatcaggagggacgacacaccgcccacaccgccttctttcgctaacgactacccacagaccacaaagatcattggtcgatatggatcgacgaggacaagtcatgcgtaaacaagcacaatgccctctttgaacacacactaacggggtcccccgcagcgacgtgacaaaacgacggcggcgggcagagcggataaactagcagcagtagcgaccagaccagaacaacagatatcatcacccaacacagccttcctgtgtcaaccgcaacggcgaaatcgcaaaccaccacatctatcgtggtcagagcccccgctcgcggtcgn

SEQ ID NO: 693414 - DNA, 313 bp, Homo sapiens
cgcttatatgacagcgcagcacagagagacatgtgtggatgactctcatgtgtatggttgacaccaggcgagatactctacctctttctgtcaggaccaatattgatttgcggagccttacattacaggaactaacattactgggctctgcaggaccatgaccttgcacaggcacatatagctggaatcctcctgcactcaagttatttaacgtgctgcgttcacttaattgtgaattgcaggcatggcccatatctcaaggccttgtcggcaacatcgtgatactgcgttaacaagcagaacacctctcctt

SEQ ID NO: 693415 - DNA, 896 bp, Homo sapiens
tatatggcccgcccgtcctcttggtgcttctctccttctttggtcttccctcctccacctgtgttttccttccctccactacgtttctctatgggggcgttatccaccaagaacgaagcaaaaatcacagtggggccggttctttacatctggtgtgctcactatctctggtgttccccagacaccaccctttcctccaactgctcttcttataccgcgggggacatcttctgtttttcgccccgccgagagatgttttttttccccacgcgagattttttgtggctcctgttgtacaactccctgcgccttggtgccctcctccccccacttaattggggggggctgctgtgccccacccctacgggagttgctcccccccttgattcccctctatgggctggtccctcctcttttcaacacatacgcccgctgttttttttgctactatcgcggggtcttacatctcctccgcggctgtgccccctcttcgttgattgatgaccacgccccgctctccctatatttttgttcccgcccttgtgttgatcttaattctttttgggtgtcttttttttttcactcccctctcctccagaccctcgctcgtggggtgttttttggagtgccccttcaccctcatgttcgtgcgggttattttcggggccaaaccactttgtggtggaccacccgagcggtcttcctccgggtttctcctgctttttattgggccaaattgttctcccactaattgtgtttttcccccccccattattttctccttttaaccaccccaaacaaccctgttgtgtttgaacccccccccctatttggcctttttttaaatgtgggttttttttttttttttttttttcttttttttgggggggggttta

SEQ ID NO: 693416 - DNA, 933 bp, Homo sapiens
  misc_feature (10)..(10): n is a, c, g, or t
cattcaaatnccaattgcgctataagctctacccccacacttacacatctttgcccgaacaagcagaattttatacacaagcgctctccccaaaaattaatgatgacccccctgggcagtcgcgccactcacaaactttgcccgagactaaccctattaccccggtggtcacccaaaaccttagctctgttccccccacagatgtttccgttaaccttccccgaagagctataagatgaattgtaacaccggcaaccaacttccccgggtgaaacaaacaactctgcacccagggcggcaaaacacaagcggcttcgggaacttgacaacaatggccacgcctggcagttccccccgggatctcctccacgggggtgtttggctccccccccgtccccccttgtgtgggcattccccctgcgccccgcacaaaaaaacccgtgggcaagaccgctgttgttgtaaagagcctcggttccatttacaccacgctctttggtcaagaacacacacttcagtgcggtgcggactactttaaaactcaacaatgtagcaggggcatgaacacaagaatagatgtttttcaagagacatttttagggtatccccgcgcgatgttccttcacgccctggtgtgaactacaatcaataccgaaggggacccataaatttgtgacgcacaaaaatcttgatatgcatgtctctggtggataaaatatacgtcttgtgtggagcagggcccctcttcgcccctgctctcctccaaatgcggttctttgatatctcttagaaaccacacgtagaggaggttaataaaccgatggtagaacaaggaaaatctctttaccagcgagttattgggggcgcgtcgaatcacaccaacacgccctagcgccccccccaaaaagaacaaaaaaaaacagaccacaaaac

SEQ ID NO: 693417 - DNA, 803 bp, Homo sapiens
ccagacgccttggggccccacaacggaggggtagactatcttcccccccccggccagtacacccacagagagggggccttccacccacacacagctgagagagacacatcgcccccacgcgggggtgaacacacacgcccacccggctgtcaaactagcgagagcgatgaagcgcgggatatcacacaacaaagaaaggcccccccgcggcgctctgtctcgccacctgtggtatgacaccacacgcggaaagagaacacacgactggtatagtccacgcacaaatgtgctcatacaccccctctttgtcacacgggagttttgaataaaggaaaaggtagccaagtttcaccgcacaaaggttctgaggcgacttatcagataaaaagcgtaactctttcgtgtacacgcaatttgctgattgaaaagagagtgtgaaatttttatgtgtgtaagatgcttcccccgcactaaatacgcgtcttactacgctctcatcatatatgagtgtgcaaagagaacctcttttacagagcgtgtttcccccccagcaagggatttccggtgccaccacatacctcataaaagtgcgccggtcccacccacaggagggggatagtagccacacactgcgacccgggagaacttctgccacataggattcgcgccaagagcaataaatcatatcacccacaagattggaaggaatggaagcgaaaacacaaagaacatggtgttgggagacaaacaccgacgtacaatacaaaactgttggtggaaacccacaacagccaccccaaaac

SEQ ID NO: 693418 - DNA, 413 bp, Homo sapiens
  misc_feature (243)..(243): n is a, c, g, or t
  misc_feature (261)..(261): n is a, c, g, or t
  misc_feature (283)..(283): n is a, c, g, or t
  misc_feature (297)..(297): n is a, c, g, or t
  misc_feature (312)..(312): n is a, c, g, or t
  misc_feature (315)..(315): n is a, c, g, or t
tccgcgttatagccgcgcccagtatgaccgggtaatggaagagctttacccgcgtctgaaatcactcaccctgctggcgcgtcagtacgatattggtatcaacattgacgccgaagagtccgatcgcctggagatctccctcgatctgctggaaaaactctgtttcgagccggaactggcaggctggaacggcatcggttttgttattcaggcttatcaaaaacgctgcccgttggtgatcgnttacctgattgatctcgncacccgcagccgtcgccgtctnatgattcgcctggngaaaggcgcgtactnggntagtgaaattaagcgtgcgcagatggccgcccttgaaggttatccggtttatacccgaaggtgtataccgacggttcgtatctgccctgtccaaaaag

SEQ ID NO: 693419 - DNA, 749 bp, Homo sapiens
gctcctcagcttcaggcaccatcattgacctgggacagtgaatcgacagtgccgtcttctgtctcgtggggcatcctcctgctggctggccatgtgctgcctggctccctgtgcatcactggactgaggagtccccagggagatgactgtccagaagacagatacatgccatcatgatcatggatcatgccaattcttcaggacaagatcacccccatcctggtcgtgagttcgcacatgcagccgtagtatccgtcagctgtacactaccatgtccaacaagtgaactactatcattcgttctccccgagtgtagcatctgctacaggcttatgctatgctctccctggggaccaaggctgactctcacggatgaaatctcgtggagggtcgtgaatttgcgaacgcatcaggatattccggaggctcagatccatgaaggtttccaatggaactccatccgctacccctctaaacagtcagactagtcgatgcgtccatgctgaccgaccggtcagatggcctgtctcctcagcgagggcctgaggcttggtggataagtataggaggaggttgaaaggttgtacctaatcatgaagccttcattggtcaatctgtcggggacagcgagagtaggccaagtaaatcatgatcaagcgagtactgtggagcaagggtactcatgggaaaatgtgtggatttgggtcaagggaggttgacagaagacagaagttttatgtctggtgaat

SEQ ID NO: 693420 - DNA, 321 bp, Homo sapiens
aggagcatccatgacgtcatcaggataagcgccatggcccctgggtcacaggcttctaggtactctctgctgggcttcattccttctctttaatctctccaactatgtgcttcccattgatgaaggcttcgaagccacacacagcggccttgtcatccaaaggaaagatatatatagcctcaacgggcacgtgacttttatttgtgtatgtctgaaaaacaatggcctgggctacagtgtctatgattctccctttgatgtggacatcctccagaggaaccaagtcatgttataccggtctaacatcacttggttcctcct

SEQ ID NO: 693421 - DNA, 143 bp, Homo sapiens
ccaggccacctccaacactgaccattacaattgaacacgagatttgagtggggacacatatccaaatctcgtgttcaattgtaatggtcagtgttggaggtggggcctgggggaggcgattggatcatgagagcagtttctca

SEQ ID NO: 693422 - DNA, 778 bp, Homo sapiens
agctgggccggcgggcagtggttcgatgagcgcgcagagtccagactggcggcagggcccgaggggccgacccgcagggtccctggtctctccagccctcactcggaaccgcacgtgatgggcaaatccgccccggtggctggcttatcatcgcggggcacagcccctccgtaggcctccctagacggtgtgggcgagagggcgtccgggtcgggggaagcacggaaaggtggcttcgcgaggctgaagtggggggcgggacgggcagcctggcgatgcctggacagtggttggtgggccagaaacatttatcgaaagatagcttgcccacttagatggcagaggacactggactaagcaacgtcttctgccctgtaatgcggtggctcacagctctagtagtcctagggatgccgacggagggaggatcgcattgagtccaggaggtgggaggctgcagtgagccgtgatcgcgccaccgcagctccagtcctgggcgacagagtgagaccctatctctaaacaaaacgaaagaacgtcttcatgcactggagccattgagctggagtttggcttgtctgtcgctctctctacagggatacaggtgaacgggggcagacccctcatcatgctttccaaggcatctggccacttcccaggaactgtctcccgtgggataaacgaggcgaagtccctggcttgtgcaagaagcaagtagctgtgtgggtgggcacagtcagggataattcggggggccctgtggggatgttcttaaccc

SEQ ID NO: 693423 - DNA, 186 bp, Homo sapiens
  misc_feature (109)..(109): n is a, c, g, or t
caggatcctctttgctaggtggagtgaaggaaatctcggtcacacaactccgcttccaggttcaagcgatgcctcagcctcccgagtagctgggattacaggcatgtgncaccacacccgtgcaattttgcatttttagtaagagacagggtttcaccactgttggccggtgttggtcctcgaact

SEQ ID NO: 693424 - DNA, 193 bp, Homo sapiens
gaatttttttttggggccaaaaaccccgttgttttctttatatttaaatggggaggattgggccccaaacctaggtatgtttccaaatcctaaccaggccccttaggggttttcatttgggttttgcttatgaaatgtcatttaaagttccctttttgggccccaataaaaagggaagctggggggttttgga

SEQ ID NO: 693425 - DNA, 325 bp, Homo sapiens
tggggttttttttggggttttaagcaaggtggctcctaatggctaatgggacccataatgaaagccttgttgccgcattagggtaatgggggggggttttgcccttaaaaaagggattcaaatgctctagttggaaaggttcaagaaaatccccttttttacaaggggaagggcttttagggtttcccccggggttttacatttgcagagttttggggggtggggtgccctttgaagggatttgaaattggtttaaattggggtcctaaattttatattccctattttccctaaaggaacccttaataaaatttttttggtcaga

SEQ ID NO: 693426 - DNA, 316 bp, Homo sapiens
aaacacaatcaaagggaccttatgagcctaccttaattacaggcgatatatttggaactggtgcaagatgaatgacagcacctttgtcatccctagataaaagcccccgttccccatggtcctgtgggctgaccggatggcgctggggctgccaacgtgctgcctacaatggctctgcctgctcctgcaacagtacggcccctgcccggagagctcacgaggactagctaaaagaactgactggtggtcgaagcaccatcttcacagatgtataggggcaggcgggggatccacccaccgtcaatgaaggaggcag

SEQ ID NO: 693427 - DNA, 169 bp, Homo sapiens
ccataagcctgccacgtgctactcacgtgcacgtgcacagcccacgtacactgccttggcagcaccatccctactgacacggtctccctaggtaccctgtcagcatgtccatagaacttggccgtaatgttggaccgtaagactcctggaaaccctcgtcccgttccgc

SEQ ID NO: 693428 - DNA, 168 bp, Homo sapiens
tccctgagatggggctcccactcggttcttccaggctagagtacagtggccgatcacagctcagtgcagcctcattctcccaggctcaagcgatcctcccacgtttctgcctcctgagtacctcggactacagtgtgctagggatatcctcctagatgtcgacctgca

SEQ ID NO: 693429 - DNA, 155 bp, Homo sapiens
gactgttattggtcatgagttgatagttcttgtggcagtgagagtgagtagtagaatgtttagtgagcctagagtggctagagtgactagagtggctagagtggctagagtggctagagtgtgtagagtggctagagtggctagagtggctagag

SEQ ID NO: 693430 - DNA, 209 bp, Homo sapiens
gacacacaatggggaatccgtgtactacctagttcagccatgctcccgctaataaatccagacatgggaagtgtccagacaagcctaactctgactatctgacttgtataaagtattactggatttttaagctgataggtattcaggcaatagataaggttaatacactggacaaacagcatcagatactttgtaatatgctaaaagat

SEQ ID NO: 693431 - DNA, 258 bp, Homo sapiens
ggtcgaccgtagagataatgtttattctagagaatgaataaatattgtattccagagaaataaatatcataaagaaaaaaagaatcacaacttctggaaatgaaaaacacacttagagaaatgcagtatgcactggaattcccacaatagactagaacaaatagaagaaagaacttcagagctcaaagataaggcttacaaattaacccaatcagacaaagacagagcaaaaagaataaaaaagaaaaaaagtcgacg

SEQ ID NO: 693432 - DNA, 814 bp, Homo sapiens
  misc_feature (66)..(66): n is a, c, g, or t
  misc_feature (78)..(78): n is a, c, g, or t
  misc_feature (115)..(115): n is a, c, g, or t
  misc_feature (157)..(157): n is a, c, g, or t
  misc_feature (166)..(168): n is a, c, g, or t
  misc_feature (210)..(210): n is a, c, g, or t
  misc_feature (224)..(224): n is a, c, g, or t
  misc_feature (241)..(241): n is a, c, g, or t
  misc_feature (244)..(244): n is a, c, g, or t
  misc_feature (259)..(259): n is a, c, g, or t
  misc_feature (262)..(262): n is a, c, g, or t
  misc_feature (265)..(265): n is a, c, g, or t
  misc_feature (269)..(269): n is a, c, g, or t
  misc_feature (272)..(274): n is a, c, g, or t
  misc_feature (279)..(280): n is a, c, g, or t
  misc_feature (307)..(307): n is a, c, g, or t
  misc_feature (369)..(369): n is a, c, g, or t
  misc_feature (379)..(379): n is a, c, g, or t
  misc_feature (385)..(385): n is a, c, g, or t
  misc_feature (399)..(399): n is a, c, g, or t
  misc_feature (408)..(408): n is a, c, g, or t
  misc_feature (428)..(428): n is a, c, g, or t
  misc_feature (435)..(435): n is a, c, g, or t
  misc_feature (438)..(438): n is a, c, g, or t
  misc_feature (739)..(739): n is a, c, g, or t
  misc_feature (804)..(804): n is a, c, g, or t
cgcctgtttcgcgaccatcacgcacctcccctccgcttgtggccatgtaccgctacctgggcgaangctgttgctgtnccgggccgggcccgctgccctgggctcggcgtccgcngactcggccgcgttgctgggctgggcccggggacagcccgcngccgccccnnngccggggctggcattggccgcccggtgccactacagcgaggnggtggccgaccgcnaggacgaccccaacttnttnaagatggtggagggnttnttngatngcnnngccanntcgtggaggacaagctggtggttgacntgaggacccgggagagctaggagcagaagcggaaccgggtgcgcggcatcctgcggattatnaagccctgcnaccatnttctgagttttttntttcccatncggcgcgacgacggctcctnggaggtnatngaaggctaccgggcccagcacagccagcaccgcacgccctgcaagtaggtatccgttacagcacttatgttagtttagatgaagttaaagctttggcttctctgatgatatacaagttttcagtggttgatgtgccgtttgggggtgctaaagctggtgttaagatcaatcccaagaactatactgataatgaattggaaaagatcacaaggaggttcaccatggagctagcaaaaaagggctttattggtcctggcatttatgttccttctccagacatgagcacaggtgagcgggagangtcctggatcgctgatacctatgccagcaccatagggcactatgatattaatgcacacgcctgtnttactggtaa

SEQ ID NO: 693433 - DNA, 1625 bp, Homo sapiens
tcgctgggtcaatagctacttgaccgcagtactcttgcaaactagagcggctatggctataatacgcctcacactcattctcaacaccccgtgacaagaacacgatagccgtagacccgttcctctgtactagtccgctaatgcaggcataaattataaacacagcatccagtcatgccgtacgagcaagacagcacctacaaatcgcagtaactatgcaatacatcattcaacaatccaagaggcaaccagtagacacccctcgactagctaaaccaagcccaatatcctcagtccgaaccaccgcgcccataacacgacgtatccagcacggacgtcacactcaattcatccacaaagaatcgtcccccggacgagcacgcttaacagatcacctcacacttacagtaacttgtacatggcacagtagcgccagacaccgtcacgacacgcatacacgcacacggccatacctacgacgaagaatcagcccagtcacattacactcccatcagtacagtcacaaaggcgggacgccgtcgtccagacagagccctaccgtaaccgttcacgcgaacgttcacacgtaaggcgatacagtacatggacatgcaaccacagcgccataacggccaaacagagcaccctacggagcaatataagacaccggacggacccaatatatagaacgaccagaccaagaataacgttgcagagcggcgcataaaccttggcggtcaccgcaaaacaccgatacacacaatggactagcacgtacaggcgctgtcaaacaccaagcgggaactacacctgaaccacacatggcaagttacaagacgacgactaacttcaagcgcatacacataacagttacagcagtagcaaaggcggcaccctgaccgacaccaacctaacacttcacgagctacgccaacgcccccccctacgataagcgatacccccgtccgcacacaaccactagattcataaacaaccaaacagaagacaagcgcaaaatgagagaggacactccacgcaccacacgaccaccacccacagagcaccgtgaagaaccagcagcgcaacttacacacaaccgagccgatcacaaatccacacgcagccgacacgtgaaaacacaggacagccgaaccgcacagagagtcacaacgcacaagcaaccagcgcatagaatgatagatacgccaataaaaaccgaaccacatcacaacaacaaccacacaccacgacgaacaaccacccggcaaacacaatcgcacatgaaagacccgggcgaacgccacacccagcagcacgctcacaaacaccgacaaccaccacacgtcgaccacaaagaaagcgagtcaaagagaccacagcgtcgacccgcgatcaagcgcctacatgccacacccacgaatacaggcgcgggaccacacacaacaagacaccatacaagctcggcgtgcaccgaccaccgcacagtccatactcatgcgagacagacacaacaaacgagagagaccacactcaacataaagacccggacgaaacgacaaagctaaaaagagcaaccacgtaccacacggagcggcgcacgtcaccagcagaacacacgacagcac

SEQ ID NO: 693434 - DNA, 148 bp, Homo sapiens
tcggggttggttgaaacccctgggtggggggttgggggaggactaatggggagtcggggaatatttgggggtattttttttacttctttttggttcccagttgtgacacgttttgatcaaaggagaaccaataaagggataacccata

SEQ ID NO: 693435 - DNA, 174 bp, Homo sapiens
gatccccttgtggagggcagtgcaaggcttgcagcacctcggcgggcaggccttcgccaaaacattcgccgaggctttgctcgcgcacaaacttcaacggctgggctgatcaggcccgtgccaacgctccaccagtgctcatttaccctaccttgagcacatacaagcgcctgg

SEQ ID NO: 693436 - DNA, 216 bp, Homo sapiens
ctagcatcgctgataggcatggtggcatgcattctggaatcccagctactgggagggtggggcaggagggtcacttgaggccatgagtttgaggctgcagtgagccatgattgcaccagcggcactccagcctgggcaacagagcaagatcccatctcaaaaaaaataggtcaggccagtggctcatgcctcatcagcgatggctgggttccgagc

SEQ ID NO: 693437 - DNA, 104 bp, Homo sapiens
atccccgtacattaagctcacggcaggcccactttcctggcaccctcgactttcatataagttgcactgcgttcaagaacccacccttgaatgaatacaaggag

SEQ ID NO: 693438 - DNA, 353 bp, Homo sapiens
gctgggtccttgtgtggttaaaatgggtctctctggccaggcgcggtggctcacgcctgtaatcccagcactttgggaggccgaggcgggcggatcacgaggtcaggagtttgagaccagcctgagcaacatggtgaaaccccatctctactaaaaacactaaaattagcttggtgtgatggcgcctgccgtaatgctagctactcaggaggctgaggtaggagaattgcttgaacctagcaattctaggaggttgtggtgagccaagattgtaccaatgcactccatcctgggcgacagagcgagacctcgtctcaaaaaaaagaaaaacctttaaaagatataaagaaaaa

SEQ ID NO: 693439 - DNA, 587 bp, Homo sapiens
  misc_feature (214)..(214): n is a, c, g, or t
cttacgaggtgatgggatggtggcctgcatgcctgcataacccttgggtggctggacatcctgacgggctcttgcacctcttactccttcttcccggacaagcctatcacccagtatccacatgcggtggggacagaacaccctcctcacttgctggagcttaccaggccatggagacgaatgcgccgccgtctatctatcgagtcggcatccnctcgtacttgcttgcagccgcactccattgccttcaacatcatgtctaagtgcatgaaggtgctggcgcccacggtgtctccacacgcacgggtagttccgcatgacaaggccaatgtaattaacgtaagcttgtgagcccttctccgctgcgtggggtgttcaagggacgtgaagggctgtcctccagctgctggcgtgccatggctggtcaccaatcaaatccgcgggtgggggccagaatgacgaaggcgcccccgagcccccaaatgggccccttaccagcgtggttcccactatgaaccctaaagctaggagggtcatagcatccggtggatcgcatgcctcgctcttccaacatgggctaatggggc

SEQ ID NO: 693440 - DNA, 1806 bp, Homo sapiens
ggtgcgggcgccttccgtcccggtcccatcctcgccgcgctccagcaccctctgaagcttttgcagctgcccagaaaggaggcgaggaacggagggagctgtgtgacgcaggacgggatgcaacaacagctcacccctaaacacatttactttcaacggacgcacacaatgaacaacatgggcgcggtgctgcaacacacattgtgcttgtgggccaaacttactatgacaaaccattgacgcgatcctagacgcaagccctgctgccactttgctctgcgctgcgcgactctcatgcctccgctgctttccaaacactccattccggcccgttttccttggcttgcggcacgggccttctcgacttttgccttctccaggtggggcccccaatccaacacccgggccacgcttggttccctttaccaccttggttccgcggctttgacacatttgtatggcttgcgggactttgccccccctggctcccaccggacaacccccaacttcctaacccactatggaacccacaccaccaccttgcgggctatcccagagtctggcccccattcttggcggcctggaacgccgccaatacgttccaacgtctcgggttggcaatcccatatcggaaacgttccccctgtattgcgaagctacagtttggtgaatcaacgcaaacgcggcccacaaacgcctttcccccaaccaaccgcgggcggccacacgagcttgtgtgcacacccgttcctccatacacgttttgaaacctgaacttcccggccttggtttttacataccccccattggcatccgcccaaagcgtacagtttgtgccatcctcagacgtttccgccgccaccagcagaactccatatcttggatcgacaaagtggaaattgtgaacacggctttccccgcgattctggcctggcattatgccccctaaaacaggtttgtaccaaacattggtccccctttgtgacgccgacctaagtcttccccgcggtttggcccataatgccgccgcttgggcgcgcgagcgcaagctttctggcccccctgttgtcccagcacactggccgctttacgcacacggccacaaattccctcgataccgatctttccacacgccaactgccaacagccagcgcactttggcccttcgggtgaagagtcaggtggttcattttcgccctaggttgtggtctgcccccctggctcttgctgctcgccccccccttttggtcgtccgcgttgtctaaacccccgggttctttggctatcgcttggtgtgcagcccccggccccatcgtttgcgctctgcgcgcttgggtgcagccgctctgggctgccacccccctttgtccctgcccttcttttgcgctctccccctatgctgtggtacagacatctgacaacgctttaaacgccccagagtcgtcgggctcatacccagctcttcgcgaccactcacgtttgggcctcgaccaccccttttctccctactccgactttcgctatccgccgcctgacagtgtaaactccgctcccgtccacgtctgaagtggcccacttcgtgacgcctggttctcctccggtcttttttccgcctctcaccgtcgcacgtctcgttggcgttcccaccctgtgggttcccccgtttgtctcccccgcttttctccgcactttcgtcgatgctcacgtccagtgtcggcgggtcccgtgtgcctttgcgtccgccccctaggtctccagcaggtctctgtcctgcttgtaaccccccttgtttcttcgttacgtcgg

SEQ ID NO: 693441 - DNA, 1334 bp, Homo sapiens
  misc_feature (277)..(277): n is a, c, g, or t
  misc_feature (657)..(657): n is a, c, g, or t
gatagtgtggtgggggtcaacgcatagattttatgctgaagggggaggtcgcatgagggagggagaactgcatagtcatggtgaacttgtcttttggaagatgatacagagttgatgtactaattagtatacttaaatgtatgttagatatggtattatagatgacttcttggtgctagcgtaagatgtctattagatccgtttgtactattcattaggctaaatgatttcatagtacgaaaaagagtgagtgaaagactgtatatttgtatgtagntcactcgatgggaagggtacataggactttaaggggtttgcatcaacatgaacaatgtttgggaagaggtttgaagtaatggaatgctagcgtttcgagtagaggatgatcatatagatagtggtgtttgtgttatcgcaaaaaatttgagggcatcaggaggtaattacggtagtcctagtaacttgagtaactgcagtatttaggataggggacaaaatgagtgtagcagaatttagacaatgtgaaggtggaactgtataggagtactttaacgatgtatcaggttttactgatggtgagtcatgggatttattgtaagaaaatacatttgactgtaagggtcgcaagcgtattagagataaggaaggtgtttgaanaacccgcaaggggtgcactttgctttcattgacctcttgtggaattaatttcggcattggactcgggtccagtgcccaagaaacgttaggtcgctcgatttttaccattggcccatagcgttggaaaacgagccttttttcacactataaactccgctaggtacgcgaggagctatgtgctttcaaaggacatgaaaattcggggggaaggggcggttacggagatatgatggtccacattgttgggtgaaggcatggaaattacgctaaaggtttccacagggtgattgtgttaccacaatctgggggagagttagtatcacagtaaggagttagcgggggaacacggttgaatacaaggaaaagaatttttagcagagacagtcaattttggggaacacacttaggggagacgtatttaggagtccgtgttcctttattgaagtaattgcattcgcaacaaggattagttttttaaaacttgttgggagaatagttttagggaaggcaagagggtaataacaagagatcctacgttttgtgtgggaagcaacatacggtataaagtgggggaccaacaggtgtgtttgtaactccttatagggataggagaaatttgggagaggaggtggaaactcacatgagatttatatatcgtgtgtacttatatggtccag

SEQ ID NO: 693442 - DNA, 420 bp, Homo sapiens
  misc_feature (97)..(97): n is a, c, g, or t
gatgagcgcgcgacgggcgggttgatatccgaacgtcgaaaagcgtcacgagggcggaactccgagctgcatggctcgatcacgcatgcgcgtcgcngattccctagcgcggtcgagatcgtcctggttgggccgtcccttgttcacgccaccgaacaagccgagcggccccacagtgtcgagtccacgacatgagaacgatccgaggacggcgaatccattcgactcaagccggcgccggatacgtccgctataaccgagcagcggcagctccgggccgccgctggtgaagaacgtgaaaacgggtcggccatgtccgggaggaagctcgtagatcagcttctgcaaccgtggatgcggggccaggtaatagacacccgacccaaagcagaccaggtcgtagtcaccgatcgtgtagac

SEQ ID NO: 693443 - DNA, 152 bp, Homo sapiens
acatttactactgtaacaaagaaagatatccctcattccaatctagagtagtaatatcctaccatgtgcattgtagagcccattcatgtacaggtctcctcactaagccatactcaacctattattacctctttcctattttcaacctctca

SEQ ID NO: 693444 - DNA, 268 bp, Homo sapiens
  misc_feature (15)..(15): n is a, c, g, or t
  misc_feature (17)..(17): n is a, c, g, or t
  misc_feature (24)..(24): n is a, c, g, or t
  misc_feature (28)..(28): n is a, c, g, or t
  misc_feature (39)..(40): n is a, c, g, or t
  misc_feature (68)..(68): n is a, c, g, or t
  misc_feature (72)..(72): n is a, c, g, or t
  misc_feature (109)..(109): n is a, c, g, or t
  misc_feature (116)..(116): n is a, c, g, or t
  misc_feature (170)..(170): n is a, c, g, or t
  misc_feature (214)..(214): n is a, c, g, or t
  misc_feature (221)..(222): n is a, c, g, or t
  misc_feature (240)..(240): n is a, c, g, or t
aacgaggccatctcnanccacggnagtnattaaccgctnnttatgagccatgcctcatgccagggaangtanacattcagatgtgctgcttgaagctttgcccattggnatgacantgtcctgaggtggtacaccctaaggttacccccatgagtcatgcccttgtttangcccatctgcttgagtgtgagtaaaacctgtgattttctcttancccatannatatggtaaaagtggtangatgccactaacatgatacattatgttg

SEQ ID NO: 693445 - DNA, 1058 bp, Homo sapiens
aattaaatcttttactttatactcacttaaaatcaagaatcccatctaaaacacataggtaccttatctgaaactcttgcacttccccaaccaggcagaaatgaggtgggagaagtttgactaaaatgagggatgggggaaagtaaaagatgtttttttttttttggaaactcgctttgtcacccaggctggagttgcaatgggcacaatctcaacttcaccgaaaccttccgcctcccgggtttcaagcgattctccgtgccttaagcctcccgagttagtggggattacaggcgcctgcctccaatgcctgggcataatttggtattttaagtagagacgagggttccctccagtgtgggcccaggcgggtcctcaaacttccttaaccctcggtgaatccgccgtgccttcgaaccttcccaagaggggcggggattacgagcgcatgagccaccaatgcccagccaagagatccattttttcaatatagattttcagccctttggtaaactcttggtaccgggggagcgtatagagtagaacaaaacaccgtattagtctaacaccattttggtctctacaaatttaccctttaaaaactctttacataccggctaaacaatagaggggcgtgttaccccttaaggaaccaattaggggcccctttgtggaacactgcagatccttgtgcgcctaaaataaacgtctgaactgggaatataagtgtgtctccccaatttaacggcttgtccacacgcgactgcgactaagcggcagaaaacagttttttacccaggacaccttttcacacgtaccgtacagtgcggtgatccaaccccgtgtgatcactcctcacaaattttacaaaatttttcattgtcttggttacacgaaggcttaaccatatttcgagggcggggatccatttaatacaggcggccacacttttcaaattcccacgaaatgtggacagtgtttatactctccaccgggacacaacgattttcgggaaccacgactcccgcaaatctccctacacatatatgtcttcacag

SEQ ID NO: 693446 - DNA, 501 bp, Homo sapiens
gagggaccacagtcagcgtgaagcagttattttctacactacctgtgcgccataaggaatttcaaaggaatattaagaagacgtgcctgtttccccttcgccttctgccgtgattgtcagtttcctgaggcctccccagccatgcttcctgtacagcctgcagaactgatggccgtataagaaaataaacaacttgctaaaactgctgaaactccctctgcttgtgagatttaaaaaaactggctgaaattggttggaaccaacatgtccaatggagtctgaatagaaagagcttgctgacatcacagcccgaatttccaccacatttcatactaactccccctgaatttgcatatgcaaaccacaagcaagcatgatcaaacagacaactgcgcgtgtccgaggactttccagatctcccctttccttccaccaatcacttactaatctgagaatccatcccctaataaaatcactaccttaaagcctgcacaggaagac

SEQ ID NO: 693447 - DNA, 1322 bp, Homo sapiens
  misc_feature (800)..(800): n is a, c, g, or t
  misc_feature (823)..(823): n is a, c, g, or t
aacctcttctgagatagggagtctccccccccacaagagtgtttggcaccccccaagaaatatctccccagggcctttttggtggtaaaaaactggttccttgcgtccccacacgtttgtactcttaatattgtaacccgggggttccccctctataaaagggtttatatcctgaaaggggcccctctttgggtgttgtgtgtgccgaacaaattttccggggggccaccccgagaaagggggtttttttctcccctttggcgtcccccggggggtggtcccctcccactagggggggccccccttatttggccacagccccacaattgggtgcgccccccccccccccctcgtggaatattggcgccacaatagggttctcctttttgaaaggcgcctcccacaccgttgtgcgcccaccccacaacagagagacctttgggcgaaaaccgtgggcgcggccctgttggggcaccaaccgtggggggtttaaaacacccaagcccccgggcgcccccgttaaaagaagttcctcccgccaaggagaccgtgataatgggcgccccccgggcacaaaagcgccaccaaagggcggccgcccccgcgaagatctggcaccactcctggcggtgcgcccctcgcgcgattctcggggggttctcccacaatctccgggcgcacacaatctctggggcggcgcctttgcgcccccccacacgggtttctcgggtgatcccacccccccgcgagaagggtggcgtcgcgcgcccggcgctcccacgggcgttttctacaccccntgggagaggagagcctcacaggngtgggcccgcgcacattcacacccacagagaagagtgtgccccgggagaccacatctgcgcacatgtttctctgttggagatcccgagaggagaggccggggacacacagtctcacccggaggtctccctgcacaggcccaaccgtgcaagccggctgaaaaggaggtatctcccgtctccaactctaatctcttgttctccccaggaagcccctctggcgcccccacagagaagggagagaccacagtttttgtctgagaagaactgtagaaactggccacacccacagctgagccggagcccggtcacatgcccgctcccgggaacgttctaataaagaaaggagagaaaagctcgagagtcacatcacctgagaggagaagaagaaaggaaatttccaaagccttcgctagtttccctatggcccctgcccacgcctcggcttttcggcatacgggcccaaaagagcccagggagcccccaggaccggatgttgta

SEQ ID NO: 693448 - DNA, 177 bp, Homo sapiens
  misc_feature (1)..(1): n is a, c, g, or t
nttctggcttgcactatagcgatgagaaatggtgtatgtacagtatgtcctagtactgtctgtcttctctaataccgtatcacaaggaagaatcactatcagcatattgtcacattatctgtaaagttgctacagaagtacctggccgaacatgtcatgactatcataaataatcta

SEQ ID NO: 693449 - DNA, 1074 bp, Homo sapiens
gaagacactgtggagtgccagttctggagctattgcagcctcggttgccctggccggggaccctgagccgaaaagttatcgtcagaatgtcgtggcaaagaccgaattgaaatctttccctcgcgaatggcacagaccatcatgaaggctcgtttaaagggagcacagacaggtcgaaacctcctgaagaaaaaatctgatgccttaactcttcgatttcgacagatcctcaacagaagcatcaatcagagactcaacacatgttcgatgggcgcaagtgcatgagcagaagctgcctttatcactagctgcaagccgaaagttcaacagccaggtgcacttcgagccactacagttatccaaaatgtccataacgcgcaagtgacacgattcgagcgcaagacagataatgtagcaaggtgttactttgccagtatttgaccattaccatgaaggaactgaacagttatgaactggactggtttacgccagacggtggggaacagttggctcaattacacgacggccttatgccaaagccagtggaactactggatggaactacgcttctctgccgaccttctcaggtcactttggatgcacgctaataaagaatcacacaacagggcgatggtacattgcccattgcaaccattgtcctccattcccccgggattctcaccgttactcttggcgttctactcattcaagcagctgcagcaaagacaaccgaagcagagtctaacgtaaagaaacaccagaccagacaagatcaaacgaacaaccggcccaggccagcagcacgcgaacacagtgaaaagctcgggcacgacaaaactacaggatggacgaaaaggccagcgcaacgctagtgcacacaagcacgggaccggccataacagcaccaccacgggacatgaccgacagagaggccgaacacggacccacaacgccgcactagcggcaacgacaaaaatagccagcagtgaccacacactacacagatcacacagctaaaaagagactagcacggcgaatcagcgacctacctcgctaccttggccgcccccacac

SEQ ID NO: 693450 - DNA, 312 bp, Homo sapiens
aagtgtacttagacagttaaacaccccaataaatgtaataaacattcctatgcaaattatacccatcctaatagtagcagcactgggcccaggtggacaaaatctgctctgtgtgcatgtatcagagtgggcaccagcgctgatgacctgtgtgtaataaacaatgactatatgggctccgtgtactagtaatgcagtgtgggtccaggtaaccctggacagtcatacagagggaacatgagttcgtaggatgctacaggacctctactgaagaagtaagatatagctgcactatccctgctaactttagta

SEQ ID NO: 693451 - DNA, 309 bp, Homo sapiens
atccagagaagggtccttacaccaggaactcactgtcttacaaaaaagcacaacaggaaagcgttctgggcacttagcaagcagaatagcgcggatacctgggtggaggcagggaccaacatgtacttgcaaacaacaggagtgtgggggccttactaccccaggtctcggtccttttgccggaagaaagggaggggtctcgtccgtctgtgggcgaggcctggagccacaaacccgatcactggtactgaatcaccccgcggagaagaaaagaaggcggatcctgccagacctgtaggcggggtttgg

SEQ ID NO: 693452 - DNA, 514 bp, Homo sapiens
gctgctgagtaaatctatactactatcaaatagaggtgaatgcaattactaatgtaactacgaagtctgatttctatatgtcagtcaggttaatcgtaataggctaccagtgtagtaattgacaacatattgattttagaatgtaataaaatttattctatatttagaaaatgaacaagtagaaaagccaagaattctgtgggctctttacttcaatatgagagattcgtcagacatcagcaggagctgttataatgatttaccatccaacgtttatgtctgctctggcccagattgtggtttaggaaatgataatgcagtcaaacaggctgaaacacttttccaggaaatctgccccaatgaagatttctgtccccctccaccaaatcctgaagacattatccttgatggagacagtttacagccagaggcttcagaatccagtgccataccagaggctaactcggagactttcaaggaaagcacaaaccttggaaacctagaggagtctctg

SEQ ID NO: 693453 - DNA, 820 bp, Homo sapiens
  misc_feature (374)..(374): n is a, c, g, or t
  misc_feature (405)..(405): n is a, c, g, or t
ctcccaagtagctgggattacaggcacacgccaccacccgccccctcctaatttttgtgtgtgtgtttttttaatagacacggggtttcaccatgttggccaggctgatctcaaactcctgacctcaagtgatttgcctccctcggcctcccaaagtgatgagattacaggcgtgagccaccacacccggcctcttcttcctctttttatgtacttatgtgaggcatgatttctctgtacaccctctatcctgagagacatcccatgtgactgagaagatgcctacttagtggttggctgtgtctctctgggcctcatgaagcactaatgtcaccttgccttgctttcctgccttccctgcctttttccccctntttcatcatctccatgtctcccaaataaagnattagcacaaatccttgcctcagattttgttttctaggaaacttggcctaagaccattatttatgaattccaccttgtgacggcaaaggagacattaaaagtactgcttatagaaggggtgtttgggcctgataagttgagaaacaatggacacatataatatgcttgtacatgtattaaaatgtctggaaggatacatttaaaaaatgtaaaaaggcttcttactatcagttactgctgagaaatgggactagggatgatgggtatgaccttaatacccttctagattacatgaacttcttaaatgtgcatttcaaaattcccttttaaaaaaggttctttttttatggctaatgttctgatatggtgaataatatatttagcctgtctataaaatcctgaataatagaactat

SEQ ID NO: 693454 - DNA, 250 bp, Homo sapiens
cgctctagaggacccctcgaaaggaggtagggccggggcgggggaagagggaagggctcatgggacaagggcaaagaagaaagtaactaaaagccttcctttcacagtttcgggcatcactaccagtactgattaaacaagaataagagcacattttatcatcatcggctttatccacataaatgaggtggggatgaataagtctgcttttatgcagacacagggaatgagggggctccgtcatggtcct

SEQ ID NO: 693455 - DNA, 634 bp, Homo sapiens
gagcggggagtaaagtgaatggagaaaggtgagatgttgatcaaagggtacaaacttccgttagaagaaataagtgttagtgacctattacatagaatggtgactataataaataataatgaactgtatgtttcaaaatgctaaatgagcagattttaaatgttttaccacaaaatactgagaaatacgtgagctgatggatgtgttaattagcttgatttaatcattccataatgtaaacatataccaaaacatcacattgcaccaggcaggtggctcacacctgtaatcctagcactttgagaggccaaggcaggcagatgcttgaacccaaaagttcgagaccagcctgggcaacacagtgagaccccatatctaacaaaaaaaaaaaaaaaaaaaaaaaaaaaaattttgtggtggggcgccgggccttcgggcgcccttgaagaaagcgtttcttaggacacttcggtgtgtgggcggcgggggcgccaaattaggtgtagtgtaacctgggcgcacacaggtgtcgccaagggagaacccggggcaatgagaacaggtgcgtggggttccctacccaaataaaaaaacggccggggggcgccagaggtgtgtcttggacaatacaaat

SEQ ID NO: 693456 - DNA, 1471 bp, Homo sapiens
  misc_feature (240)..(240): n is a, c, g, or t
  misc_feature (852)..(852): n is a, c, g, or t
ggactatacagagagaaaccctcatgctcaggaggtgtgcatgtacctaatgccggagcgggataggaggcgggccggcacccccttctgacctccagttgcctggctggcctccacgatcagacattgggcacatgaacattgaatgagaccttgtggccggcgacggggtaggtcctgagcagtggctccctgggtgcgacattggtgcactgagcctctgaaaagacatgttttgcntgctgaggccagtggcgccagataggactacagagttgtagtcgctgaagtcatagtggtatcaacgcggatgtcatacgtgtctggagacaaccaagcatggcgcaattctatacatatcaagattcgggggattccaggctgagaacgctgcaaggccaagtgtacccacgctaaattcacattgtgagcccgacagtgagacccatttgcatacatatcaaagcgtaattcgcccgtttgggtattcccaagggtgagcacccgattgtattgctagttgactatttcctgggtgcccgatgaaactccttcggtagaacccattcttccgcttacgccccattaacgagcggctttctctagataggaaggcgctagcgcaggaagtagcgatcggaaacttatacttccccacttgccgagagagttagatatggattccatcggaagctcccgaaaaagtcgtcctttccaaaggagaatggacggtcttccgcgttaagcacctacttggttaaacccgaataaactgaccgcgtaaagtggcgggccttttggaggaagctttaaccgagaaggtgcaaaagcaggaggacttagataaagacnccaagtacaccagttataggattaccaaaaccggacaggcggttagtcgttcccaatgagaaggattggaatcagggcttcaggaggccgcccagtcacgtgttcttgccaagaagttcgggccgccgacttcggaccgcatcggcccgttttggacactcttcgagcccggcaacgagcacggcgtggcccccccgaacggtggggattaatttccagccgctgttagcgtgtctacgggaagtctcccccacgacctgccaggggtgtgggcacacgaccggtttggacaacctatcacggcactggcacagggcgaggcccccaagaacgcggtcaccccttctaccgatagggacacgtttccacttacgccatttggggaaatttggcagcttagcatgggggcgccaatttcgacacacaaggctaagggcccttatgaaactgcctttctattacaggggccccgcggaagcgcaagggcataatcccgaccaaggagccgtttcgctcattgggcttcagtcaaacacaggcgcgcaaatcagtcatacgcaagcacagcgattgggcgccaccccccacaagacacccaacggtcaacggggcgacccca

SEQ ID NO: 693457 - DNA, 223 bp, Homo sapiens
ggagaaggcttcttcggtacccacagaggaggcacttcttggtcagtttcccaggttagaagagtaatttttctttagagcattcctaataaaggcattgaggcatagcatgctcactagaatgaaacagaggtcttttcggttgcagattattggtagagatgtgatgaactcttatttatttatattatatggagacggagactcactctttttggtccac

SEQ ID NO: 693458 - DNA, 373 bp, Homo sapiens
tcacgagtgagatctataattttatatatgttgggatctataatatttcatgggaagttaaatagttgacaaagtatgtatttgctgtgtgtcgtgtaaatattggtattttaaaataaaaactgtgtacattactattttaaacatattcacggcaatttaaatatcacaacaatttgacacccttcattcatttatataaatgagctaggtctttagtaggtaaacatttcaaattggcttttctccttctggatttccataccacttttcaggccagaattctatcataatgtgatctattatgcccgacatcttttaatcattcaccccattactctttgtgaactactcagtccagaacctattttgt

SEQ ID NO: 693459 - DNA, 110 bp, Homo sapiens
gcactgtcttcacagagctcaatgatgagaaggtgctgcaggagctagacatgagtaattttgaggaccagttaaggaccaagtccaagggcccaagcctggacctagcg

SEQ ID NO: 693460 - DNA, 394 bp, Homo sapiens
  misc_feature (134)..(135): n is a, c, g, or t
  misc_feature (371)..(371): n is a, c, g, or t
  misc_feature (377)..(377): n is a, c, g, or t
ctttttttttgaggcggagtctcactctgtcacccaggctggagtgcagtggcacggtctcggctcactgcaacctcaacctcccaggttcaagcaattctcctccctcagcctcctgagtagctgggactacnngcatgcgccaccacgcctggctaattttttgtatttttagtagagatggggtttcaccagttggccaggctggtctcgaactcctgacctcaggtgatctacctgccttggcctcccaaagtgctgggattacaggtgtgagccaccgcgcccagccaaagcccttccttttctcaggtccccccaggcccatcccgtgcgtgtgttcagtagggagaaggcacaggtggtcgacngccgcngaatttagtagtagtag

SEQ ID NO: 693461 - DNA, 843 bp, Homo sapiens
  misc_feature (1)..(1): n is a, c, g, or t
  misc_feature (108)..(109): n is a, c, g, or t
  misc_feature (167)..(168): n is a, c, g, or t
  misc_feature (170)..(170): n is a, c, g, or t
  misc_feature (177)..(177): n is a, c, g, or t
  misc_feature (181)..(181): n is a, c, g, or t
  misc_feature (185)..(185): n is a, c, g, or t
  misc_feature (188)..(190): n is a, c, g, or t
  misc_feature (194)..(194): n is a, c, g, or t
  misc_feature (205)..(205): n is a, c, g, or t
  misc_feature (209)..(209): n is a, c, g, or t
  misc_feature (215)..(215): n is a, c, g, or t
  misc_feature (245)..(245): n is a, c, g, or t
  misc_feature (263)..(263): n is a, c, g, or t
  misc_feature (278)..(278): n is a, c, g, or t
  misc_feature (284)..(284): n is a, c, g, or t
  misc_feature (287)..(288): n is a, c, g, or t
  misc_feature (291)..(292): n is a, c, g, or t
  misc_feature (302)..(302): n is a, c, g, or t
  misc_feature (305)..(305): n is a, c, g, or t
  misc_feature (310)..(310): n is a, c, g, or t
  misc_feature (312)..(314): n is a, c, g, or t
  misc_feature (317)..(317): n is a, c, g, or t
  misc_feature (320)..(320): n is a, c, g, or t
  misc_feature (322)..(323): n is a, c, g, or t
  misc_feature (327)..(327): n is a, c, g, or t
  misc_feature (340)..(340): n is a, c, g, or t
  misc_feature (343)..(343): n is a, c, g, or t
  misc_feature (348)..(349): n is a, c, g, or t
  misc_feature (367)..(367): n is a, c, g, or t
  misc_feature (375)..(375): n is a, c, g, or t
  misc_feature (380)..(381): n is a, c, g, or t
  misc_feature (386)..(386): n is a, c, g, or t
  misc_feature (395)..(395): n is a, c, g, or t
  misc_feature (403)..(403): n is a, c, g, or t
  misc_feature (411)..(411): n is a, c, g, or t
  misc_feature (413)..(413): n is a, c, g, or t
  misc_feature (417)..(417): n is a, c, g, or t
  misc_feature (423)..(423): n is a, c, g, or t
  misc_feature (433)..(433): n is a, c, g, or t
  misc_feature (436)..(436): n is a, c, g, or t
  misc_feature (458)..(458): n is a, c, g, or t
  misc_feature (460)..(460): n is a, c, g, or t
  misc_feature (466)..(466): n is a, c, g, or t
  misc_feature (635)..(635): n is a, c, g, or t
  misc_feature (642)..(642): n is a, c, g, or t
  misc_feature (704)..(704): n is a, c, g, or t
  misc_feature (726)..(726): n is a, c, g, or t
  misc_feature (759)..(759): n is a, c, g, or t
  misc_feature (806)..(806): n is a, c, g, or t
ncccataggcctggggctgttgagacgggagatgtccccactgtgctgcacctggttttgtctcctctccaatccttgagcaccctgatatgcaacatggggggtaannagaaggaggaggcagcctctgatggggcaacggctgagggtgggggcagtgtgtaagnnanctttagngggnagcncannnaaantccatcgccanaaanaatgcnaaagtgtagactgaatgaaattctgtaggnaaatggtaaatggtagcngggccagtagctaantgcaanggnngannaaaaaaagtnaanggaanannntanctnannaaanggaaaaaaggaanatnttggnnaaggtcatcctgccagtnaagaaaanaaaanntaaanggaacaaanaatcaaantggctgtngngganaatcancgcctgggtnttnttatgtcaagacactgagaggncnccatcngcagtggccaagggctgcaggttctgccatgctgggcattgataggtaggacgagagagagcacgtagggccagtcctctgggaagcaggaggtgggccatgtgaatgggagatgggtggctgtgctgtccaggcatctgctgacaacattgggtggatagggccttgngagaganacgtctataggcctggagacagcagggcgttggcgggagaggcaggctgataccaagcgggnactcactgctagcccccagatncagcccgagaggaggaggctggcgggttagggnaggcccaacctatctcacccctgtgatgggttggcctctgagcacangaatgatggtgactatctgagggcacaaggcaggaaa

SEQ ID NO: 693462 - DNA, 293 bp, Homo sapiens
ccaagaggtttcggttgttcctttccaccagggccggcgggggcttgtgtgggacctcgctacctcttaactggttagacatgtgtgtactcaactaacagagttgaacctttctttttacagagcagttttgaaacactctttttgtagaatcttcgaggggatatcttggatacatttcaggatttcgttggaaacgggaatatcttcatataaaatctcgacagaagcattctcagttagacttctcagccttggggactgtgagccaaataaacttgtgttcatcatac

SEQ ID NO: 693463 - DNA, 1809 bp, Homo sapiens
taagaaatagggttttgctctgtcacacagactggaatgaagtagtgcagcctcaaactgttgggctcaagtaatcccccaacctcagcgtccccagtagctgggattacaagcatgtgccactacacccaattaattttttttttttttttgagactgagtctcactgtcaccaggctggagtgcagtggcatggtcttggctcactgaacctgcacctcccaggttcaagggattcccctgcctcagcctcctgaatagctgggattacaggcatgcgccaccacgcccagctaattttgtatttctagtagagacggggtgtctccgtgttggtcaggctggtctcgaactctcaacctcaggtcatccgcctgcctcggcctcccaaagtgctgggattacaggcgtgagccagggcccccggccgtatatataacatcttaagcacatttaatttgtctttaatttgcatttaactttttgtcccttgagaaataacaaacaaaatgatgataaaagttgttaaaactctggctgtatccccactgatttcgagggacatcctcctgttatccaggggagtctaattgtacagtctgttgagcccgggcaagtctgtgcttgagagaaactccccagacgactgcctgcctgtaagagacagtgaggaaacgcaaggcaggagacacattttcttcagttttatctgcgtaagcctgaagctttatgcattgaaatacagccagatatattcataatcatctcttagagcttggccatcccagtatcttcagttctgtgaccctgacagggaaggtcattggtgcagcccttccaagcaaatgcagttaaatttaacagaattttttttttcaatatgccagacacagtggtaaacgtgtaatataaagattgctctgacactcgtttgaatctgaacgactaccaggaaccttccttcttattatccaaagcctttctcttgcaattcactctttcttagcttttataataagggttgactacttgaaaatatggttcaattgtccttaccagcactataagcaattttagtttctcactagttttcatttgcttttcattttttgcaatgaaacccatcacagtctattgacctactacaattattaagtctattttatttgtgattatagtttgtgaaaatacaattaattactcatattatcaatgagagtacaatgtagcataatttccaccacacgttgttaatttaccaaactacttaaatctgatttacggatttttttctcgatagtagtttagatgccgtggtactttcaagatgatgagagaatcatgaacagagaagttcctttcaagtgaaaaatgcagctgtcgcagaatctctagtgtatccaggttagaatatttaaaactatgtattcatattagagagacatcatgggatatgataagcagaaaagagagacactaattgtgaatagataaaaggattcacatatgtcttaaaactttcaaataaaatatgcagagtgagtttttaaaacgtttttcctgtttatcccttgtttaatgttccgttttagttctaagtctatcctacaactaataacagatatgaaaagacttggaatgattgtctctgtgttctttgtgccataatttaaagtggccagaagcaagcaagtggaataaacaggacaattgcagagtttatggaggattaggccaattgcaggcttccacacttagggaggagaaaacatcctcatgaatatgagattggaagtgtctagctgtgag

SEQ ID NO: 693464 - DNA, 1368 bp, Homo sapiens
accacgcgtcgggcaggccattggagctgggcacagctgggagagttctgtacactcctcgccacatcctggttctgtgtgctccaagtgccatcaaggccctgagggacctcagactcccccaccccctggcttctggagccatccccagatgactagtctcctcagtaaggcaggagggaacctctaagaaaaagctggtcaacaggtgcatggcgtgggatggcaagagtgagagaccggccctgagatcctgcgacttgccaacacactgatgctgatgggctggctggcccatcagacactcggtgcccagaggagtggctaatggacctacagcacatgtgcacaggtgccttgaaagcagcccatcctgacatacacggctgaggagcacagaggacacgccgggcccctggcacctactggcgctccagcaaccccacaagcgcccgcagctcaccacaacccacggctgaacacagcaccagacacctgcatcccccaacgcactcctccagagcccaaggcaaccggatccatgtccgctttgcacacgggcagcaccaaccgcactgtcctatgcgccacccctcaaaaggtccacacgcggccagcaccgcatgttgagcaccacaatcctagaccccacaacaacagaacactaacccccttgctcacaaaccggagcacccacctctcccccgcacccttaggcacactcccaccagacacaaacccgctacaactcccactcaccagtcccaaatcctcaccccacataacccccactcaccagtgctaatacaaacacctcctcatctcacaaagccacaccaaccccacacacactcatctgcccaccaatccacacaccacatcctcctaccggatacccaacctcttaacaataccctaccctctccgtatcactcaaaccactgaccaacacacccaccataaccaccaaccaactcaacaatcccccctacttcactaacacaacacactcaccttcgtaaccatcccctgtcacaaacccacatcccagcgacactactcaactcacatactactacaaaacacaacaaatactcctcacgacccccccactacaaccttaatcaactacaccacccccctcaccagaccacagacccccgcacgcgccgcagagagcagacatacgcggcgacgtacagaaaccacacgaaccacgcccgcagcacgaagcgcaaccagatagaagcagcaggcagacacaatgagcggacagctgcccaaaccagcacgacgcgacacaccagccaaggactcacctagaaccggcggccagacaaacgacgctcatcaccggccaacgacact

SEQ ID NO: 693465 - DNA, 531 bp, Homo sapiens
accccccgcaccactgcaacctctacctcccagcttcaagcgattgttttgcctcagctttcgaaatagctgtgactacgggtgtgcaccactatgcccaactttcctatttttagtagagatgaggtttcatcatattagccaggctagtctcgaactcctgacctcaggtgatctgccagcctcggcctcccaaagtgctgggattacaggcgtgagccactgcgcccagccctattctttcaatttctttgttttcttttgagacggagccttgctctgtcgcccaggctggagtgcaatggcacggtcttggctcgctgcaacctcctcctcccaggttcaagcgattctcctgcctcagtctcctaagtactacaggtgggctcctccacacccagctaatttttgtattttcggtagaaacagggcttcaccatgttggtcaagctggtgtcaaacccctgatcttgtgatccgccgccttggcctcccaaagtgctcaaattacagatgtgagccaccgcaccc

SEQ ID NO: 693466 - DNA, 142 bp, Homo sapiens
gggggggccccggtcccccccctgccccctggttcccccttggtccccgggggtttttcccttttttgggggggtttttttttttggggggcctgggcccccccctcaggtttttggcccccccctttttccggccccccca

SEQ ID NO: 693467 - DNA, 845 bp, Homo sapiens
  misc_feature (320)..(320): n is a, c, g, or t
atgcgctgcatatcgtcacctggcggctgctattaagtgtgcgactttgttgatgctgctagctagatgggacgtgatcgatcatcctgcatgattccgaggatcctgcagattcaacagtaaaagacgttatagtaggatatacatcgccttatagttggacggtagatctactagtggagtgctcccgccaatcataggctgaacatatcgagagatagtaactagatgccagtggagccctctagtagcgatgagatagcgtaagagaagtcaggaatcctgcgcgaaaaccgtgtgtgtcgtcacattccaagtcnccagaggcacgtctagagaactgtggagtgagatcatatccctagcatgagtctgcacaggttgctacacagatatcgaataggtgctcgatcaataggtactatacttgacaagaaccaaataaagcgtacttgtgcacttaccactgtgtccaatgtccaagacaaactggcagggttacacaggtcgtggtacgactgcgtagccttaacttctctcacactacccgggcgtggagcgtatcactgggttccacccaggaataagcgcgtagaaagggggcgcagccggatgcgttcaacgatgtcattggagcaacaaaggccctggcagctgggtcggaccagccctcctagtgttggactatggagacctccttagagattccaagtgccacaaggtgtgacaaggaaccgcagttgcaggacacccgattggagactgaacaaatccggggttgtcctgaggaggacaacacagaatggactgtatcacactggcagatggcaatcttgactgatgtc

SEQ ID NO: 693468 - DNA, 116 bp, Homo sapiens
tcgatctaacgatcccgtcgagtctgggtagaggctggattggaggggatcatgctagttgtgcttggacatgtgagctccagccttggcttcacgctgtcgatctcacttggtgt

SEQ ID NO: 693469 - DNA, 734 bp, Homo sapiens
  misc_feature (10)..(10): n is a, c, g, or t
  misc_feature (20)..(20): n is a, c, g, or t
  misc_feature (87)..(87): n is a, c, g, or t
  misc_feature (114)..(114): n is a, c, g, or t
  misc_feature (119)..(121): n is a, c, g, or t
  misc_feature (127)..(127): n is a, c, g, or t
  misc_feature (471)..(471): n is a, c, g, or t
tctgggcttnaacatttatnacaaagataaaagcagaggctggtgagtaacacttcttcctccccaccaggtgctctctgcagctcnggaaaaagggtgtcctcttggtggtcncccannngggtgncgccaccttccagccccgccccagccatcatacccagtttcttcagtctcgtgccagcggttaacgtgaagccttcccagaaactccgtggactccggggccccatagttacccatctttctcccaggtgacccgaggagtctccgtgccatcacagtatcgcccgtgacacctgtgtataaccgtgacaagccgtgtagaggttcgtatcacatataagaccagacaatcagctgaaagaggtggtctttcgagaataagaggggatatctgacaagcaaggtgcggtgggtgcaaccatgttgtttctccccaacactgtggagagacccatcagagtgtgngcgcgcacaagtggcacataaccacaatctatatatggacacaagcgtgtcacctcacacaagacaagccattcaagaaaggacacaacccacattcccaaggccatgtgggccccctttgggtctcttgcacccttgatgagtcgcttaggtcccaggggcttggggtacacgagatgtcgtgccagacgaccgattgtccaccacctcacgtacgtgggggaaaacgtagcctggttcctccctcgttgggtcccagctac

SEQ ID NO: 693470 - DNA, 110 bp, Homo sapiens
acgtgtggcactgtaaatattaccaaaggtcacagacatgcgtagtagatgagatggggaggctagctaaagaggaggctgagaggggaggagggcactctatggttgga

SEQ ID NO: 693471 - DNA, 821 bp, Homo sapiens
  misc_feature (394)..(394): n is a, c, g, or t
ttgtggtgcgagcacacaatatggttctcgctcggggggtaaatttcgggggagaaccttttattggggccccgttcgcaggcatcccatcacaccatcacactcatctcgcctctctcctgggggagaatgattatcacaagagagcccacttcgggggcgcttttttgagaagagtaccgtcggtgagcatcgtttataatagtagcagtcgcggcgcgaaaagagtggttgtgatatcatccccctctttttgtatatgtcggggtgcgcactctctctcacgaaacgccacgttgttctcacagagacagagctaaaaatgtcaacgagacgatacacccccctgttcccgtctctgttgcacgaacacaccctgggagcctggaggacncaaagggaggggccctcgggggagaggtcccataataggggtgagggcaccccggtgatattgggagagagaggacccacagaggccacaggggggtccacagcaccacttcttttttgtgagactggcggtgtctacctcgcctgcgtcagtggcgttgggcgtccaccagggacagggggtcagaggcatctccacgtaaattataatgggcgtaatataaaatagatgtcaagagatggacatagagatctaatttttttttgaaacaattcccctccccaatccctcttcccacagagttctggactgttccaggccctccagtgggctgattctgggacccttaggatgggggtcccaggactcctttttcctgtgaatggaggcagagacctccaataaagtgccttttggggttttttta

SEQ ID NO: 693472 - DNA, 403 bp, Homo sapiens
ggattggtatgtttgggcatcattgtttagtataaagatttgttgaaaatctcatgcgtttgagtgggttaagaatcatgctatggataggacaaatccaatgtctccgatgcggttgtataggattgcttgtagtgcagctgtgttggcgtctgttcgtccgtgtcatcatccgattagcaggaatgatatgattcctacgccttctcatccgataaagagttggaagaggttgttggcggttacgaggattattatagtgattaagaatagtagtaggtatttaaagaatcggttgatgaaggggtctgagtgtatgtatcatatggagaattctataattgatcatgtgacgaatagtgctacgggaatgagctgttctaactggagctgttgtaactgg

SEQ ID NO: 693473 - DNA, 1327 bp, Homo sapiens
ggacgtgatgtctcggagaatagttctccgttcccaggacatgggtccctcggcttcctgcctcgtgaagtcgcagaagcaggcatcgctgcgaaggtgaattagcttaccttagcagtatgatgccgtccagatccggtccgaccgtctagcaggccttcctgtcggatacaacgggctggtcagtgagttcgacaatcgtggcagggcatatctcgagtgagaccgcgtgcatctcaacggtagtaactaatcaacgtgaggtgtagggttggacgagtctagtgatcaagtttgctactgtgggaacgaactcaatcctagtggttcgtgtcttgctgcgtgccattagtttgaagacgtaagctgctagtaaacgaatcccatcttgcagggatgagttccttccctagggtacgcgtctcctacaatgcatccttgttgcgtacttggacatggtatgtccagccacttcaatgtagtaatgcaaagttggccgaaaggaaagggccggttacatccccattagtcacacgggagcactctagtgcacgcacttaagaccaattcggttaaacgacagacgaacactaggccgtttttgacctcaataacgggtgagacgttagcctaaacgaaacattagtggtggccaaccggggttacttggattgcggtagttgggggtcggataggaacaaggttcgaccgttctcggagaaagggaaaaggggcaagcagtttccaaacgccgatggcaattcgcaagcggaacaagctgtacccattgtccctatcaccggtgcggtttcccaagagtggttcgattttctagactcccggaatcaaccccccgattggacttcgccatggcacagtgggtcttaactcctccgttgcgttggggaatagcccaataggggaaaattcgagaacgcgctgttagcgccaacccgcatatgcaaatttgtgggaatgcatctcactgtaggccgcattggaggctctggtaacgaaggggccactcgggttggctttggcgggtgcccgttaccgttagaattgaccttttgggggaattcaatggggcccgcagtccccagttgcccacgaaaggtcgaccctcccggaaagggcgcggcccccaaatcattggataatccacttagagttgtcaattgcccgaaacaacggtacagtttatgttgccggcgcgtcaaaggcagcaaaatgcacgttgaacttgccactttcgggaacgtgggtaccatatgtcgcgatcacgttgccgtagtataccacaccattgtgggttacacaaaacgct

SEQ ID NO: 693474 - DNA, 406 bp, Homo sapiens
ctaagcgagtttcggagacgcaggggacactggagtatccatgtggaaccccagattcagcaacaggctgagaaggtcactgtcggaacaagatgcacagcctaatgccctctcgccgtgcccaaacgcaacccaactctctctctggccaagctgggcgccgttaatgctgtgtttctattctgttgtcaccctaggatagtcattgcaacgtgacgcccttgtcctttcaggttcaggcgcagctgcaggtggacagcgctgtggcgcacgcgcgccgccgcctgcatccgcacctggccgcgcacgcgccttgcatgatgttgccagcgccgcccttcggaatgccgctccccgcgctggccgcgtattagaatacggggacgagggtagtggcggcggctag

SEQ ID NO: 693475 - DNA, 143 bp, Homo sapiens
aatatcattcgggctggatgtggggaggggtaattaaaggggttggctagggtataatcgccggtcacgagatatccatcctcatcctagcaataatccccatcctccatatatccaaacaacaaagcataataatcgccggt

SEQ ID NO: 693476 - DNA, 284 bp, Homo sapiens
agctgccatgtcatgaagctactcagggaggtccatggagaggtccacatggcaaggaactgaggcctcctgccagtagccagcaccatcttgctggccatgtgagcgtgccatcttagatgcagatcatacggccccagtcaagccttcaaatgactgcatccctacttgacattttgactgtaacctcatgagaaaccctaagccagaacaccagctaagccactccccaattcctcatcaagagaaactgagataataaatgtttattattgttttaagct

SEQ ID NO: 693477 - DNA, 472 bp, Homo sapiens
  misc_feature (10)..(10): n is a, c, g, or t
  misc_feature (18)..(18): n is a, c, g, or t
  misc_feature (29)..(30): n is a, c, g, or t
  misc_feature (55)..(55): n is a, c, g, or t
  misc_feature (63)..(64): n is a, c, g, or t
  misc_feature (78)..(78): n is a, c, g, or t
  misc_feature (102)..(102): n is a, c, g, or t
  misc_feature (107)..(107): n is a, c, g, or t
  misc_feature (122)..(122): n is a, c, g, or t
  misc_feature (128)..(128): n is a, c, g, or t
  misc_feature (138)..(138): n is a, c, g, or t
  misc_feature (200)..(200): n is a, c, g, or t
  misc_feature (203)..(203): n is a, c, g, or t
  misc_feature (367)..(367): n is a, c, g, or t
  misc_feature (369)..(370): n is a, c, g, or t
  misc_feature (376)..(376): n is a, c, g, or t
  misc_feature (389)..(389): n is a, c, g, or t
cgacccggantgtgaaanggatcacatcnnggagatatttccacctatgggaaantacaatgnntgggggccgtgganaggctgcatccccatctgtccaanggctntgcgtacgtagagtncgagantccagatgangccgagaaggcgctgaagcacatggatggaggacaaattgatggccaggagatcactgccancgncgtgctggccggctggcctaggccagcccccaggagattcagccctcccaggagaatgttgccaccacacgcctgtgtggcgcaggtctcccccatggatgaggagaaggtcccgctccccgaggcgcaggtcccccgtgcgccggagatcacggtccccgggncnncgccgncacaggagccgcnccagctccaactcctcccgataaacaggccactgaagctctcgcccctgtaacttataccccacccagctcagtcgaacggac

SEQ ID NO: 693478 - DNA, 710 bp, Homo sapiens
  misc_feature (6)..(6): n is a, c, g, or t
  misc_feature (17)..(17): n is a, c, g, or t
  misc_feature (33)..(33): n is a, c, g, or t
  misc_feature (285)..(285): n is a, c, g, or t
  misc_feature (357)..(357): n is a, c, g, or t
  misc_feature (426)..(426): n is a, c, g, or t
tagggnaacagtttttncagccccctgccccanaactggctggccccccaaaagcttaccaccaggtccgtaaaccagttttttgggcagataatatcgagttcttcgggggtacaagggcaaaggctccaaggggtctcagtggtttgccacaaaaaaattccccccaaaaccaccagggccctgccaaagtggcctgtattggggcatggcatcctgcttgtgtaccttctttgtggcacgcgtggggcagaaaggctccatccccgcccttagatcacaaanaaaatttataagattggccaggggcttccttatcaagggcggcaaactgatcaaaaacaatgcctcccctgnctattacctattttacaaaagcatcaaccctttgggtggctttgtcccctatggtgaaatgaccaaaanctttgtcattcttaaaagctgtgtggtgggaaccaaaaaacgggtgctccccctccgcaagtcccttttggtgcaaaaaaaaagggggggctttggaaaaaatttcccttaagttcatttaccccccccccaagtttggccatggccgctttcaaaccatggaggaaaaaaaaacattcatggggccccttaaaaaaaacccaatttcaaaagaaaaaagagcttaattccaggaacaaatttttcagttggtggggtttcaaaaaaaattattttccccttga

SEQ ID NO: 693479 - DNA, 106 bp, Homo sapiens
ctcactacaatctatccgtagcgaacaagcatatgacgcatctctccctctgaactctacacaagcatatttgtgtcaccaatgacccttacttctaatcctaccc

SEQ ID NO: 693480 - DNA, 251 bp, Homo sapiens
gatgggggtgactatagcaagtggtggttatgtaatagttctatagtccttgctgtcttttcaacaatattcacagcatcttcaccaggagtagattccatctcaagaaccactttctctgctcattcttaagaagcaactcattcattcaagttcaatcataagattgtagcaattcaaccacagtcctcccagcttcacttcttcaatcactagcaccgagaccacctcaaagagtactcccagcttca

SEQ ID NO: 693481 - DNA, 888 bp, Homo sapiens
ggaaaacgaacctgtgaatgttgaagaattagctttcaagcttggcagtcaccagtattaaaaatccctcagacctcccctcaagtgctcaggatcggagggatttttgaaactgtggaaaacgaacctgttaatgttgaagaattagctttcaagtttgcagtcaccagtattaaccgaaaccgaaccttgatgcccaataccacattaacctatgacatccagagaattaatctttttgatagttttgaagcctcccgaagagcatgcgaccaactggctcttggggtggccgccctcttcggtccttcccacagctcctccgtcagtgctgtacagtctatttgcaatgctctggaagttccacacattcagactcgctggaaacacccttctgtggacaacagagacttattttacatcaacctctacccagattatgcagctatcagcagggcagtcctggatctggtcctctattacaactggaaaacagtgacggtggtgtacgaagacagcacaggtctaattcgtctgcaagagctcatcaaagctccctccagatacaaatcaaaatcaaaatccgcagcttccctctggcaataaggatgcaaactctgctcaggaggatgaacgaaaggcaaggagttctatgtgatatttgatttgttcgcacgagaaggtgctgaaattctttaagcgagatttgttcctggggcctgatgactgaattactttcgcctaattttttcaccaaccctggacttgtttgctttggatctggaaccctccacgggccagggggcacatgcgggggttcgcggggggaattggggacccccccgggtttccccatttgaaaaggccccgggaatattggggcccccc

SEQ ID NO: 693482 - DNA, 250 bp, Homo sapiens
tgagctggcccctcttggcgagctgcagctcagggcgagctgctttgaggggttccagtggtgctgtctggctcctctgactcctcatcctcactctccttctcctcctgctcctcctgctggtcggctgtggcttggtgctgtgcgtaattggcactggtggtgtgggagcgtgagcttgcacgtggtcagatctggtgattgctggtcagatcccggtgctcatctgagggcagctcgcctctgagtt

SEQ ID NO: 693483 - DNA, 180 bp, Homo sapiens
gccgcgctggtagcccgtcgtcgagccataggtgccgatggccaacgccgacggccgtggtgttgccggacgtgccggacgcgatgctctgcacgccggtgttgtcgctgagctggctcagcgtggtgccattgccgctgccgttgccggcattgcccaccatgtagtagttgccattgg

SEQ ID NO: 693484 - DNA, 115 bp, Homo sapiens
atggtgtgtactatcggaccacgggtcgaaccctacacgggaaaagtgaaaaaacattcatcgttctacggcctaaactgtgatagctaaaaatttgagcatatgaacgaaatga

SEQ ID NO: 693485 - DNA, 317 bp, Homo sapiens
catagctgattccagaggatacactaaaggcgagtccaggcacatggcacctctagcctctacaaaggactagatctctcaaaactacatgaaaccctccgtacccatactcgcctggtaagcctatttaataccaccctcactgggctccatgaggtctcggcccaaaaccctactaactgttggatatgcctccccctgaacttcaggccatatgtttcaatccctgtacctgaacaatggaacaacttcagcacagaaataaacaccacttccgttttagtaggaccttttgtttccaatctggaaataaccca

SEQ ID NO: 693486 - DNA, 169 bp, Homo sapiens
  misc_feature (134)..(135): n is a, c, g, or t
tgttgggtttacaggtgtcagccaccacatttgaccccaggcaggcaccagttttaaaatttaagactgtgttgattgatttaaaagtgaatgtttctttgggctattgaaatattgcactgactcaacctatnnttatgtacctttattcataatatctcattgctta

SEQ ID NO: 693487 - DNA, 150 bp, Homo sapiens
gcttttgcggtgcctttcaaagcttcacagctgcagcagtgctatgtgtgggacacatcacccccaataatccagcagcacagagccagtctgtgcatcctcacggtccgggagggccacatgccacctgtttgaagctcacagcctctt

SEQ ID NO: 693488 - DNA, 181 bp, Homo sapiens
tgcttactactggagtctaacctttggctgtgatgaaacaggaggagtactgatcaaaggtttgatagggactgtgttagtttgaggtgtgcacatggtcggtgaagcacactcgggtcgcgcgctcgtactcgttctcgtggtcatcggtgtccacaggagagcgggcgaaaaccaggag

SEQ ID NO: 693489 - DNA, 230 bp, Homo sapiens
catcgagctcggccccagttacacagcttttgaattgtgtacgtttgagaggatttgaggggcatgagattattggggatcttttcattcctagatgtccataacttccaagacttccttccaagtaagtgcagaaggacacaggctctctatttaacaaaatgggtggtctatgcctctcttcacttatactttcttaagcctgctcattgttgagctgttgtaactgg

SEQ ID NO: 693490 - DNA, 723 bp, Homo sapiens
  misc_feature (597)..(597): n is a, c, g, or t
gctgtcatggcggagaccgtctgagagcgactgacaccgaggtaggcagtgtatcactcccgggaccccgtgctgcgaaacttgcgccctccgaagtccacctgctactgaatcacattcgagcaagtttcttcatgatcagcctgtctggcgaggctcggtgaagtggacctcttatgatcttggccacttcataagagcctcatgaccaattgccagtggacgccgtccagaggaggatgaagaggaggagctcgggatcgggtggcatggagaagtgtacggtatgcacagatagtgacatggccattgcgtggtgtccattactttcaatactggtagcctgcgtggtgtattgactctctcctgaaagccgcggactcaagttacaagcgagttctgcaatcaggggtagtaaatgtgcatccggaatgagcgaccgggaggtcaatgttgctacatccacttgcaaggtcagaacagatatcgtactgggtgggcatattaagtggctctagggaatgcttcgacaagatgaacaataccgagtgggagtgggaacccggaattgccccgagatgctacttgagagtagantccatgtcgcttatggtgaccttggccaacaaaaagcacaagcgaaacctcaaggccctgtattgcccctgcgctaccaagctgcaacgcggaggattgtggtcctggccaagagctaacatggga

SEQ ID NO: 693491 - DNA, 537 bp, Homo sapiens
tcatcgctctgctggtagtgttgagccaattacgtgtcgtttgaaacctccattgtcaggtggtttattaaagattatcttcccgcggacaagagctagtgtttagccactttggatggtacgagacctacggtttaacactaccgtgcacgtactcacggcccactatttgtgtataggacgaacttggggagctacgcttctctgtctgtatggtcgtcgaccccccttgttgtcctgcgggcgaacaaagacttactgtatgcacctacgggcgcactacccagagctaatgacgcgacctgataatatttcgcgggggtaaatgagatgtaccccaccacaccgaagcggctgatactcacccacccccccaccttagggccataacataggcgacgcgacgtattgacgcccgtgggcacaccacccccttacgcggtttcttaagaccgtgttgcctgccatattgcctcggtagttattattctcactcccaatatgcccgccgtttttcacccacacaaatcacaccag

SEQ ID NO: 693492 - DNA, 232 bp, Homo sapiens
  misc_feature (220)..(220): n is a, c, g, or t
tgttaatgtgttatatcacattgattgatttgcatatacttggggtccttggcagtaaaagagtgctgcagtgctgcctgatctcttttccttcgtatcaggggtagttgtggccaaggggatgccttgtggtaggttcagcacatgggcatgtttgggcacagagatgctactgttagagtgcaggcatgcagtagtcagccgcatagctagtttgacnatgtcatcaagt

SEQ ID NO: 693493 - DNA, 879 bp, Homo sapiens
gtcgaatggattccaaacaccagtgtgtaacgctaaatgatggccacgttcatgcctgtatggggcatttggcacctatgcacctccagaaggtaccgacccaagtatagctttggaggtcacaaaatcagacaatagaagctgggttccgccatatggcattcgtgctctatgttatacaatatagtgaggagcaggttggactggcgccgtccgcatttgaagattggtccgagtggcagttgtgacacgagagcacgacatattcctaacatctgtcaaacgctttggctaccactttgtcattcgaccagagttggtccggagccagcgcttgtgaaaacttcactgagacgaacagctcaattggagctatgtggaccctctagtcttattccattctccaatgtctctaacagccaccggtgaaggaacctttcaccagacatggatgaaccctgggaagaggtaactacttctgacatagttggatctctgtaaccacctggagggcccttggacgaacgttgtaacggattgctgcgatgggccctaggtcccatttgtgggttgtcgaaagcttttcaatactgcttgtgcggggcttgtaatgaattgaattgcctctaactagagaccatggacctcatatgtacaaagggccttgttctgataaccagggtgaaatggtcactccggtaattcaaccccgaagatcaattggctccgattctgcaaggtgccacaaatattggttcgtggttggccactaatgcactgcggttccaccgagaaagaccgatgggtggacccaggagacccgcgcgcactcgagagagagcaagacactgtgccctgggcaaaccgaagaaccagact

SEQ ID NO: 693494 - DNA, 814 bp, Homo sapiens
cggagcatggagtgtttgtaggcaggggaggtgatctttgaagtcttgattgttgtgttttcatagttgcagcgtatgatgcggagttcacgttgggggtgagttccacaccaccaccctgggtaccctgatgtagtttccgggctcaaagctggcaaagatgttctatagcttatccaaggcctccacggacgcggagggccgctccttcatcgaccgccccagcacctatctcagacccattctgcactacctgcgcactgggcaagtgcccacacagcacatccctgaagtgtaccgagaggctcagttctacgaaatcaagcctttggtcaagctgctggaggacatgccacagatctttggtgagcacgtgtctcggaagcacattttgttgatagcgccgggctacagcgagaacctggagctcatggagcgcctggcacgtgcagaaaccagaacagtaccgataaacatcgcacttgcgcgcttgttgtaatctcgggagcatgatgcatatcatctcgatgccctgttcttttttcctactctaagatgtgtcctccttcctcactcgttgcacccgtatcgctgccccaatcatcaataatcctatgccctgtctcatgactctcatgaatgcacaatgttacagcgctcttcttctatgtctcttaatctcctcccactctcaatccatttcatttgcaacttgcattcccgcctatctctttacggccgtgttgataaccggtattgctcgactatggcttgcccttatttctcgtggcagtcgcaacatcacactctcttc

SEQ ID NO: 693495 - DNA, 214 bp, Homo sapiens
ttggcatggacaggaaggtctcggatttaaagtctgtgcaggtatagacagagaagcgactttggcaaaacgcagagtgaggccccaggcagggaggaggtgagacactcggtctcggcatctggctccactggaagagaggtatacccagatcccagggtcaaaatgtaagtaacgcacacatgcatccatgcctgtgtgtgagtataaagga

SEQ ID NO: 693496 - DNA, 299 bp, Homo sapiens
tgcatggtctgatcatcaatgtggatttccatataggatttttctggcatcgatgggctgggttgatcttggcttggcctatttttttgcgtagtcatttcgcatattgcccgtccctttagggatcgtaacaaagaaaggataggaaatggaccggccttggaattagattcgtggcccaaagaatagtaacaataaggacccccagtatgtattcaatattctctgggggggccatatggacatctatatagtattggaatgtatttgggtcccaatgggacataagtatttctggg

SEQ ID NO: 693497 - DNA, 109 bp, Homo sapiens
tcgagcctgtaccctatcgtgtaccagagacaatgaagtggagcaggaagatctagcacagtccttagccatggtgaaggatgtgattggagctgtagacagcaaagtg

SEQ ID NO: 693498 - DNA, 808 bp, Homo sapiens
agcggagccccctgacctgcagcctccggacctcgctgcagcgcggacccggccgaccgcccgaatgagtcagctgaggctgctgccgtcccgtcttggggtgcaggcctgcgaggcctccatggccatgacacatgaccgtacccggctgtttggcatggcaagcagcaggtcctccgaggcacaccggacaccttcccaagcagcaaaggtgcgaaggcggctccaggttacactggagcgagatgtacttcgcctggttgcgacaacaccccctagagctgatccgacacaagctccgtggcgacacagctctctcccagagggaacagcccagccgcagggacagcccactattacctggcctctgccatcaagcacgacggaacccccatatcatggttgtcccaatgacggcagccagagatgctagccacggtcgtccaaagctcgggaacacgcaaggaagccgagggcgaacacgtacggcaaggcacgagaacccaaccctggggcactggtggacgagagaacccgtgcactcgcgggggccccttacacaagcaatcccgcggcgctccaccccacggatgcgcacccccaagacgctggggagaacccccccccctggggggacaagttttcatggggaaattggccacgaaaaccctggggcaccagctccgcatagtagggctggccccggtcacgggaaccgtgtggaagtccacgcccaagccccaagttagggactaaacacacctggggcccctttccgctagttgaaacgcatttaccagcgacgggc

SEQ ID NO: 693499 - DNA, 99 bp, Homo sapiens
tggcgggatgaagcctgataaggagaagggatttcggaacgtggtactgagattcttctgctgcttaggacgatcgtcggactaggagccattggactg

SEQ ID NO: 693500 - DNA, 448 bp, Homo sapiens
  misc_feature (224)..(224): n is a, c, g, or t
agagagagtagagagagagagagagagagagagagagagagagagagagagagagagatacagagagagacacagagagctaccgagatagactcctctttccctcttctcgcctctatctcgctctattgtctcctccttacactctcgttgtgtctctttatgctccatcctttcctgcccgtgttccttcgtcacttgcttctccttgtacgcccttttcntctctatggttcttgtcctactcgtttcatctccttgtccgatactatgtactctctcactcttgcatctcacacctatgtttccttcagctgatcattcgcctcctttctcatacctccttttctgttgtcctatatctgcttctcgtctcattcccttcctcctcatcattgctatccttcacattcgtcttgtcctccttcttttcctcctcgttccctcc

SEQ ID NO: 693501 - DNA, 1030 bp, Homo sapiens
  misc_feature (367)..(367): n is a, c, g, or t
ggctgagggaggccggagcggtagcgcgttgcgatgctcggcgtgcgtttcaattcacagacctggggtggggctgataaggcagtataacataaggaattggataccaggatagcagctctggttcattcctggactaaaggagcacgaggaaatgggatgacggtcatgccacccatgatagcatgtcatgaaggcgatgcttgggattcaagggtcgagccgtcgtgcaggccgtggtctgggaagatatgactcgcacgatacacgttgtatggcccgatgaatgatgcggtcattctgtgcactggagttgccaggccttggaaagattgacaaaggagatgaagatgggaccaatattgantgatggctgggtcctaagcagggagcgtctaatctcttgggggtgcgacatgagcacacttctcaatcctggacgtcatcggcttgccatgtgagacgcgatgagtacctgaatggtggcaggacagggggactgagcccgtgaaagggggtccattgcaattagggcccgacccaaagtctatgaacgctagtcgctacactacacatggggttcatagatgcggtacttcggctcgaaaaaggtgagtggtgggggcgagtacacagttcctacaagggtatacggaaacactctgaaccacgtacggtttggcataagaaggcacttgggcataggcgaaactggcacccttcgggacgagttcccaactatgaatacaacacgttcaagacgttgctgggaaagacaccactccaaggggggtaagatgacccacaaaagggaacccgtggccgtatgaagtttacctatcagcgagacagcgtctggacgtcgtgcacccatggggacaactcggaagccttttcccggacgggtccaatggcctggcggaattgggcaagcacgttatggtttgagacaagggtaaccccctaggagcattggggcacaactaggaatgggttggggcgcgcaagttgcaaacacgtttgaaccatg

SEQ ID NO: 693502 - DNA, 299 bp, Homo sapiens
acagggagagtgcagaggctgccctgaggctcgggtataggtagcctactgaaggctggtggttgttagaccctagcacgcagcccgagagtacggtgcctactactacagaagtgctactatgcctgccggcctagatgggtgatagaggctactatctatactggcacctataggcatggaaatagagcatacacagaagctcacaaggcccagggttagaaggccttactgtatttcaaagcaacagtaagtggccaccccatattggctataaatatgtgctatttcatgtattg

SEQ ID NO: 693503 - DNA, 764 bp, Homo sapiens
ttgcccaattcctgagacggtgttggggaatgttaagggcgcctcccggcagattgcgggcagcgttatccagggacaggaccatggtttgtgccggcgtccaaggcacgcagccaagcttgttgactgcgcaagctcgggacctccgcgagactttccggaccgcacgtcctgtcaactcagcgtgcccctctccccccactatgaccctgtggtcctgggcggtggtccggaaccctggatgtacccccacctccccccggatggccagtttgaggcccggttcttcccatttggcccttgaagaagagtttggaagactccagggtcactttggacctatcaaccagtgttgcccctcccatcctgatggccagagctacagcagcggcggcgaagatggttacgtccgtatcccgttacttcgaccccccgtacttcgaatttgagtttgaggcttaagaagctggatctcctgcccggcgtggtggctcatgcccgtgatccccccacccttttttttaaggcacggcggatcacctgaggtcacggagtttaagacccgcctgacccacaactggagaaacctcgtctctactaaaaatacccaaattagcccggcatggtggcacacgcctatagtcccagctactcaggaggctgaggcaggagaatcacttgaaccccggaggccgaggttgccgtgagctgagatcacgtcattgcactccatcctgagcccccagagccaaactccctttcca

SEQ ID NO: 693504 - DNA, 385 bp, Homo sapiens
gaataacatcatgagactcacacaaagtgcgactagcgatgctggaagtgctctcaagaagcagagaaaagtcatgatggccgggcgcggtggtgcgtgtctgtaatcccaactactctggaggctgggcttacaggtgtgcaccaccacacctggctaattttttagttttacttttgtagagatgagatctcgctatgtcgcccagtctggatcttgaactcctggcctcaagcaatcctcccgcctcaccctcccaaagtgctgggattataggcatgagccaccactcctggcctggtctctggtatctttattttctatcagaaaaatagcatgaacataaaaagtatacttggttaacccatatgctacttggatttaa

SEQ ID NO: 693505 - DNA, 112 bp, Homo sapiens
tggcttgtaggtcgatgctgtattcaccacggcggtgcatgcctccctgtacaagtaccgacgacacgtgagcaccgtgcgttgacctccaaatatcgtcaagctggagcct

SEQ ID NO: 693506 - DNA, 640 bp, Homo sapiens
ggtgggaacagcgcggagcagtctgtcagcactgccttcaaaatgcacccagaatagattcgcaattctaccatttctctcaaccgccactgtcaccaccttggccaggcccccatcatctgagaagcaccaaaagaggcaacagtgagatgcagacaaatggatcagtccgtatgcgtgatcatttggaatagagaatggagaattaaatgaaaaggtaaagtccttttaaagacctcagaagatggatcgtgttgcgttgtcaatcgtgctttgtgaggccagaaggaaatatcagttgagaaaacaagcagcaccgtggaagtgcatcactctttaattctcaaatccatatgatgtgcccaagagaagagatgctatggtcatcgaatactctcagcaaggcttcataaaattaaaggaactaaaaaatgaattagctgatatgcatcataatatgggaagccatccttacagaaaagcaattttggaaacaagttcagcttaggcattgtgaaagctataggaaaatatgagaattcacaaagataatctacgctcaaattatggctaaacatcagaatgaagtacacaaaatttaaggcaatacttaaggaaatcgcaggaaagggaagaatct

SEQ ID NO: 693507 - DNA, 124 bp, Homo sapiens
gcgaggcggaagccatcttgttgaacgtgaagtccctccgggagtccactgatagtccacggtcgttccacttggacgtccagggggaagtgggcctggtcatgttcttcacaactgggagtga

SEQ ID NO: 693508 - DNA, 726 bp, Homo sapiens
gacgtcgtggtcgttcggtccttgcatttcgatctccgtgatgacgatgacgcggaagaagaatgggcccaagcgggagcttggtgttcggcgtccgtggggcgcagtggaaggagggcgtccgagtctaacaaccgcttcgagctgataaacattgacgatcttgaggatgaccctgtggtgaacggggagaggtctggctgtgctgtcgacatgatcgctgtggcaccaggcaacaaaggacgcgggtcagctgtgaaaacacagagagcaagacggatggagatgactaccgagacagttgccctcagagcagatctcatgcaagtggcaaactccggaagaagaacagagaaaacagaacacaccgaatgaaaagcagcgacgggagatagcatctgtgacacatagcgtgcactagaaggatatcgatcgcatcctagagaggattgaggacagcacgtgggttgaaccgtcccggcccagtctcccctgagcgtccaggaagtcacgttctctacagtggatgctacagactcttgaatcctagacacagaacgtgaacaaggtattatggtgcccgggcaatcctgggggaagcaaaggcgcacggtatgagacgaccgtggtgtaccccaatgtgcacatgggtgaccacccctaaaagcacctgggtcccggtagagcaagtccagtgtctgtccatgcggattgctggtaatcaag

SEQ ID NO: 693509 - DNA, 350 bp, Homo sapiens
gtcattgcagcatgttgctggccttggaatgagagtctcgagtgtgggaacgctcgcgcgccacagtgaggaagaggtaaatgacagcaaagatatagaatgatatacagaaagaccaaagggaactcctagagccaaaaatcaagtactggatggctcaataagtggaatggaggtaagagagaagagaatctatgatcttgagagataggttagccagaaattatcagtctgaacaatggcagagagaatagattgccccacaaccactggtcacaggagaagctcgggccccaatagcgctgtgggacaggaccagggcctccttatgtgactgcggggtttgcgta

SEQ ID NO: 693510 - DNA, 154 bp, Homo sapiens
cacgtaatagttgcgcggcgtgcttgtgtttccttaaagttaaaactttgatacagatctgattatttatgcaatatgctgtctgattgcataaatatacattagctgaagcgtgatgatataaacaatttgcgtcttttggcgtcgggtttgt

SEQ ID NO: 693511 - DNA, 743 bp, Homo sapiens
tgcctgcgctgactcctgggaagagaggaagcgggagaggagcccacgtcgcctgtcacccaagtatctccagcctgtgcagtcccgaagagtgtaagatgttctgcctgcgccaagactctgcctgcaccccctctctgactcctgagctggataccatgagtatgcatacatgaccaatttcttgcatacagttgtaatctcgaccagagtgctagtatgtgactaggagagtggctctacgtgtataataattgtgtgtgcccagaatggtgtgtctcagctaatccaaagtggagtttcagaccatgtgcaatacatgcagaatgacatttgataacttgcttagccaacatattactttgtgttgcatgtgttgcatagcaaccatgtcagctgacgttgtggctagtgtatacttgtgtagcttagtgtatattgtgacacaagtacttgtgcgcgagcgctatactcatattgtgtataactagccatgaaacacacctatactgactatgcaacgctatgcaagtcatagtttcatcactacttgcatattcactgtgtgatatttgcctatgtccttgaacgctactgttgtctactatattgttttgactagtggttgcttaacttgattttgcttgccatgtaacaaattacttgctatgacatgttggcatacactatcaagtaccggactgtattctgtgtatcttactgtgaactccgaaaactgtacc

SEQ ID NO: 693512 - DNA, 781 bp, Homo sapiens
cggtcgcggcgggcaggtggcggcagaatgtgggctaccagtggtatttagacctacttggcgagcgagcaatttccacctctgtgtgtgtacgagctcatgaaagtgttgtgaatgagcgaagacttttcgctcccagactatatatggatcgtgcagtgaccaccccttgccggaggtggcccatgtcaagcacctgtctgccagccagaaggcactgaagggagaacggagaatggcctcctggagcagcctctccatggattgagaaagtcgagttgtatcgcacttaagttcaatggacgatgctttgctgagatcgaacaggggctcgaccgagtggcagacggttgtgggcggtgcctatgcttcttctatcgtgtttcaccgcgctcgtcatcatgtggcaagaagctctatgtgtacggccccctcccgctcagctttgactcaagagtgggtggtcatgcgagaccatgaggatgctggacatgaaggtgaaccccatccatgggcttagtcctccaagtgggactacgaagaagaacgagtggaagaagtgagagatgctggctgtcgcctgcacctgcgcctgggttctgtcaccgtcatgcgactccatgcctatttactggaaacctgtatgccaacagttgtaccactgtaataatgacaggtacctgataaagagaagaaagaagaaagaaaagcgggcgtattttgcggggaaacaagaaaaacgcattgcaaacttccgacacatcgtcagggaatgcgacca

SEQ ID NO: 693513 - DNA, 215 bp, Homo sapiens
  misc_feature (8)..(8): n is a, c, g, or t
ggatgtantggtaacaatgattccaaatctcccacttttcccaaatcagaaatttaaattaataatttaagatacaacttgatgtagtgtcacagatgtggcttcagatctggcattgctgtgactgtggtgtagaccacgcagttgcagctaccgattttgacccctcagcctgatcggtaacatccacagggcgtaccggcagctcgacattc

SEQ ID NO: 693514 - DNA, 230 bp, Homo sapiens
tgatacgcctcgaactcggtaccctgtttgcctaggacatgatattaataaccatagggcgggttgtgcgcttggggcctgatagtgagtcaaattctggtgcccctgggtgcggcgtggactctcgccaggagacggggggcatgaactgggcccatggctcacttccgatgtgtaagttcctcacgttgtgtgcgataacgtattatatagtacatgtttttaactta

SEQ ID NO: 693515 - DNA, 547 bp, Homo sapiens
caggaatgtctaggagctcaggtgttatttattgggttgcagagcaagctgtaaagggggaatttggtaagactgaagctcagaagactggtgggagggcaggactgggggcacaggagaggagattaagaggagggtcgactgaattttggcgagggcaagagttctggctgcattccagaaggggggcgagcacagggcagggaaccacggggctctagggcttgtgggtccgaagtgtcctggtgactggaaagcctgaggggaggctggaagctgataccaggatgccggtggctttgtgcgacagaatgagctctttcttcctgaagagggacagaggggagagaagagagcagacatccacacttgctccttccatcccctgcccgtgtgagacatcacgtaatcaaacttacggtgcctggaagacatcactcatcaggattgcgctagcatctcccactagagcccagaacaaacctccgatccccagcacaggctccagcagccacccctgatctatcagggtaggagcttaaggctg

SEQ ID NO: 693516 - DNA, 704 bp, Homo sapiens
tagagacaaatttttttatttttttgccatgttgcctggctggtctcaaactcctgggctcaagcaatctgcccaccttggactcccaaagtgctgggattacaggtgtaagccaacacagatctctgttattttttattttttttgagatggagtcccactctgttgctggagtgcagtgacgtgatctcggctcacagcaacctccacctcccgggttcaagcaattctgcctcagtctcatgagtagctgagactacaggcacccaccaccacgcccagctaatttttgtatttttagtagagaggggtctcactgtgttggtgaggctggtcttgaactcctgacctcaagtgatctgcctgcctcagtctcccaaagtgttgggattacaggcgtgagccactgtgcctggcttgttgctgttttaaaaacaggggctcgctctgttgcccaggctggagtgcaatgacacattcagagctcactgtaacatttaccttctggactcaagggatcctcccacccagctattcaggaggcttgggtgggattacagtttgggcccaaaaggttgaagcttgagtgagctttgtggcacacttgactccagcctgaattaccaaacgagaccttttttaataaaaaataaaaaactcttggggggggcctggtcccatttcggcctattgggaggtgtttt

SEQ ID NO: 693517 - DNA, 471 bp, Homo sapiens
ctgcaagatgctttctactgccaccagacctcctttggaggttttcctaccgcttaataaccaggaacttgttggcgtctgacagagcatctcagatttcttacataaaatgtggaattgtcaatagtcagatgcatcagtggccaaggctatggtgtgcagtttctatcagcgtgtacaggacatcctgcctggttttggcctcaaggaagcaatggtgagatttcgtagctcatcgtctcctggttggagcaaagggtgccaaacagaggtcaagctcgggccacagggaaactgggaaaatacgttcattgccatgtgcgaggagtccagtggatttcagaaatcttctgtgtcttcttataggctacagtaacagccccttactggaagaacattttaggtaatccccacgacagggtgacatacactgatgttggagcatttaaataaaaagagtctcactgtgta

SEQ ID NO: 693518 - DNA, 767 bp, Homo sapiens
ggagaagccaactcagactcagccaatcagagatggttgatttgcctcttaagcaagagatgcattgcagctcagcagtggctcagacgcagctcatacgtgtcatgcatgatctccgtgcctgatgtttcgtgtctcgagagccaaggccaagaggcgccagacagagttgcgcccaggccgcggatcgagcctgctccagaaggcaccaatgccatatcagccatcctacgtgcttacgtactttagatgaagacccgtgagaccgtgggttgatgcatgatctcatattgccaggaacgatgaattccgggctaacctggtgtctgtgctcactccaggccgagggtgccttcagtggcgctcactgattcaaggtagcagtggcacgtgatgacttcaatgtctggattggcctccaatgaacacctaaaaagaaccgttcgatggctattgtgagacacgtgtggtccctggttcgtcctagcgaagtcctggggaaaatggagcccccaggccagagttaagcactggcctagctgggtgaagccgtgaacctcaaaagccaacaggagtgccagaaagtggacgagatggtgcccatgaggaaagaacaaaggtaacacagcttagatacagtcgaagcgcaacaaagacataacaggcagactgtgccgatcgcctggacctcacaactggatcaagacacaacacagggagagccagaataaagacgcgacagactctccaaccgacccatgcgggaa

SEQ ID NO: 693519 - DNA, 472 bp, Homo sapiens
agcttacctcttttacctgttgatagtattatgagcaaccaggagctgcactggatgcactggagacacccgggacaaggttgtcagtgttgtcgattttgttcaaactgtctcaacctgatccggctatttcggaaatatatgcgccatatgtgccgccaagagtaccctaaggacacgaaggatattaagttgatctaaatgctcttacttctgtggattaagaggatcatccgctgcatgtactaccttgaaaaccatgttaatattttgtatacaattgaagcatctgaaacttctgaagaaaacacaaattaaattttggcggccgttttggccaatttgtcccttaactctataaaccctagccatgttatgggtggtggcgctattctggccaatttggcctatttggcctattattacacttttcacaacgacctttacgacgttttacaatgtgataaccgtg

SEQ ID NO: 693520 - DNA, 233 bp, Homo sapiens
caacactaaatatacaatcaaaacataaagtatatattaagtattttatacccaaataacataacataaaaaaagttttaaaaaataaacttttactaacctttaaatttttttggggtttaactgtttcttcttcttatagtaaatgtgaagtatcgattttagaggctcttggttttttggattttgattttatcaactcttctacaaaatcagattcagaatctgatgag

SEQ ID NO: 693521 - DNA, 186 bp, Homo sapiens
atgctatccgtgtcgctcattgaggataaagtttctggagacccttttggaaggcagagactcaaggctgaagagatggacactgagggcaggccagagcgcgattggggtggacactgagccaaggtcaggaggcagatgaggcaaactactaagcaggtcaggcagtcagcagctggaggagcg

SEQ ID NO: 693522 - DNA, 130 bp, Homo sapiens
cggtaccggtgcgtctcggcgcggctgacgttggtcagcatccgcaccagtcgccacttcggcccgaagtggctttcgatatcgccgagggtagtgggcgtgtcttccaccgtgtcatgcagccaggcgg

SEQ ID NO: 693523 - DNA, 163 bp, Homo sapiens
tatcgtgttcgggcttgaccgacggactttatggtgcaaaccgtgcaggagaaaaaaaaaaaaggtgcgttgcttacatacagggggagggcggttgcctaaccccacctttttaagagggaagctaactaaattggctttccccaaaccccaaacacggatg

SEQ ID NO: 693524 - DNA, 188 bp, Homo sapiens
  misc_feature (3)..(3): n is a, c, g, or t
atntccgttcttgaggtgtgttgtctttctctagtgatcaggaacttgcagtccttgtgcaaagaggtcatcgctctgcacacttgtggtgcaggcggggaggtggaacgccagtgtcacagccgcagcactctggggcatgtttttcttcaccccatatgctgtggaagtggtggtggtgccattgg

SEQ ID NO: 693525 - DNA, 370 bp, Homo sapiens
tttctgagaagagagcctgtgcacatattgaatgctcagggttaaataaatgaataaataaatgccaaagtgtgtatataatatttccatgagtcgtgtggttgagaggcatatgcagaattgtgttaaatggtcactctcttgacacacaagaagacaggcattcgaaaatttttatcttcatgacacgtctcctcaagcttcttaatacaccacaagatacgcaggctgtgctctagccacacagacaaagacacctggaggccatatatattttatagaactcagggtttagagtacataacgcaggcatgatactcctatcaagagtgtcaaatgtgcccactgtaatgaaagggtgatgtctact

SEQ ID NO: 693526 - DNA, 1463 bp, Homo sapiens
ggtgagtctctggcgtcccaaattgcctgtttatctcgcagtgctctagttccgtgtctgctgtggttcgcgcatgcctctaggggaagacgaatggccagtggcagctccaacagcacagcatgtggcgctcggtctggccgtcgagaaggctggttctactagaccgacagacacattgtgaacgaatgtatgcctgtcttcctatcatatcggagtctgcaagactagcaagatgagatgtagatctgggagtgtgagagtaaggtgcaagctatacgcaataccataggttgcggctatatatgggcatgcaggcagacatcactgcatggactgtagtgtggccggacttagttcccacgtccacgtcgtgattcgaccgtcgaataatcccatgggcacatggcaaggctacgatacttggtaggtggtacacgacaagttactgcgaagaatgtactacgtgctagattgaaggtggtgggcacaatacgatccataatcctttgtgtgttagcctctatgcggggtgtaagaagtgcgaacgtgtacttagcgcacgatgtcggtgcgtacaggcacctacgcgcacgcacattgtgaccgtatgtgccgttggcaaattctttgcccctctgtggcatagggttgtgcgacctttgtgcggcgcaatgccattgggaattccattatggcgtccattccacacgagagaaggaaaaagaatccgtcacatggcgtactacgttggtttacgtacacgagcaaatcaaaagctcggtagtttagatgccaccattaatctatatgcgatagagagcccattaagaacaactcgccgtactccggacgcaatagcccacccagggaactgacatcttatagtagcggcacaaagagaactagcgaattatcagggggaagcgaatctgagagagaggccaaaacatagggtttcgcctccacttggaccattctgacgcgttgttcaaaccaacatcacaccatcatggaccacaagatgggcgagcaaataacgagttgaaccccattggttcgccatagcacacacaagctaccttgtccggccggggaccggggaactgtcgcaccgcagacgataaggtggcgataacaaatgcagctgtagccgccataacgctattgtcgacttccatatgttggtcccacatactatggtacgaagagcgaccaattttccaaagagccgaagagtaggcacgtattgaaacccacacagagagattgacaccgcattcactcattgcaccgacttgcagaagccgcgactggtgtccccacaaagtattatgtttcaatgatgggcctagatatctagcccaacggtggcgcgaacggagtcgcaatataaaaagacgcatcgacgatactccatatgtaataagacagtgtcactagtgacccaatgcgtgtggacc

SEQ ID NO: 693527 - DNA, 316 bp, Homo sapiens
  misc_feature (57)..(57): n is a, c, g, or t
  misc_feature (211)..(211): n is a, c, g, or t
  misc_feature (220)..(220): n is a, c, g, or t
  misc_feature (226)..(226): n is a, c, g, or t
  misc_feature (248)..(248): n is a, c, g, or t
  misc_feature (265)..(265): n is a, c, g, or t
  misc_feature (275)..(275): n is a, c, g, or t
  misc_feature (294)..(294): n is a, c, g, or t
caccccattgccactactcagacagcaccttcaaacccaacacacaaaatccacagncaggaagacaccccccgcagacaccaagccttttcctcctgcccaatactgttctctagattcagaaataaaataaaacccttgggagagcaggagtcccggccagcctcggcagcaccaggaccaaaggatatgtacaaccattaggtgaganagttacatnacagtnaaacaccaaggaggtttagaanatcgggagacttggaantaagatgganatctgtggagaggctgtanagttttacaggtttgcactagg

SEQ ID NO: 693528 - DNA, 219 bp, Homo sapiens
  misc_feature (12)..(12): n is a, c, g, or t
  misc_feature (65)..(65): n is a, c, g, or t
  misc_feature (195)..(195): n is a, c, g, or t
ctcccacctcancctcccacagtgccaggattcccggtgtgcaccaccacgcccagctaattttnaatttttttgtggagatggggtcttgctatgaggccaaggctgatctcaaactgctgggttcaagcgagtccgcacctcagcctccaacgtgccgggattacaggtgtgagccaccacgcctggcctttnatgacattttgatctaataaccaa

SEQ ID NO: 693529 - DNA, 455 bp, Homo sapiens
tatccccaatgtcattagcgaaccagtctgtggtactttgttatggcatgccctagtcaaactaatacacgctaggaatcagaataccaacaacagaaaggaaaatcctccctaaaaggggactcgccggtacggtggctcatgcctgtagtcccagcactttgggaggtcaaggcaggcagaccgcttgaacccaggagttcgagattagcctgggcaacatggcaggacctccctctctacaaaaaatacaaaacttagctgtgcatgttggtgcatgcctgtagtccctgctacctgggaggctgaagtggagggactgattgagcccaggaggtcagggctgcggcgagccatgatcacaccactacactccagcctgggtgacagagcaagaccttgtctcaaaacaaataaaaggggaattggcaggtagtcacagaattggactcatg

SEQ ID NO: 693530 - DNA, 736 bp, Homo sapiens
tcagtcactttggaggttgtcacaacgtcactatcacatgggctgtaggatgcatatgcatgatttcctaaactgcttgtagaactctccttaacaatctcaactaccctatttgtccctgtggccctggtgccacaggctgacaacctgcagtctccagtttacaataaatattccatagtggtgacatgtctagctgcccactgatacctcctttggaaaagtggtgcgctgtggatcaagacattttggtatgatagtcatatatcattgttggcatagactaaagaggtgtccagtagtgatctgagtcctccatctattgtcctccactaaacatattattgcatattcttatatgtggaagaatagattttaaagtacaagccaaatgattctcagttggtggaattggtagaaaataaagtaaactataaataagagcaagaatacttggtttagttgaataatagcagcataagtttatgaacaaaagaaacataactgaggttgcatctaacaagttgatcgatggttgttccattaagttctggcgtgagaaagacgaggtgattggaggggaagaactattcagatatgggactaataaattggttttggcaattgatgacctagatcgttggagggaacagtgagggctaatcggaaccaactctgcttcccctgtgtggtgctgcggtttgaagtgttcaatatgaagcggtggtatttaccg

SEQ ID NO: 693531 - DNA, 1469 bp, Homo sapiens
cgggactttgtgggagaatccacacatggtcgccatcgcatgcgtgctatgtctaccggaagcagacaaagaagcatggagcaatgagtcgtgccacggcagggggacagactcgtgccaatgcacagacatgcctccgcacagcaggcaggtgcacagcaccatctgtggcacatgcagcagcaggagacatgaatacaggcaacgggcacgcccatgggcaactgcatgggaccggtcacgatcagagatgacaacatatcggcatcaatcgtcattcaccatctccgcattcgataatatatagttacccgatagtaaatatattgatattaagctaatatgagataaaatgacaatgacgtgccattgcactaaataacacgagtattgcgatatgtacaagtatctctacgacagtaactagagcgtactgctccacaacttgaccaggtggtgtgacccatacgatgacatgtgtactattaccttgtaatggctactgtaaaaaaacagaacgaacaccaacgtgacgttcataaccccatagagactacacagacaaagacacaaaaagacacaagcattgactcacagggtatgacgatagtgtaactaccataccacctgtgacgaatactacctactatgggaagccaaagagacttgccacgcatagtggccaatctgatgccctctgtgtcaaccgctagacacaaggaaaggaccaacacggacctcatccgtgtcccccctatccatacgagctctataaagaatcaaacagggttaaaaacatccgggagtttcagttatggattatgggattgccacaagatcaacattggcacggttaccgacacgcagattgggaggccccccgtggatggagcatcctataacaaatttaacgcctttcttggcacaacgagacagttacagaaaacaccagatgttaacatccaagacgatatagctaaggatggcaggcagtgggaaaggcatggaaagaccagagacagtacaccccggattaccacaacacgtgcaggcacaaacgcggaagtaacgctgtagtgacgacgcagagaacgagggctggcacaagacaatgggagacagcgaaaacctaccccggtacacaaaacgatatgagaatagaaaaaggacccccaggggaggacaagaaaaaagaaccagagatgatgcagtagaatacaaaataacacaccagagaaaaaccaatacagaacgataacaaaaggtagataaagataaaatccacaacggggagaaaaaataaactatgaacagacagagataagtatacgaatggaacaacaagacggacagctcacgacagaacataacagtagcacaagatacaacaacgaacacgagaacaacaccaaccaaccaaccgataagaacgatacaacgagacaacagagcacaaccaacacagtaaa

SEQ ID NO: 693532 - DNA, 873 bp, Homo sapiens
cgcgtgccgaccgtgatgtctccagaaccaagagaacgtggacgcgaagttagattccgtcaacgctttgtgagacgaaagcacgcgctcgtgagcaggctgatgctgcatgtatgcagtacatgtaacttcccacagtctctgctgaagtagtgctcaacaaattatcctgggtatcttacgtcgccaagcaggttatgatgcttggtgtgtcacatccccaagacccatgcttgaaggagttccgcatcacgaagcctcatggctatgagggctgagataaagactcagttctacataggttgcctgcaggatctgcggaaggtctaatcaaaactagcttggacagaggaacgcgaaaagtcctgtatcgcctcagacgtgtgagatgtcgggcgatgagggccaacctggaacaggcgtgctaccgacacgctgcgggctatcctagtcgttgcggtgagcgaaggacttgagttaccgtggcggattgcccgagggtgtcccgtacagttttagcggcgttattcgcatggtttcctggagagtgtcccccacagagttcctctcaggaacaaccaaacgtgggcaccagaactaatccccaagaagaccgtaaagggtacttcacaggggatggctatcagtgcgatgtgtgtggaaccccagcttggctggttggcaacacctaggaagcgccgcggccgcaagtttcgttggccacctggaacacgccggtcccagcgcacacatgggcgccgcggaaagctctcccaactgggattgacgaaggtcctcacccctttcaacaaggttgacttccccaaggtcgacaccaagggggcttcacgaacagcaatacgggaactcacc

SEQ ID NO: 693533 - DNA, 326 bp, Homo sapiens
  misc_feature (168)..(168): n is a, c, g, or t
tattatttatatatttttatttttatttattatttatttattattaataataaatatatttataaataatattaaattatatcttaaattttttaattactttattttttcatttattacattttattaatttatttataatttattaaaataaaatataaaaattanatcttttttttaatataaattcaattaattctattccttaattttatcaattcatactcataaagggtattgggataattatcctatttctatatttttaatttttacgggtactaatgggactataagggtaaacccattttagggtcatacataaa

SEQ ID NO: 693534 - DNA, 627 bp, Homo sapiens
  misc_feature (208)..(208): n is a, c, g, or t
  misc_feature (395)..(395): n is a, c, g, or t
  misc_feature (567)..(567): n is a, c, g, or t
aaaaccagaagtgcccagtgggaaacaagaatcgagtctcttacatctcatagaagttcttaaacagtagaacaggatgggacgaagaacaggagatgtctgctagtgttctctctcaagaagtatcccataagtcgagacagcaagaggaaagcagatgtcgtctcagcaagatgcgtgtcttccatgtaaatgaggcatagtccgntctgcatgtatcgatccacacaagaaatggaccgtggactatgcagctcagcccttagactggtaaagcaaaagaacatcaagggtcaaggatctggaaggcaaggaaggaaaattggctaaacattgacctctattggttgctgcacgaaggtgtaacaatgcttccgaatggcaggatctttggngagggcctaggtcttctcgagggacccatgtgtcctggtgacagtgaagagctggatctgaagccacttagcaagcgacagtatcggataatgcgctaatgtcattccactggacctgggagctgggcataggtgggaaggtcaccgttcgacgtacattataaaagcctgngcttaccagttaccagaaacgttcacttttctactacgtaagtggcccgaagcaagctta

SEQ ID NO: 693535 - DNA, 470 bp, Homo sapiens
aagattctgtggccttgtagaatgaattagagaagaattccctcctctatttattttctggtgatagtttggaaagacttggtattaattcttctttaaaggttctggtagaatatcagcaataaagcctgtctggttattaggatttttttgttagtagaatacgaccgttttactcactgacttctctcgtcatagacttgtagattggatactatttgtagttttctttatcctcactgggcttcaatgctttatagagtagtactgtgtccagcgaatttattcatttctctttaaccttttcacaatttattgagcatatttgtttttcctcagtatctctctaatagtatcctattatattttctattgttgtccattgttgacatatcctctatccgtttatgattttttcaaatttgagtctctttttttctttttttctgagtttcactaacgttttgttg

SEQ ID NO: 693536 - DNA, 471 bp, Homo sapiens
gctgtgctcaggagcgcctggtcactgccctgcaaaatgctggcaacgacagtcttgaaaaagccgctgatgtagtagtgagataggtatgaaggttattgaaacacctgggccttccaagatgtccaaaagtatggaactccacgtgaaatccagctcagtgaagctaagcacattgcagaagaggcagataggaagtatgacgaggtggctcgtcagttggtgatcattgaaggagacttgtaacgcacagaggaacgagctgagctggcagagtctaagtgttctgacctggaggaggagctgaagaatgtcaccaacaacctcaaggtctcttgaggctcaggcggagaattactctcaaataggaagataaatatgaggaagaaatcatgattcttactgatcaactcaaggaggcagatacccgtgctgagtttgctgagagatcggtagccctgtgggaaagta

SEQ ID NO: 693537 - DNA, 528 bp, Homo sapiens
  misc_feature (22)..(22): n is a, c, g, or t
  misc_feature (516)..(517): n is a, c, g, or t
cccaaaaaaggcctgttaaaangtttaaggggtcccccctccccatatatttaagccatgtgggtagggatttaagtacacccttaacaaactttttggggtttttaacaacattttccccaaattttccctacataaaatagatattatttttgaaaacagggaaaaaatgttttgttaatgtttttgtaaaattaaaaaaataaatgtcctgggagacccaggcgtggtggctcatgccctataatccccagcactttgggaggtcgaggaggggggattacttgaggtcaggagtttgagaccgccctggccaacatggtgaaaccccatctctagtaaaaatacaaaaattagccgagcacagtggcgggcacctgtaatcccagctactcaggaggctgaggcaggagaatctcttgaacccaggaggcagacgttgcagtgagccaagattccgccattgcactccagcctgggcgacagagggagactcagtcacacacacacaaaacnnccgaaatttta

SEQ ID NO: 693538 - DNA, 248 bp, Homo sapiens
ctgagcaatacccacgcaagattctgtcctaggggaggtaccacagctgacagaaggggacagcggagtctatgccggcggagggggcttgaccacagacgggggaaagacccagaaggtcaccctgattgtccacagtgattacgagccatcaggggaagagcagccaaggcctgagactccaaaagggtttcttcggccctattggtcccagatgcctgcttatgccagttcggggtaccgagctc

SEQ ID NO: 693539 - DNA, 239 bp, Homo sapiens
gagatcatgccacttcactccagcctgggtgacagagcaacactccgtcccaaaaaaaaaaaacaaaaacaaaaacaacaggagaaacattacaatctagtctctctaaagcctgcaccctggaggcgtcatctgcttgataaaaccttggtccccaaattcctataccattataacccagactttctttcctatggataattaattctcggccaggcacaatggctaacgcctgtaat

SEQ ID NO: 693540 - DNA, 787 bp, Homo sapiens
agcgggggtcgggagcgcgggcgtccggggtggctgcagtcccgtcggtctccctgctgtccggcgcgagcgtcttcgagtctggcttggtcggaagagcacagacagtggaaggggcccatgccgtcccttagctttagaggacgaagtctctggggctggcagtcgcaacgcccggtagaggggaagggcggcgagacccctgctgccgaggagccggggtcctgaagagctacgtcgtgtcttcgctcatgaagggatgtttcaggagcccctgagaaggacgaggaggaatgctgagggcccggtgagggcgcacgtgacctgtagggagctgctacatgcagctcgtccagggtgtgcaggagtggcaggatggttgcatgtaccagggggagtctggttgaacatggaagcttgtgatatggcataatgtctcgttggccacaggcgattcataccatgggcagtcttaccggtaccactgccatggtcggggtacctacatgtggccagatggcatccagtgttcaacgggcacattttgaccgtcagcatcgagaaggctacaggagccatgtacatgaaggacacggcttttccacgacatcagatgccagaacgagaattgtcaacgcttctcctgcgagctgtggggccagacggtgaagcaagtggctcaagatgaggggtctcacggaacctcagcatgtgtttcctcttccactagccccgtccagtccttcaagccccaatgtggtgaagcggaccatactgaagcccagga

SEQ ID NO: 693541 - DNA, 944 bp, Homo sapiens
gacgcagcagaaggaggaggcctagcactagcgatcgttcgggagcagcactcctctcactgctcatgttggatgtctatctactaggcgaagggctgaacaaggaagatgtcactgagcatgtaaaatagacagtgagttgtgttggttgccgtcctcagagcaatcggccgtgtgcgcatatccaggtctactgacggctgattctggagatctagctgcagtgcagaggcaagacgttgaacaactaaaattaatcgccagatagcgtgaatggccagatatgggttagagccctagatcccactctctggcaagcagcagtcttccgtagcacactccatagaaaatgctggtgtccttcatggatgcatgaacaatggagtattcagcattagggaaggaccagtatgcaggtaaagtgctggcgaaaggacaatgaccagatggatgattgttggattgagtgaagcatgatcgaatgacacatgtggaaaagaggaagtgagatcctatttgtcatctgaatcgatgctgtatgagtgtagaatgaaaatgaatgagtattttctagagtgtgatgagatcttacctgtgtgagtgaactctgtatgatttgtttgaactgggtattcaatgaaacctgtcaggcgtcagaaattatgactgtccaagaatgtacgtccgcgagtatgagggtattgagtggcagataagtggataggtgaaggttaagtggagtagtgcggcataaatgaatagggtggggagactagacatctaaaacgctgattggttgggaagaagtcattcttcccttggggaaagcgagaaatttagtggggtttaaaagcgccacagggccaagcgtgacggccttgttgggaacggagggcattggacatctggtgaaaggagcttgatcattttggagaaaaaagcag

SEQ ID NO: 693542 - DNA, 184 bp, Homo sapiens
  misc_feature (25)..(25): n is a, c, g, or t
ttaaaacacgcaatctccagtctgngtgacatagcgagactctgtctcaaaaataaataaataaataaataaataatgtaagaattctctgtgggaaaatgaattataggtgacaaccagtattacaagatgacattttccttactcccttcccacctcttcccttaagctgtgtgacccctga

SEQ ID NO: 693543 - DNA, 137 bp, Homo sapiens
ggaaacggcttcacatggaagatgcgagacggtgagtcactgacgtcaggagttgaaccagcctggccaacatggtgaaaccccatctctactaaaaatacaaaaatcagaataggtgttggtatagaatggggtct

SEQ ID NO: 693544 - DNA, 304 bp, Homo sapiens
  misc_feature (132)..(132): n is a, c, g, or t
gggggggggggggggtcggggggggggttttattaaccaagcctttttttttaaccggcaggtcccctgggagcccccttcccccttttttttccccccttggaagccccggggccggtcccccccccgggntttagggtggggcggggggggggttaccattttcccccgggaccccctttggccctttgggcctttttggggccccttttgaaccagtttgggccaaaaaccgggggggggccgggcggggatttccggggttttaaaaacttttttattaattttttcccctttttaatta

SEQ ID NO: 693545 - DNA, 241 bp, Homo sapiens
aacgggtgatgcggttgtgcatgcctgtaatcccagctactcaggaggctgaggcaggagaatcacgtgaacccgcgaggcggaggttacagtgagctgagatcgcgcctttgcactccagcctgggcaataagggtgaaactctgtctcaaaaaaaaaaaagggagggaaagggaaaaggaaaaatttcttctttggttaacctcctggccttttccctttaaaaaaaaaaatttccaaa

SEQ ID NO: 693546 - DNA, 170 bp, Homo sapiens
ccaagggtcagggcccgggtccactctttccttaggttgagcacctttaggccctttaggttggggaagcaaattggaacccatggcaataataggagggtgtccaggttgggcccctcccttggtcctcccagtgtttgttggataataaatggaactatggctttcca

SEQ ID NO: 693547 - DNA, 568 bp, Homo sapiens
ggacgcgtgggtcctgggctgagtccgcccgcggtcccggcggcgccacggtgcgttcactctgcccggctccaagccagcgtccgccgccggccgtatggctgccccccggctcctcgccccgctgccgagatggcgacgcgctcctgtcgggagaaggctcacgaagctgacgagcagcacccgctcatcctatcccagcttttgagggaggaggaccacaagtactgcgccgactgcgaggcccaaggtcctcgatgggcttcctggaatattggtgtgtttatttgcatcagatgtgctggaattcatagaaatcttggggttcataatatccagggtccaaatccagtccaacctagacccatggacagccaggacaagattaccagtgcatgccagatatggggaatacttaagcacagactactttatgaagacccattttccagaggactttcgaagaccacagacagatcacagcagtggaatttttcatcagagattaatatgaaagaagaaatactacgattaaaatgccatagctattaccaattaagaaaaggga

SEQ ID NO: 693548 - DNA, 420 bp, Homo sapiens
gaaagaaaacaatagaactatgacttgcaaacttgaagtagaagttactttcaactcagaattttatacccagaacaaattactgatcaaatgcgaaggaagaataaagatttttttcagtcatgtaagatgtcaggaagtttttgttttccatgtattcctttctcagaaagctactaaaaaatgtactccaaggaaataagtaaaccaagaaagaaaatacaggaaacagtaaacaggggaaccagtacaaaagagggcaaagaagtttaaggatgatgaaaagagaagtccctggataacaactatgaaataggcctagaaagtaaccagtcctaattgcattaagaggttccagggttagcttgtctcaggaaatgaagcaaacaacaacaaaaaatactaactggggatcctcta

SEQ ID NO: 693549 - DNA, 1419 bp, Homo sapiens
gggaaatctcgtcaaagaatggcgatcgtagttgtgtgttcttttgtgcagattgaggtgactggatctgcttatgactgtagcctaggcagaacacagagtgcgtcgctggaccacctggactcgaacgtctgtataggatccacccgaaaggcccgttcttgcaactgttctaggatctactacagacctgaaattgtggccgtttcttagcagcgtatcatcggaggtaattgaaatgaacgacggcattgttgtacgggcaatcagacattgctcttggggtcgagtggctacttcttggcattcatggatgccctgtaaagacagggatacatagagtcaatgttgccttgtgaacgccacgcaatcgtatcaccgtggagggtgaaccttgtggagttctgcgctgtcaccctgcgtagagtcgagatgcactgtggagctatttctcgccgtgcccaacatgcatcgtaagcagagtggcctgagcgtctagctcactcgttcaacgtctgggtgtcacgattccctccttgttggtggaattccagtgggcgcgtgcagtgacttgtccctctaagagacactagcctcgtttgtccagaggagccatacgtgcccggcgaaaggtgtcctctctgtgaacttccccgggcgtattcaatgcatacccgcttacttgagcggaacctctcgccggattctatccacagtggaagacaaatctctggcagaacccaagtatttggagccaccgttcgggagaatatcggaagtctgcggctcgtcaagaacgaaaagcgaactatcgggaagtgcgagattacgtgactgcaccaaatcacctggccctgcctaaaagttccggttaactcactacaagaggctggcagtctaaggggaacgaattgcgagagaggacgcgtgtggctttgttaggcaagaccactattgggtcatggaggttgcgcacctggccggagacttagaggcttcactctataaggggatactggaaatgcgttggcttcgttgtagagttgtgtcccctttaccagagagagtcctccggcaggccctagtaagcgtcccttgggtcattttccatggcatggttgaaagtgcctattggagcatggaaaaacccatcagtgccattgtactttgactcattcgttcactttgacctccgatttcttcgggggtacgttaccaattgagccgccaagttcttgggactggagagggggaaaaaaactgggtaccttggtggttatgcggagactaaaagcaccacaatgatttgtgggccagtagaggtgtcttgggaggattggatcctttcgatccttggttgggcgactatgaaccatgtgcgcgagatccccctttggaaaaaaaacattggtttgggtc

SEQ ID NO: 693550 - DNA, 407 bp, Homo sapiens
gattctattcaattcctttacaatccattcgattcttcacaattcaattccattccattccattccattccaagtgggccgaatccattccattccacttcgtcccattcccttctattctgtgccattcctttccattccattccattccattcccttcctttcctctcgggttgagtccattcctttccattcctgtcgattacagtcccttccattccactcgggatgattccattacattccattgcatgccaatctaatccactccattccattccatttaactcgaattgattccattccattccattccattgcattccattcctttccattccattctggtgcattccattccattccattcgcggagactctattcaattcatttactctccattaca

SEQ ID NO: 693551 - DNA, 173 bp, Homo sapiens
gggcacccccgccttgatcccttttgcagccacggacctccttgtgagtagactaggtcgctgcccgcgcctccttcctccccctttgaatgccacatggcacgtgcctgaacgtgccccccctcatgggagtcgagacattccttgctcgaccacaagctcatgccctgggg

SEQ ID NO: 693552 - DNA, 362 bp, Homo sapiens
gggtggtgatctagaggatcccggacagcagacgtaccggagtgcagtggcacgatctccgcttactgcaagctctgcctcccgggttcacgccattctcctgcctcagcctcccaagtagctgggactacaggcgcccgccagcacgcccggctaatttttggtatttttagtagagacggggtttcaccgtttttagcgcgggatggtctcgatctcctgacctcgtgatccgccagcctcggcctcccaaagtgctgggattacaggcgtgagccaccgcgcccggccggctgcttcttattctccttcttattctctgggttgcaattggtttatcacttctcaaagaggttttctct

SEQ ID NO: 693553 - DNA, 471 bp, Homo sapiens
  misc_feature (284)..(284): n is a, c, g, or t
  misc_feature (373)..(373): n is a, c, g, or t
  misc_feature (383)..(383): n is a, c, g, or t
  misc_feature (451)..(452): n is a, c, g, or t
  misc_feature (471)..(471): n is a, c, g, or t
gcaacagagaagcctgtgattctaggaagatctattctagcactgcaacgcaggatgaatcagatggccgctagacctactccttatagaggtgcaaaaaggcctacaatcacaaaacacttgtgcaccttaaagccacctgtcagggctatgtcctcatgctgaggtcctacaagagggctaacccatgtacactctgagagtgatgcagggagaacctaatacttacaggccttagagcatgaaactgatatcctctgtgactgatcatttgagcagctggngcatttaggaggtgtgagaagagaccaagaggagaaaaaattggacactgtaacatgtaactggagcctaagaaatcccttctcccatngttccctagngaatatttacaatttcctgatttcaaaaaacacctttaaaagctgggctgaaagaactgtttactggnngcatctttaaatgaaacan

SEQ ID NO: 693554 - DNA, 199 bp, Homo sapiens
acataacccacacatgatcaaaccaacacaaggcatgcacataaggaaaggtaaaaaaaagtaaaaggaaaacggacaaatctaaccccgacctgtttaccaaaaacatcacctactaacatcaccagtattagaggcaccgacctgcccagtgacacatgtataacggccgcagtaccctaaccgatgaaaggaagtt

SEQ ID NO: 693555 - DNA, 690 bp, Homo sapiens
ctaaccagggtagctgggcacaatagttgagcaggattctcattaggctatcgagagaatcaggcagccatccatagatcaaagtgaatgcacctatgtcagactactgcatacctctacgtcgtctgggaatcttacctagtctggcacgtgggaatggatgcaattaaggctactggagtaccctgaaactgtcacgaagcttgatgcaatgacatactgcacacatctcactctgagccagttgactatcacttgtcccagcccttgatatattggaagattagaggggaattgccagaagtaaaccaactgtctgctgaaagaaatagacagatatcgaataacttggaaaaatgagtacttacgttcggtggcaaaagccaaacacacacctgagtcttcagagctcagagtaataggtggggctgaaactgcaataggcatacaatgaaggtcctttgtccatccgttttaaaaggtacgggttggcctgggcacagtggctcacacctgtaatccctacactacgtgaagccaaggcaggaggattgcttgaggctcaggagttagagaccagcctgagtgacatagtgagactttgtctctacaaaaaatgctctgacattagccaggcacggtagcatgcaccaaggatcgcttaactcaggcgggcatggatgtcttcga

SEQ ID NO: 693556 - DNA, 145 bp, Homo sapiens
ggggactgggacctggcggagggttttggccctgttggggttggaccctgggatgtggggccttgtggaggcaccctgtggtgctcaccttgcagcaggcgagagtcgtgggaggagacggaggtgagggtggagtagtccccgg

SEQ ID NO: 693557 - DNA, 287 bp, Homo sapiens
gctcgaccttatttagctgtacaatgtcagtgggttctgtgatttcctcagtggcttatggtgtagtagttagtagaggctgtggtgaagtttgggtaggaactggaatgccaggtgagctagtctttgggcctgggtggtgatggcagtgggataatcatgcctgttcatggccccatggtgacgtacgctggcactgattttaacttgtgcaagcaggctgattcttggggctccaggtgacttgcttgggtaccagcagtggcagggagggtgggcaggttctt

SEQ ID NO: 693558 - DNA, 400 bp, Homo sapiens
tgagatggagtctcactctgtcacccaggctggactgcactggcgcgatcttggctcactgcaagctccgtctcccaggttcacgccattctcctgcctcagcctcccaagtagctgggactacaggcgcccaccaccacacccgactaatttttttttgggatttttagtatagacggggtttcatcatgggagccagtatggtttcgatctcctgacctcatgatccgcccgcctcgccctcccaaagtgctgggaatacaggcgtgagccactgcgcccagccaagatgtgccatttttaaggaactttttgaatggaaaaactactgccagttaaactgggcttacttatcacttagaatttctacattcttctaagcgctgttttggactaaatt

SEQ ID NO: 693559 - DNA, 194 bp, Homo sapiens
acgacaggcttctggagggacgtaaaacttcagatagtgtctgatataagacaggtagaggaggtaccacataaaaatggagtcccttatttaacacatatttaatagaggcaccctattatagtgtgacactaaggataccagaggtaaaggacaggagacttcacctaattgagaaaaaggccagccaaagt

SEQ ID NO: 693560 - DNA, 163 bp, Homo sapiens
tcgagctcggcccccttacaatcatggcagcaacgccacttatccaccacaccaccactgaggcgtgttacggaggcgctcgttacggacgttacggaggcgctcgttacggaagcgctcgttacggaggcgctcgttacggatgttacggaggcgctcgtta

SEQ ID NO: 693561 - DNA, 148 bp, Homo sapiens
ctactccgtatctcaggctgactgtgctgtcctgatagtagctgctggtgttggtgaattagaagctggtatctaccaagaatgggcagacccgagagcatgccctactggcttacacacatggagtgtgaaacacactaatagtacg

SEQ ID NO: 693562 - DNA, 386 bp, Homo sapiens
  misc_feature (179)..(179): n is a, c, g, or t
  misc_feature (184)..(184): n is a, c, g, or t
aaactagacagaaatatcaatgtttgcctgttggtttctacttatgaaacttatgtccatatgtactgcataatttcattccattaggtgatagtgtgcatttttttctggttgggggagagaggagaggagagaagaggagctcttttgtggttatttgtgttgtgctatttatcatnaattnttgctacttgtggcaacaccttcccatatttgcgtgtgagatatcacccttctaattgtaacatttaggtaaaatcttatcatcatttactgtgttggcttaagccagatggactgttcattccacatgtgacaatgattggttcagattagggcaaatacttcattcttaacaggactattattttaaagctgctcctgtt

SEQ ID NO: 693563 - DNA, 389 bp, Homo sapiens
  misc_feature (2)..(2): n is a, c, g, or t
  misc_feature (261)..(262): n is a, c, g, or t
  misc_feature (265)..(265): n is a, c, g, or t
  misc_feature (283)..(283): n is a, c, g, or t
  misc_feature (286)..(288): n is a, c, g, or t
  misc_feature (290)..(291): n is a, c, g, or t
  misc_feature (294)..(294): n is a, c, g, or t
  misc_feature (296)..(296): n is a, c, g, or t
  misc_feature (298)..(299): n is a, c, g, or t
  misc_feature (301)..(303): n is a, c, g, or t
  misc_feature (306)..(306): n is a, c, g, or t
  misc_feature (310)..(310): n is a, c, g, or t
  misc_feature (312)..(314): n is a, c, g, or t
  misc_feature (316)..(318): n is a, c, g, or t
  misc_feature (321)..(321): n is a, c, g, or t
  misc_feature (323)..(324): n is a, c, g, or t
  misc_feature (385)..(385): n is a, c, g, or t
ancagatcaactggcctctcggtctgtacaaagtgtggggcgtgaaacgcctgggctgcccccacttctcccataattccctgccctagagcagcacctccagagctaggagaaggagagggggccacccaaggccttcccttgaggagaggggtcaggagtggactggagtgggggctgttttctatctgagggaggcaaagaagcagaggagaaaactggagtggcggaaccctcccgctcctcatcccgtcccctgtnnccncgccccagagtccactgnatnnntnnagngncnncnnncancctnannncnnnctnanncattatccattccacttccatttcatatttccacgcctctttgcatgccatttgtgcatantgcc

SEQ ID NO: 693564 - DNA, 362 bp, Homo sapiens
  misc_feature (310)..(310): n is a, c, g, or t
gtttgtctgctgttaaacagcagacaaaactccgagccctggccgggcccaggtgtcacgcctgtaatcccaacactttgggaggctgaggcaggagaatggcatgaacccaggaggcggagcttgcagtgagccaagatcatgctactgcactccagcctgggtgacagagtgagatccgtctcagaagaaaaaaaaaaaaaaaaattagctgggcatggtggcacatgcctgtaatcccagctacttgagagactgaggcaggagaatcacttgaacccgggaggcagaggttgcggtgagttgagantcgtgccattgcactccagcctggaaaacaagagcaaaactccgtctcaaaa

SEQ ID NO: 693565 - DNA, 431 bp, Homo sapiens
gagcattacacacaggactaatatacagaacgctagaaggaatcaaacaagagtcagaagtaaaaaagaagtaatcctatcagaaagtgggcaaaggatatgaacagacatttctcaaaagaagatatacaaatggccaagaaacatgtgaaaaaaatactcaacatcgctaatcattagggaaatgcaaaataaaaccacaatgagagaccacgttactcctgcaagaatggccattattaaaaagtcaagaaacaataaatgttggcgtggatgtggggaaaagggaaagcttataccctactggtggtaatgtaaattaatacaacctctttgaaaaatagtatggctattccttaaagaactagaaatagatctaccgtttaattcaacaatcctactactgggtatctacccaaaggaaaagaagt

SEQ ID NO: 693566 - DNA, 128 bp, Homo sapiens
gtctggccgctctagagatccccgctgcagtaggtgccaacccagaggcggaagtactctgggaggacgttactcgaagatccagaggtcgtttcactggaataaatctgcgtgtgtaggagcagagc

SEQ ID NO: 693567 - DNA, 757 bp, Homo sapiens
  misc_feature (47)..(47): n is a, c, g, or t
  misc_feature (81)..(81): n is a, c, g, or t
  misc_feature (89)..(89): n is a, c, g, or t
  misc_feature (111)..(111): n is a, c, g, or t
  misc_feature (267)..(267): n is a, c, g, or t
  misc_feature (273)..(273): n is a, c, g, or t
  misc_feature (352)..(352): n is a, c, g, or t
  misc_feature (354)..(354): n is a, c, g, or t
  misc_feature (368)..(368): n is a, c, g, or t
  misc_feature (567)..(567): n is a, c, g, or t
  misc_feature (586)..(586): n is a, c, g, or t
  misc_feature (627)..(627): n is a, c, g, or t
  misc_feature (668)..(668): n is a, c, g, or t
tttgtttcatttttattatgacaaacaattttcaagtctatttcctntatctaaatacaaagctaaaccacaaacacgcgnataactcnagacatctcgtgtctcacattnacactcccatcggatcctcttccaatttgctgaccactgaccaggctagcggggggtgggagggaagactttcttaggtagcaccgtcgtgaggcccgaggtggggttgggggggaatcaaagacgaggacagacctctcatacctgtttccattnacattnacctgggaccagggtgggcaggagaaaccagggcatggctcctgacccccggccccctggactaaagggacaatgtgtnanatcagtcctcgctnaacgagcgcgggaggaagcacgtcacctatccctcctgcctacagcagtcagagggtgaaaaccttagccactatccttgattcctgggggctgccgggccctgtatgcccccctgcacacctgggtgcctctctgaggctggcagcagccgccggggtcacgagcgcgtcctggcgctcctaggctcacacctaagcncacagtccgcctacttccnggaggacactggtgtgtctgaaaaacacaaggactcgacancagggctggaactttcaaccccagcaggatgagggggaatnggggtggatgttaggtaagttatttctggtcccactacaaaactttatttttgattagagtaccaatctcaatctcttctacaaaaagc

SEQ ID NO: 693568 - DNA, 461 bp, Homo sapiens
tattgatgtgggaagatggatatactggatagtgttcttttggcagtacgcataggatatgtggcatttgtgtcgtgcagctgttgactgttgcttgtccgtggttgtgactgtatgttgtggtggcattggatgtcttcacaattgtgactaaaagctgccttcggacacgatcgtgaacttgacctgccattttgtatatataccacggcatccgttgaatctcatgacactggttctagttcttgggcttgaactttaacaacctgctttattttctgacaaccactgctattctgattgctatggcgaggcaccatgtgaggcttaggcgagttagtagctctggcagggctcaaaggcctgacaggaaacggaccccaagtggattgagctggtggaaaagtacctccaaagtgggtcatgggcaaccttggtggacggatctgctggaaagtctg

SEQ ID NO: 693569 - DNA, 301 bp, Homo sapiens
  misc_feature (11)..(11): n is a, c, g, or t
  misc_feature (18)..(19): n is a, c, g, or t
  misc_feature (57)..(57): n is a, c, g, or t
  misc_feature (72)..(72): n is a, c, g, or t
  misc_feature (80)..(81): n is a, c, g, or t
  misc_feature (86)..(86): n is a, c, g, or t
  misc_feature (93)..(93): n is a, c, g, or t
  misc_feature (99)..(99): n is a, c, g, or t
  misc_feature (117)..(117): n is a, c, g, or t
  misc_feature (133)..(133): n is a, c, g, or t
  misc_feature (135)..(135): n is a, c, g, or t
  misc_feature (140)..(141): n is a, c, g, or t
  misc_feature (163)..(163): n is a, c, g, or t
  misc_feature (190)..(190): n is a, c, g, or t
  misc_feature (193)..(193): n is a, c, g, or t
  misc_feature (234)..(234): n is a, c, g, or t
  misc_feature (253)..(253): n is a, c, g, or t
  misc_feature (275)..(277): n is a, c, g, or t
  misc_feature (279)..(279): n is a, c, g, or t
ttcttgaggtnttttctnncatacaggccatgtcttcaagtctatgtttgggttcanttttctttgcataanccaggaannataantcatgcnaaagcnagttgtcttgccaccacnaaaatgagttctgaancnaaatnnaaagatgacatccggtgtggtnttgtacattttggctagtttttcccgnatntctgtcttaggcactgtcgccttcccggggtgaaggacatnaatgaccatttgtttcctntgaagtagtcggttggtcatgnnntntctagtgcggatagttacggtg

SEQ ID NO: 693570 - DNA, 106 bp, Homo sapiens
cttctagctcggtaccccagatgagcatgagggggcaataaaaaaataagctaagacaaactgagactggaagacaaacaccggaagggcctgtggtgggagctta

SEQ ID NO: 693571 - DNA, 168 bp, Homo sapiens
ctctagaggtatccccgcacccaggcgcacttctgctgttccttgccaccgctgctgctgctgctggcacgtccccacggtcggcggtgcaggcgtcccctctgcaagcgttatacttctttgcggaatgggccaccatcttcacctactaagactaggcaactctat

SEQ ID NO: 693572 - DNA, 84 bp, Homo sapiens
  misc_feature (30)..(30): n is a, c, g, or t
  misc_feature (42)..(42): n is a, c, g, or t
ccggtgtatccccaacccgacccaatgacnccaaacacagtntgggctcggtattatatattttctcattaaaggtttaaaagc

SEQ ID NO: 693573 - DNA, 971 bp, Homo sapiens
  misc_feature (402)..(402): n is a, c, g, or t
ttttttgtttttgttttttggaaaaagtcatcggagcccatggggtagggtcttgaaaccagcttgggggggttcgatcccttcctttttggtctaaatttttattgttatacgggttcttcgaatgtgtgggataggggtgtggggggcatctccataattagcctcacctccaggtttaagtggagggttctctctactattataggactttctcgctctcgaagcgaaggctctcctcaaatctcagtgaaaatttattaattataacgtgcgtgtaagagaaagtgaagtgagccatacagagtgaataggagtgtttcacagtggtgggtgatagtgcatctcggggaatagtctccgagtatacacgcgctcgggggcatctcccggaattagccnccgagaaaacagtctgtcttggtgcggcaagaaaacgtctatagaactctatagcgccgcgagtgacatctattgcatacgtggtgacaagtgggatttttgcggcggatacgcgttgtgcgcgctcccataagggtgtgtatacgccccgtgggagcaacattgcgggggcgcacaacactcccagcgttgcaatgtgacacgccccctccccatattttgtatggtgcgggcaacaatattacgagccctcacatatgtgtgcagatgcgcgaccatataggcctggcgcacacgtgtatgagcttaaccacaagcgtgtatatgcatacagcggcgtgtcttccggggggatacgtccacccgaaagtgcctccccaagactgagcattagacaggcttctgcggccgtaaaatttcaccaacagtgcccgcctggtctacaaggggcccccccccacattaccggggcgtgtcaaacaccacgacaaacggatagtggcgaacccccctaaggggcgggctccacaaaaaacccacctttcgtgcggaccgacgcaccacacatt

SEQ ID NO: 693574 - DNA, 128 bp, Homo sapiens
  misc_feature (14)..(14): n is a, c, g, or t
  misc_feature (111)..(111): n is a, c, g, or t
  misc_feature (118)..(118): n is a, c, g, or t
aggccagagccagnaccgcccagtctgcaccaaacccatgctcttcgattggggtaaaattcaaaaccagcagtgagtagatctttcctccgcataatgtttgtgatgcanatcctgnagtttgtttg

SEQ ID NO: 693575 - DNA, 908 bp, Homo sapiens
aaaaacaaacaaacaactatttaggaaattcttatgatctcgtacatgtaatgcttcggctcctttcgccgtaccatactactgtctcttacccactccgtggattctaaagacaggttattacccaatccagtatcgcccggcccgtgtggcccactccaacgacaccaataggttgtccaacaaaagaaacgttccaatttacctgaatctctccagcccgcttttctaggctaatcctcctctgtatctcgtgtttttcctcgccccgcccctgcctctcggggttgcccccgcgagttttttgggttcaggcccaagttccacagtcgggagccctggggcgcggttgtgtataggcgcgcgattattccgtggggggaatatacgcacgcgcggtgaaaaacggataaacacacagtgagcgccgcttctaaagtgtgcgcaaacaagggagcttcgcctagaagtttcctgaaggcaccgatggctcccaatgaggcgctttataatcggcccccgctgctgtgatgctgtcgccccgcgtgttgggaaaacaaaacaaacggcggatttgaattcggaggctcaaactgggaggagttagcacaaagcattatgtggcctcacgccgtgtggagccaccagcactttttcgcgcatgccggagttcgggtggattgacctcttatttttcagttccgcttcaagatgcagcaatgcacaacatcggtaaaatgggagatataaaaatgcgtaagaggccgcataaataaagagcaggcggtgggtgagataaagtggagagtgtaaatcatctccccgtcttaagtgagtcaagagtcagatgacccccgcaaaggtgctataaaccacaaaaagaattttctatatcccccacaaaaaca

SEQ ID NO: 693576 - DNA, 1122 bp, Homo sapiens
gacagttctagatcgccagaaacctggaaagttctttggaattcgcctgcaattacagtatatagtcatgtcctgcattacagcagtgcacaatcatttatccaagccttatgttatcattggcattatcattctctacttcaacaatcaccacacgtgtattcatcacattgcaacatgcaccagccccaacaattaggcattggttatacccaacaacccacatgaacagggcatttcacagcattcaatattatatattgtactgtttatgaagcagcaccatagctatcatacatcaattagctcagttcagcaacgagccagctcacaaaccagcgtgatacagtatcattgtatcttctgcacaacagatcccagtacctaagcagccaggcattctatcgcatcagttcatgtcgcagaagtgcaaacaaggttatgtcatggttcttggtcccaaagtacactacagttcttcacaacattccttgaacacatgcatcgtcaacacccattcataccttatcaacagggtttacatttcgacagcatgcgtgtctcaacaggtaccacgacatatttagtagatacagagtacgattattatacgcgtcccgtcagttacatagatagcctatctataacttaatcacagtactaggtagttacgcttctacagcaaacaactcgcaggtaagggccaaacgcaatcccagagattcattagatgcgcacaacaaccaaagaacaaaatctttcaaggggatcacgacatagaccaattgataaatataccatggcaagaagacgaagccatacgacacaaaacaacaaaacggacacgtgagacccaataatagcgcaacccctagacaagaataccagcgatccgcgaccaagagaaccaacagaaaagaaacacacaacggagaagacagtaacctcgcactacggaacaaacaacaagatatgacaaaacaggaaagaccgaaaggaacacggtacaaacaaacaagaaggaaacacaagtgacacactatatacacagacgcacaacaacataagcagagacgaagacacaaacaaggcgacccaggagagaacaccgaaaaaaaggaa

SEQ ID NO: 693577 - DNA, 219 bp, Homo sapiens
cctaggcaggacaggtggtaggctggtgagaactggcggtcacacagcaccagctgccgccatcaccgcagcggaagcactcgtcctcggacggcctcttcccttcccctttggctcggcgccgcctcgttttcttctgggtcttttggcccttttcctcggatgaaagggtcgtcgaggtcttgggtctatccccgaggaggaagaggtcagcgtggt

SEQ ID NO: 693578 - DNA, 1278 bp, Homo sapiens
agcggcgggcgctgacgtagtctgggcggtcggcttccactccttcaggcgtcggcagacactagtcgtggcgagaggggcggggtggacggggctggcgctccacttggcccccggatacaacggaccgacgcaaccgccgcagagggacacagagaacgaggggatatacttaggagacagagcagcgaggaaaaccgaaaaagaggacaagaacagacaacgcgcgcgcagaccgcgacacgaagacatgcggaccgagccagaagaaacagaggacaaacaggaaccagaagcaagaacagacgcccaaacacacacccaacgccctgggccaaatacaaaaacaacaataaatggacaagcgaagcactggcacccagatccaacagacaacagaaagaaacccaaaacacacctgagggcaaagacacgcaaaacaccaggaaacgcagacccgagcgcacaaggacggcacagaacaagaaaagcacacaaagacaacggaaagacaccaagcacgcagcccagagacagatcccagcgcacaaagaaaaccactaacgaacaagcaacgacgcagcacaaccacagagcaaggcacaacaccagcagaaggggaccacagaggaaaccgggcaagacaaacacacaacgaagagcgccagtacgacaccaagacaacaacatagaaagagaacagcaaccacaaaccacgatgcacagccacaggaaggcaccgcagaacagaaacagagaccaacaaagaaaagacgagcgcacaacacagacgacgaaccgaagcataacaacaagaaacaaccaaagacacaagaagacaacagacagaaatcaggcaacaaccaaacgaaacaaacaaaaagacaagagaagaacagacaaacgacaacagacaagacagaacaacaacacagaagagaaagcgacagcagaagagaaaagaacagcgagaggaaagggaacacgcgaacaacaaaaggacagaagcaacaaacagaaaagagaagggaacagcgagccacagagaaaaaaagaagacacagaagaagaagaaggaaaaaaagaggaacccgaagcaagcaacgaaggaaacggagaaaacgaacagaaacaagaagaggaagagaagcaaagcgaaagaaggccaaacgaaaaagaaagagagacaaaaaagcaaggaaagcagcggaagaacagaaagacataaacgcaagacagagcacacacaaaggcagaacgagtagaaaagagagaacc

SEQ ID NO: 693579 - DNA, 151 bp, Homo sapiens
tagctctctgtaataccatttgagctgaatatctggttttgagacggagtcttgcctattgcccaggcctggagttgcagtgggattactcgcgtggagcccgcatgcctggtcagactattctttattgtacactttaaagctgtaattt

SEQ ID NO: 693580 - DNA, 183 bp, Homo sapiens
ctggcttcttgagaatttaccaatgtgaacagagtacgtagttcatcaggcgtcccgtaaaagcgaccaggaaactgactgggtctctttggctaccggattaacattaaaccttgatgttctgtattctgtactttacttggaccagcagactttcaacaactcattgaaccggatagcttg

SEQ ID NO: 693581 - DNA, 101 bp, Homo sapiens
tgtccacacatatccctattctccaaactgatgaaacttcctccaaatactgcatctcacgaggtacttttcctttctctaaacttccaattaacttgaag

SEQ ID NO: 693582 - DNA, 517 bp, Homo sapiens
  misc_feature (335)..(335): n is a, c, g, or t
  misc_feature (364)..(364): n is a, c, g, or t
  misc_feature (372)..(372): n is a, c, g, or t
  misc_feature (399)..(399): n is a, c, g, or t
  misc_feature (422)..(422): n is a, c, g, or t
  misc_feature (442)..(442): n is a, c, g, or t
  misc_feature (448)..(448): n is a, c, g, or t
  misc_feature (494)..(494): n is a, c, g, or t
  misc_feature (502)..(502): n is a, c, g, or t
cctttcatttgcgtcactgatgtctgttcccagccactccccacaatagatctgacctcatttgttcatattccctgcctggctctgaggtctgctctgtcccctgccgggcaaacatcaataggaggaggtggaataaaggctggccttggcatcccaccagcctggcattagctggcattaaggctgggaaaaacagtcctgtgcgaaaccagatggtccctggtgaaggaagctgctcctccgtggggggcctttccagtccatttgtgtgccaaagatggaagctgatggggaccctttgaagtaggatgtaggcacacaaggtatggctngggctcagaactttccctacttccatctnccccagtnaccttgccctagcaagagcttggccantagggaaatggggtcctattganggttcctgttcaattgccantttttnaacaaaaagggtgatttttccccttatttttttgtttagggttttnttttgggnagaaaaggcaacatt

SEQ ID NO: 693583 - DNA, 477 bp, Homo sapiens
  misc_feature (106)..(106): n is a, c, g, or t
tccagttctttcgataacgcgatgtaatcgtcacaactgagatgagaaaaccagatacctcgtgaagccaacggatgttgcttaacaatccgagccatctcacggncctcgtccagagatgcccccgacggcaagtggatagtccagcctctcaggtcaaaaccgtcaagatctaaagccgccacctcgtcggccggaacaccatgccgatgcatcgacgtctcgacttcgaccaaaatcgacgcgctcggcgcgaggtcacgcaccgcagcgacgtcctcacgccgcgaaatcgtcgtaatgaccttgggatcattcaacaggccggtggctacttcgtcgccagggcgccacggattaaggacgatgacatctttgtcccagccgtactgacggaccgacgccacctcttgggctaccccgacggcaagaatgtcgattcctagtcgttgggactcctgaaccagcaactcatgc

SEQ ID NO: 693584 - DNA, 124 bp, Homo sapiens
gcacccaggcgcacttctgcacccatggcgcacttctggacccaggcgcacttataaacgctgtcgcaatttgcctgcggtgcgcaattgtgcctggggtgcggatttctgcctcgatgtccga

SEQ ID NO: 693585 - DNA, 251 bp, Homo sapiens
atcgcgcccctgcattccagcctgggcaacaaaagcgaaactttgtctcaaaaaagaaaaaaaagaaaaaaaagcccgagagcctcataaggtcacgtgctttttttgtctcgctagacaaatttttttgtttgttttcttttttcgggttgttttttgttgttgttgttgttgttttacagctgaaaccaaccagcaagcccttgatgaccaaaaggggtttctttcaaagctatagggcccaaacacca

SEQ ID NO: 693586 - DNA, 461 bp, Homo sapiens
  misc_feature (78)..(78): n is a, c, g, or t
  misc_feature (246)..(246): n is a, c, g, or t
  misc_feature (283)..(283): n is a, c, g, or t
  misc_feature (314)..(314): n is a, c, g, or t
  misc_feature (376)..(376): n is a, c, g, or t
cagcgacccggtatttctcgcaaccttgcaccgaaaaagcacccggacgcgaatactttaactatggttggctgggangccatttgcgccattttccgggtgttgatccccgagatgtgcaggcgacactggcagaactcaccgccgtgacccatttctgaacaagttttgttgagcggtggctgcgaacgattgatggtatgtggtggaggtagtcgtaatccgctactcatggcgcgtctggcngcattactgccaggcacagaagtcaccaccacctgancgttggcattagtggcgatgacatggaagcnattgtttcgcctggcttgctggcggacgctggcgggattaccaggaaatctgccttccgtcnactggcgcaagccaggagacggtactgggggctattttccccgctaacccgtgatatcagagttaactgaatttttcttaccgcg

SEQ ID NO: 693587 - DNA, 279 bp, Homo sapiens
cagccttacccctacggttgaacatgtttgttggtgtatatattgtaattgagattgctcgggggaataggttatgtgattaggatctatgggttaggatgagtgggacgaagaaagagaggaagtccagtctaattatgcctttttgggttgaggtgatgatggaggtgagcagtatttggatgctgtgcaaatcgtctcaggtaatagtcttttctactccggttaggtctcggacgagtaggggcaggtctgggctcgtcagaaggcctaaggggt

SEQ ID NO: 693588 - DNA, 812 bp, Homo sapiens
  misc_feature (177)..(177): n is a, c, g, or t
ggaaaatttcgaatgtggggcggtagttccaggcgacggggacggtggtacggtcctggagggcccagtgcgcggggtagccgtggtggagagcttcgaagagccttgaaatgtgaggaggaggaagatagctgttgcagaagtagtggccaaggtatcgttctgacgcgcctgggnggaggcgtcgcccgctgtccacattcccgccagccccaccttccacgccggggcttcctgtgagtccctgaacggaggagggaagtaggtttgaaggtgcgaaacaagggcgtagtgatcccgtgtttgacttcccttcggtttccagtatcattctcaaatttcgggtggccgaaaggctcgggccgttggagtcccgagctcgcccgggctttgcggcgggttcaggccactctgatctggcggcttgcagatgtcccgggcttccagtggagaccctaatttcctacttgtgcaaaatggtgtagataacgtgatgtgcaaataaaggctttaacaatagctaaaagcccgtggcatcaacgtaggggaccccagaggaaaaattggccatgcagtccttgtgtgcaggcggtgatacccgttgacgtcctccttgtccgagggccaattctcttcctccacttacccttgtgctgagggccgtgcaccttgactaaggttatccctaaccccttggggttgggtctttccgcaagcaggggccttatttgcgggagaattcatgggcccgcggggatcagatatggcgaggtccttaaagtccaagagcgtttaccccgaggttcttgtac

SEQ ID NO: 693589 - DNA, 793 bp, Homo sapiens
ggaaaatttcgaatgtggggcggtagttccaggcgacggggacggtggtacggtcctggagggcccagtgcgcggggtagccgtggtggagagcttcgaagagccttgaaatgtgaggaggaggaagatagctgttgcagaagtagtggccaggcaaaagatggccaaggaaagatgcctgaaaaagtcctttcaagatagtcttgaagacataaagaagcgaatgaaagagaaaaggaataaaaattggcagagattggcaaaccgcagggtctttaatagctgtaaccatgccaaataatcaccaaacttctaacaactgctgaaaaattaccaagacaacaacaaaatgtagtttagcttgggacaaatgaaaaattccacgcgtgacaagaagcccagatatcatcctacagtgagcaacgaatgttactatctcacatgtcagtatttgcttggacacggacacacttacatcaacaaaaaacagtagaacctgtcagaaaacaggaaattatgttcctctgggaatggacccaatagtggatgacagtccagaaatttatttgtgaggggatttaccgttagtatcaaagtcctttatccaggataattcaatacctaagaagggtttaaattctgtgcattcatttatgaacgggcaatgtgcttatgtcaggtcttatattggtaggactgtggctcctctagtgcgaactttatttaaggagaatttgatgtgttgaacttttattaaatatagcaaggtaagggtctttattatataacacct

SEQ ID NO: 693590 - DNA, 183 bp, Homo sapiens
caaaaaaaaaaaaagggaaggaaagggtaattggggggaaaaaatttttttttcccttaaagccttaaaagggggggtttttttttttggaattttacccaaaaatttgcccttacgggttttaagaaattgggaaagattttaacttgggaaagaaagttttggggcaatggaacttttaag

SEQ ID NO: 693591 - DNA, 712 bp, Homo sapiens
  misc_feature (656)..(656): n is a, c, g, or t
gttgcagattatagatgcagaaagagaaaatgtcctttatgtgtgcatgagtatacatgcactgtgcctgtggctggctgagaagggcaaggtggatggctcttcattcctggaaggctggaccgccactgctgcgagggaagaatcagaagagctgcctgccaacacacttgatgtgtgcaaacagccctcaagtatctgtcagatgacctatataaggtattgaataaggtattcttgtcagtttagaaatggactggataaaacttacttggttgtcattattttatctcatttgtcctgttacatgccctatgttaagataattatattgccactaataatcaagatgctaaatgagtattacaactggctaatatcattttttatatacaagggtatgtgtatatttggaattgatatgagaaactcatttgtacccatttgagtgatattgcacaacaaacacagatacctacagactccgttttcattttctcgtgttctttatgataatgatcttgtagatgggttatttctgtactttatctgtaataaactttgtagatcctgtgaaccattactttgcctaaatcacttgagacttgagtctttaataacaaagcatcaatattcactaaaagtccatctctttngagtttctgtgacttggtagaagtcttgacactaaggatagtgttaattttcccgg

SEQ ID NO: 693592 - DNA, 185 bp, Homo sapiens
  misc_feature (174)..(174): n is a, c, g, or t
cggggaagcctggtccatgacctccaaatgtttagatagcctttcgttgttccactgaaatcccgtgtggagaaccttggtctcagttctgtgtgctctttagacgtaggttgcgccatgtcgcttcgctattctccttgcaaggttatttctatttgattcattatgccgaangtccaggtatg

SEQ ID NO: 693593 - DNA, 259 bp, Homo sapiens
cggcacgaggagcaccttgagctcctgggatgcttggtcgttgtttggttgggttgttttaaatttgatttttcttttcctgaactatgttagaagtcagacctatgcaaggaaatccatggcccacttcagcatccacccagtgggggtgtctactcggtggtggtaggattcatggaaacgttttcttgaaatgaaagcgaagatgatgtactcacattgtaaaatggttcacactaaagtttggcatctttctcca

SEQ ID NO: 693594 - DNA, 944 bp, Homo sapiens
  misc_feature (3)..(3): n is a, c, g, or t
ctntcataaataaacaataccatcctatataaagacaaacaccatttggcctctctcccaccatcctcttttacagaccttctccctatttactttgcgtttcccctacctacctaaaaccgtttaccaccgcagcatttctctttccccgggtatgtgggccgacacacaaatacaggtggggccaagaaacctctctaatattggcactcttttcggcatttgacaactactatctgtgttcgccaaacactttatgtatttccagtgcgaaggtttatgcggtcccccacggctgttccaacaatatgcggccccattttctgtggaagccccctagaatttcaaaaactctgcgggttcgctaccccaacttttgtaatataatttccacccccccccagattgccccaattgtgaagctattagcacacactcttcacccacggcaaacgccccccttttcggagatacaacatcttgttcgccaccatgctagttaaccacaacaatcttgtctcccgcaccttaaatttcttctgcgcaccagtcttcctgtgacgccacggagatccatcccccccgattgtgcgcaacttcaacaaagtctatttggtaaagagtggaaatctccaaacttttaaatcccacgcaatcttacgtgacgcaaagtcaaccccacttctggcaccccttacacacttgtcatatgccaaattccgcccctcagaactcactaacaagtatgaaacccaccaattgacctcatgaacatgaatatttttgcccccaatatatctttgtatcaaaccaaatacagcatctgcccttttcaacctttttcgcgccctttctattaaaatactttttccacgtttcccttagtcctaacgttccccccaatttcgaaaaacaaacccccattcccccctttccacataaca

SEQ ID NO: 693595 - DNA, 106 bp, Homo sapiens
tcctcacccatctcccaccttgtggaattaaatactatgttagcacttcccaaaaggaagaaggagaggctgggtaccctgtgccctgagctcagaacttcagagg

SEQ ID NO: 693596 - DNA, 202 bp, Homo sapiens
  misc_feature (36)..(36): n is a, c, g, or t
tttggtattttagtagagacaggggttcaccatgtnggccaggctagtcttgaactcctgacctcaggtgatctgcctacctcagcctcccagtgtgagccaccgcacccagcctggattgttgaattcaatgcttgggtcacctccagattcattttaattagttggggttgtggcctgggctttagaatcctaaggtgtg

SEQ ID NO: 693597 - DNA, 444 bp, Homo sapiens
agctcttggcagggtgtggtggctcacacctacaatctcagcatttttgggaggtggactcagacggacgacttgaagtcaggagtttgaggtcagcttggccaacatggcaacaccttgtctgtactaaaactacaccccttagccaggtgtggtggtgcatgcacgtactcccagcaactccagaggctgagatgggagagtcccttgactccaggaggcagacactgcagtgagctgagatcatgctactgcactctgtcctgggagatggagccagacactgtcttacccccactacgagatttttctcacctttttgtgttgttgttcatcacctatcatcgctaatgtaagtgcattttatatgtagcccacgacacttcttccagtgtggcccagggaagccacacgactggacacccctgcagtttaaccgaacct

SEQ ID NO: 693598 - DNA, 374 bp, Homo sapiens
  misc_feature (172)..(172): n is a, c, g, or t
  misc_feature (206)..(206): n is a, c, g, or t
tgcatgttaatgggtgtaatggagagggcggcgaagaggacccgcaggctgcaaggagctacagcgatggtgagaaggcaacctatagtgcaggacatcaaagacaacctgaaagaggcgattgttaccattgtggcctccatgagcgacctggtgccccccgtggagctgncaaccccgagaaccagttcagagtggactacatnctgagtgtgatgaacgtgcctgactctgacgtccctcccgaattctatgagcatgcacaaggctctgtgggaggatgaatggagtgcgtgcctgctacgacgctccaacgagtaccagctgatgactgtgcccagtacttcctggaagatcgacctgtcctctagagt

SEQ ID NO: 693599 - DNA, 349 bp, Homo sapiens
gtgtattgaaagatacttagcaccaagaaagattcactatgaatatcctatgttatagaggccatgataatgcataggtggccggatgaagtcatcgtcatgaactgcacacgtaattattaattcctcggcagaggacattactgggtttccaaggctgcttgttgtttttgctactacaaataatgcattgatgataaatacttttacatacatggttgtatgtttatctgaactattttcaccaatatattcacctagtgtgtatggaagtgtccatttttgtcatacccctggtaaccctgtgatattatttataaacattttgctaatggatctctgttcttgt

SEQ ID NO: 693600 - DNA, 143 bp, Homo sapiens
tacctagtcacctgagtttccctaatgtataatagtaacgacttagcaattatttgaacttttttcaaaagtaacatagattggccaggtgcagtgtctcacacctgtagtcccacactttgaaccggcggtgcggcgtgcgt

SEQ ID NO: 693601 - DNA, 227 bp, Homo sapiens
gcccttctaactcccctgagggctaggagttatagggaaggggttatttgtcccccacccacttgccacaatgggaaggtggagggaacacggctcaagcctcctcacttgtctaaaatgaggcctaaatgtgtgaagtgcgatttctgcttttgtgaaccccacccccccccttatccccacgctgcctttgtgtgtttgtgtccataaaaagcccaaacctgtga

SEQ ID NO: 693602 - DNA, 143 bp, Homo sapiens
  misc_feature (74)..(74): n is a, c, g, or t
  misc_feature (124)..(124): n is a, c, g, or t
cgatgttcatttgggcttgagtccgaagcgtgatgagtaagaagatcctgctactacttttagtgcttgagtanggggtaccgctgagactgggcgtaaagccttctatggctgaggggagtcngggtgtggagacctaattg

SEQ ID NO: 693603 - DNA, 182 bp, Homo sapiens
  misc_feature (125)..(125): n is a, c, g, or t
gcacctccaactccctagagttgtactacactctagacctgttgccacacacaaataaagtttctacatttacatatgtcattgtgtacctaaacatctccactttggaaatatagatacctcanactatgcatgtctaaaaaggaaatcattctctttccatccaaaccatctcctttggc

SEQ ID NO: 693604 - DNA, 975 bp, Homo sapiens
gacgagaagcagctgctggtggaggccatcagacgtgcccgctagggacatgccagcctcgtgccgcggctggtaaacatcaccatcatcaaggagcaagccagagacgtggtgtcctttgagcagcctgagttctcggtcagccgcggaggaccagggtgtgcccgtatccctgtgcatccggacggtgtcctggaggggcgggaagtcccagtgtctcctacacgctagacaggatggcaaccgcgcagggcaatcgggactacatccccgtggaggcgtgagctgcttgttccaagcctggtgtgatggccttgtgaaagaagctgcatggtgaaagctcctggagctggcaacgaatgtttgactaccctcctgcaggggaccgtcagtgttcctgccggttattccatcgtccagctcgagcaagccctaagtttgggggcccagctggggccagccaccatgtcacacatcatcatcatcagggagcccaggatgaactgggaccggagcgttcacggaggtcagcatgtggatgcatcgcaagtcatacccgttacacggtgacgcgtggggggcacccgtcatgaatgcccaattgcgaagggcgctgtggataccaggaaagatccatgtacagacgtggggtgtaccccgtttctggcaacgccaatgggggggttacagggggctaaaaggtggctgggacttccacgggtagagcatcccggaaatctcgacagtgcgcaacgtggctgctgacaagcacaagtgttgcgccctcaagttggggaggacgtgcaacccaggatccagttacgccgggtagttgggcgaacctactgacgactgcacaggggtggggcggcccctaacggggggcttacaagaggacgcagggggaaccggtaagggagctacccgctgggtggtcccatggccggctgggcccaaccgagggcaccgcaggac

SEQ ID NO: 693605 - DNA, 660 bp, Homo sapiens
tggaaatggagtcttgctctatcacccaggctggagtgcaagggcccgatctctgctcactgcaacctctgcctcccgggttcaagcgatcctcttgcctcagcctcccaagtagctgggattacaggcttgcaccaccacgcccggctaattttggttattttacagtagggaccgaggttccatcatgtgggccaggctggtctcaaactcctccaaataccacaatgtaccccatcaattatgtcacaatttatggtcacttacaatataaaagcaaaaaatgttggtcagattaaaacaaacaaagtattattgtgaaatatacagtatatgtcctcgcgaatcaccaactattatacagggtccgtctatcgacgagacaacatcgtccccctgaactgcaggtctgaccaccttttggcacgaacgccacacagcaatcacaacacccttcccgtcaactcttttacgagtggtgaaccgcacgaaacacacaaagcggccaggggcattggtgtgctgggagtgacccgtgtcctcacgcggggacacttggggtgggccaacgcttgtattggcccagggacattacaaacctgtaccaacttggggagacattgggttccacctttttcccttgaacccccttaagttccc

SEQ ID NO: 693606 - DNA, 111 bp, Homo sapiens
  misc_feature (21)..(21): n is a, c, g, or t
cgaatctagaggtatccccgntctagacgctgaactactctgcactacatccgacaacgtacaaccgcttcgagaagcgccacaagaacatgtctgtacacctgtccccct

SEQ ID NO: 693607 - DNA, 444 bp, Homo sapiens
ggattcattgaacacgatggtcctgagtgagctactgtgtcatacagtctccagaatagtgttctatagaagaatacgatcttagagtttgatgccataataacagttttattgaggttctctcttgtctctatttgaagctatgtgcccgtttttctttctcaatatagtgtcaaaagctttgagcaaggttttatatataatcacatattatgtatactttcatcatatttgcttttctcttttatcactttactaaaccttatttttagtgtatgtgaacttctgttaagccacttcaaaaccaatagcaaataattgttccttgatcttttttctaatgttgttagttttccaatgttgttaaattgcaggaaatggaagggaaatggagggggaaataacagaaaatgtataatttcacttggctctaacactacacta

SEQ ID NO: 693608 - DNA, 531 bp, Homo sapiens
gaatgagccggtaccgggagtggagagagaacgtaggcagttcgcacttcagctatgacaggaaatatcctctccatagggcgcaggccaagtaaatgactttgtatctttacttcatactcttcatttacatagggtgtaccccaagtaaccaatggaatcctctagagggtatttaaactcccccagattctgtaacggtgcccttgaggccctatgcttgggcctgctcccacactgtggagtgtactttcattttcagtaaaccccttcattccttccttgttttgctcgtgcgttttgtctaattctttgttcaagatgccaagaacctggacaccctccactggtgacatattttggcgagccagcggggaggaagaggtaagtccaaagtttgggattcctttttctcctttctctttttcctttctgctccatacaggggaatcaatcaatcaatcaatcaatctctctctctctctctctctctctctctctctctctctctttcccttctctctccactcg

SEQ ID NO: 693609 - DNA, 1422 bp, Homo sapiens
  misc_feature (37)..(37): n is a, c, g, or t
ggccctgaaggtgccactccagtgcccaccagcctgntcctaataaaacttaagttgtatcactcaaaaacaaaaaaaaaaaaaaaaaaaaaaaaactttgtgtgcgggcgcgcccgtgggccccctagaagaaggttttttaagacacccttcgtgttgtggggcgcgccgcgggggccacacagtgggggtacaggtgtgacccgtgtggccacaaagagcgtgtgtttccctatgaggaagaaagccgcggcgtcccgagagaccctatgggggcgcgggggacattctctcacaccaaaattaaaaaaacgccccccggggggcaccacgccagaaggcgtttcttggaaacaaaaattcctccaacaatgggaacttctcgagaggggtccaactaacgggggggaacctctatcacacaaccgagagggggacgtccccccaaaagggcgagaacgctctcagcaaaatcatctcaaatatttagagcgccccaccgacccctgtggggtggcccagcacctgaagacagaaacacgacagcaagaacacaagaacatcaaaacgaagcaaaaaaaaaagaaggaacgaagagcaacgacagaagaacgaccaagccatgaacagtcagacaaccacagtaccgagcgacgggaagaagggaagtgaggaagcgaggagatgcggggaacacgaggacagagcgggcgagagcaagggtacgcaaggacgaaaggaggaacgaggcgtagcggggagggagccggagagaacgcagaagaaaggacagaagagcagagagtagagaggaggaagagaaaagaagaggagagagaacagagaaagagagggaggagtgaggagaagcgagccaagacgaaagcatagggaggccagaaacaggcgcaacgagaaacggaagacaaggcggacgagctaaaacacgagagacggcagcagcgagaggggaacgagggcgagacaggcgacagaaagaggaagcaggcggagaagacagaggagcagggagagaggcacgacacagaggcaggagataggacgaggtaacgacggaataggcagaagaacggcgggagaaaagcaggaaagacaagcaacagccgacaacgccgaagtcagagcaggagcacacgacgcggcgcataagcagacagccaggcgacaagcagcacgaagcaggagcgagagagaaagggaagaggcaaaggcacaggaagacacaacgaatgatagacaagagaaagaggacgagagagggaacggcgaacgacaggaaggagagaaggacgagaaaggcaaggacagagagcaggaaagaagagaaacgacgatgaaaaaggaacagagagagaaaaacaaagcaaaccacgaacaacggcaaggaccgcaacagacca

SEQ ID NO: 693610 - DNA, 374 bp, Homo sapiens
  misc_feature (23)..(23): n is a, c, g, or t
  misc_feature (49)..(49): n is a, c, g, or t
aagtaccctaatttgatcattcncattgtatacacgtatcaaaatatcncattgcatcccacacatgcataattattaaataaaattgaaggccgggcacagtggctcacgcctgtaatcccagcacttttggaggccgaggcgggcggatcacgaggtcaggagatcgagaccatcctggctaacacggtgaaaccccatctctactaaaaatacaaaaaaaaaattagccgggcgcggtggcgggcgcctgtagtcccagctactcgggaggctgaggcaggagaatggcgtgaacccaggaggcggagcttgcactgagccgagatcatgccactgcactgcagcctggtgacagggcaagactccgtctc

SEQ ID NO: 693611 - DNA, 96 bp, Homo sapiens
atcacggcgatgcggtccgacatgctgagcgcctcgccctggtcatgggtgacgaagatcgtcgtcacgcccagcctgcgctggatgtcgcggatc

SEQ ID NO: 693612 - DNA, 264 bp, Homo sapiens
  misc_feature (7)..(7): n is a, c, g, or t
  misc_feature (14)..(14): n is a, c, g, or t
  misc_feature (54)..(54): n is a, c, g, or t
  misc_feature (58)..(58): n is a, c, g, or t
  misc_feature (65)..(65): n is a, c, g, or t
  misc_feature (67)..(67): n is a, c, g, or t
  misc_feature (247)..(247): n is a, c, g, or t
  misc_feature (254)..(254): n is a, c, g, or t
gattctngaacggngggagcgggggatcccaacggcttgcgctgcctttgcganagcnaggctantntccacgtcgcggcctggctggggtaggagagggcggtccccagtgcagttgggtgaactaccgttgcacactggagtttctggtgtctttgcttggaactgacctagctcgtggcagggggaactcggctaacggcccacagcccctgctgactcaaaacaactgagttgtaagacagtncatatgncgtgttatac

SEQ ID NO: 693613 - DNA, 292 bp, Homo sapiens
  misc_feature (96)..(96): n is a, c, g, or t
  misc_feature (176)..(176): n is a, c, g, or t
  misc_feature (212)..(212): n is a, c, g, or t
  misc_feature (229)..(229): n is a, c, g, or t
atgatgaagggttggagtgatgcacctagaagtgaaggaatgccaatggttgccagcaaagcaccagaaactagggagaaacaaggaaggattctnccacagtttcagagggagaatggccctgccaacactgtgattttggacttctggcctccaaaactatgagacaataaatncctgttgtcttagaccacccagtttgtggaattttnttacagcagaactaggnaacaaatacagtttttttttgcagtaaagaagttttaaatctgggttatgtccaatgtatcaa

SEQ ID NO: 693614 - DNA, 477 bp, Homo sapiens
gccggagccagcggatctctgatacagtaatgaaacaggcaaaaaagaaacatgaaggtatctcataataatagctacaaaaagaaaaaagaaaaaagaaaagaaagaacaaaaaacccaacaacctaggaataaatagaccaagaagatgagagatctctacaaggaaaactcgcaaagcactgatgaaacaaatcgaagaggacacaaacaaatggaaagacatccgatgctcatggattggaagaattaatattgttaaaatgactcttctatccaaggcaattggtagattcaatgcaaccgctatcaaaacaccaacatcagtttttcaaagttagaaaaaacaatccgtaaaattcatatggaaccaaaaaagagcccaaatagctgaagcaatcctgagcaaaagggacaaagctggaggcatcgaactaccggacttcaaaatatactacaaggctctagtaaccaaaa

SEQ ID NO: 693615 - DNA, 201 bp, Homo sapiens
tatttataaagcaaaggagccacacccacaagccatcagctgggtgaaatatcagcgtgtccacgccgtggtatgccaattcgaggaaagttactccgttggaaatgcttggaagcaatctacgttgctggaaacaaatagcttcatctgcataaaaagtgtgctacaaaagaatccctgtggttagcttactcgtacaca

SEQ ID NO: 693616 - DNA, 202 bp, Homo sapiens
agagctgcgtagtaccccaatacagaccacagtgtgagccagaagatatgttacatcagcaagaacccacaagaacaagaggcatagtaaggtacggcgagagcatgaccgatggataccagaacgagtatggcggacagggactcacgaacactgccgatgtggacatccagctgaacatatactgcgccctgattgtaca

SEQ ID NO: 693617 - DNA, 1650 bp, Homo sapiens
  misc_feature (1310)..(1310): n is a, c, g, or t
gctccatcggacgttctggagagtctgcaccgtggcgggacgcggtcgacggtaggttccacgaatggagataagcaatcgtagaagtaggacaactgaggaggacgtgcgaagagagatcgatcgaaatagacgatgcgccgtacactttgtccttcttgtcgctagacgatccacacgtacgcccaggaaggacgctgtccttctggatggacatagtcgtgtgaggatcatcgatctcacagtagtaattggcatacgggggttcccatgagtagcgaacttgtgtggcacacgtctggaggtcgcacgacttcgacaaagagagcgaatcgtagcgagaatcatgagaacgtgcgattgcaagcttagaacgatgtgactagcgacgtggcgttaatccgatgaccacttcgaggttctccaggccccccaatacgccctcgatgggggtgtcgaccacaagtacgtcagcgcccaggtgaattggtcacaatagggcatacatccgaagtgggcaaggacatgcatgcgaaatagaccgaagggagcgcctagtaagcataagcataggctggaacagtcatcgagcatctctggagtgatcccaggggatcccgagtgcacactgatcttcacctctcagagaccggcataggcaagtgtgtgacccgctgaaccaaggtgctttcaaaagacgatccgtatcgaactgtaagagggatctttcggtcgccggtgctatgcccgtgacgtaggagagaatcccctctagatcgaaatgcaaggtgccataactggggagaccgatgtgaacgcggatgtgaaggccttgaccttagccccaaagagggtaagttgggctctaggttaccctcccctgcgtcgtggtaggtctcgtactctcaaccttagtaccagagtagggcaagcacagagcccacgagtggagaggtaagtgttggagcataatcgcgctctgggggcggggggacctctggggacatgaagcgtggctagcggaacttgccgtgggaccgaagggtcctactgaggaaacggaatgggcgagtaacctgcgtaagcccatggcgagacagcggagcgggcccctaacaacccaatgtaacccccgagcgcctaggaaatgttcccctgtccccaaaaggggtcccccccttacaaaaatagcgggagccagaacgggcaagaacacccagataccagttatcctcccccgctgcaataccactgcttctacccggtgcacacaggacgtggccggacatcagtacacgagcgacacgagncacaccaccgcatataagcagcatactccgcgagaggcccccacaatggcgtccccccaagtgaacaggagccccccccaagaaagagcagtatcatcacgacaagacgccatgagtggacaaccacacgggagtgtactaatgccgcacgcaaaagtggtatcaacgacaaaacccgacctaaaatacgtcgcgcaaaccatagctgtaacccacccgacacaacacgacagctccgagaacacagatgatcaccaacagctctgcacgcagtcgcaagtagacagcacgacacatgacatgaggcggatcacaaccagaacgatgcacaagcaacagc

SEQ ID NO: 693618 - DNA, 2140 bp, Homo sapiens
  misc_feature (89)..(89): n is a, c, g, or t
  misc_feature (140)..(140): n is a, c, g, or t
ctctgccaagcagcatgcctgagctcctggagacgaggcaggcccaggtccttgctgcttgctgctgggaaaggacccagacggagaangggccatgttggggctggaccctcaggtagaggatcaatgtgtccgttatnttgggtatagagagaagtgggtagagctgcatgtgcatctgatcccagctctgtcctgagagggcccacagcccggactcagccacagcagatgccagttccacagttccaggcgctagttccatggttcctgccctgctcacaggagcccgggctctagcatggaggcaggttcggaaggcacaggaagcagctgaaaggggtccccaaggaccagaactaggccaataggcagtgacgttgaagaccacaatccactgactcaaccaggaaatcatgggtccaggctgatagcaatggacagatcggtcaggggaacggggcactcttccacgcgagagtgccagccaaggaacgcgacaggaacggcgcgccgggcgaccacggatgggtgctgaaccagagggattcccatcagacggatgcgaagcagcatctccccacacgtgacttcttatttccaagggaaatgctggctttccagtggagcagcctgtttgaccccagctgacccgagtgatcagagctcccatcgccagtgctgggatgcgcctgtgtcacgcgcctctgggcgggtcgcactgagacggcacagactcgcgctcggggtccctgccaaaaatgcagaacctgagcttatgcatgaggagacctcaggcaagcccaaacagagggacatctgcagatgagcgggtctagatgcttggcgagtgcccaaacatggaagctggggagccactccagttaggagacctgggagaccccatgtagaaatgccaggtgggaccctggaccctgcacaggagagacagcgtcagggcatcatctgtagaaacgccacgtgggaccctgggctctgtacaggagagacgggcatcaagtcatcatccgtagaaacgccacgtgggaccctggaccctgcacaggagagacggcgtcagggcatcatccgtagaaacaccacgtgggaccctggaccctgcacaggagagacggtgtcagggcatcatctgtagaaacaccatgtgggaccatggaccctgcacaggagagatggcgtcagggcgttatctggacggttggtgacatttgcacacgggccacggaccaggtcacgtattgtgtacacccacccaagtactgaggtgtgacgcggcactgcgtctccagcctacctcctgtagtgcaggaagccagtgcagggtgggtgaggaagtgcacaggggtccagggactgtcccacagcactcctgacgaaagctggtccccttccacggccctagccaaggagccaggtctgcaaagctgggaccaggtgtgtgcggaggcacgtgttcccacttctcccatggcagagggagagcctgtggacaacagtggggcactctgctcccaggcaggtcccactgggctgagccgcacagcctggctttgggcttccctgactgcaccacccacatcagctgcctctagcccttaaaatacaaaacttcccccagtcactggccgccagggctgagttgggggatgtgttacatccctgggtccactggggggcagtgttggccatggtgttggtgctggctctgccgagaggcgttggagtggctgtgtggggcggtgagcgccggcccagcctgatggaacccactgtaccaggcccaggcctcagcctctgagaaggacttccctgtgtcactcactcatacatgtcctcaggacgtgaagacatttcagcagaccaaagtttccttcgaattttcttcgaatcgtccagatacttggagacatctcctcctcacctgtggggtgctggggcagtcctaggcgtgggggcagatgggtggacagctgctgctgccctgctgggggtgggcagcccttggagcacacagtggtgaagacattcctgaatatgtctcaggctgtagaaatcttattttgtggaaagattttagagaatcatcaaaataaacttttaccaaataacattttaccag

SEQ ID NO: 693619 - DNA, 1536 bp, Homo sapiens
  misc_feature (89)..(89): n is a, c, g, or t
  misc_feature (140)..(140): n is a, c, g, or t
  misc_feature (1427)..(1427): n is a, c, g, or t
ctctgccaagcagcatgcctgagctcctggagacgaggcaggcccaggtccttgctgcttgctgctgggaaaggacccagacggagaangggccatgttggggctggaccctcaggtagaggatcaatgtgtccgttatnttgggtatagagagaagtgggtagagctgcatgtgcatctgatcccagctctgtcctgagagggcccacagcccggactcagccacagcagatgccagttccacagttccaggcgctagttccatggttcctgccctgctcacaggagcccgggctctagcatggaggcaggttcggaaggcacaggaagcagctgaaaggggtccccaaggaccagaactaggccaataggcagtgacgttgaagaccacaatccactgactcaaccaggaaatcatgggtccaggctgatagcaatggacagatcggtcaggggaacggggcactcttccacgcgagagtgccagccaaggaacgcgacaggaacggcgcgccgggcgaccacggatgggtgctgaaccagagggattcccatcagacggatgcgaagcagcatctccccacacgtgacttcttatttccaagggaaatgctggctttccagtggagcagcctgtttgaccccagctgacccgagtgatcagagctcccatcgccagtgctgggatgcgcctgtgtcacgcgcctctgggcgggtcgcactgagacggcacagactcgcgctcggggtccctgccaaaaatgcagaacctgagcttatgcatgaggagacctcaggcaagcccaaacagagggacatctgcagatgagcgggtctagatgcttggcgagtgcccaaacatggaagctggggagccactccagttaggagacctgggagaccccatgtagaaatgccaggtgggaccctggaccctgcacaggagagacagcgtcagggcatcatctgtagaaacgccacgtgggaccctgggctctgtacaggagagacgggcatcaagtcatcatccgtagaaacgccacgtgggaccctggaccctcatacatgtcctcaggacgtgaagacatttcagcagaccaaagtttccttcgaattttcttcgaatcgtccagatacttggagacatctcctcctcacctgtggggtgctggggcagtcctaggcgtgggggcagatgggtggacagctgctgctgccctgctgggggtgggcagcccttggagcacacagtggtgaagacattcctgaatatgtctcaggctgtagaaatcttattttgtggaaagattttagagaatcatcaaaataaacttttaccaaataacattttaccagaaactgaatccgagagaagtagaatcgttcactccctgcccccgaggtcactgtgtgcagaatcacgtgantaggacatgggccctgtgatccgtgccctccttcctttgcctgtggggtcaacagcaagaaggcccctcagtgcccctcaagcctggcaccagccgcagggcccggtgt

SEQ ID NO: 693620 - DNA, 195 bp, Homo sapiens
ggattggtttgatgcaggcgcggtgttcaagctgtatcccagctacttgggcggctgaggcaggagaatctcttgaatccaggaggcagagatagtggtgagccgagatcgtgtcattgcactccagctaatttttaaatttgtagtagagatggggttttgccattttggccaggctggtctcaaactcctgac

SEQ ID NO: 693621 - DNA, 1004 bp, Homo sapiens
gatcgacctgctgacaggctgatgggtaacatgtctctctcacgctgtggatgtcggtgggtctgtcggcccgcggccttgcgcccgtatcgtgtatgagggtctagaatatggcacctttgaactatatattaagcacaggaggaaagtaaagtcgcagtcaaaactgtcgcaaggacaatcgtttacccaaagttctattgtaaccatggctggagggcggtcaaagtgaaacattacttgtggctcgtagacatagagtagagaagtcctggagaaccaaggctttcggagagtgattctgtgatgggagatcttataaaacacttgataagtgatcgcccctgggttatgcaaaggggggctggagagctcgaagaaagacaagcgccgtgctcatccatgagctgtgttccttacgagatctgaggggacctgtgtcgggtgccactgcagtatcctcacagtagctgtacaggcgatgacagaatgcgcagtattgttggtcaattaaccagtaacgctggaaaatatgaatcgctcatgtgctatgctacgtgagatagggtgactacatagtcgaggaatggggactaccttttatagagactcacttctgacctagttactgaagtgcacttcctgaggaagtagggcaggaaaggccccccgattttaatgctgatgggagtcccttattctggtccaattgcacataaattggagacccgggatatcgaggctgattagacggcggccatcgaactagtacatctccttaaggtccgtcatcgacgtagtcagactgataagcaaagcccttctattcctcattggcagatggagttgctaccagtgcatgttgacacgtaatgatgcggcggctctgaccacacatgtgcaacaggcaaattacagggacttgagggacacatcgagaaaggtggtgcgccggaagccacaatcagagatggatgaatcacaggccgtccgaaaaagaggaa

SEQ ID NO: 693622 - DNA, 2186 bp, Homo sapiens
  misc_feature (89)..(89): n is a, c, g, or t
  misc_feature (140)..(140): n is a, c, g, or t
  misc_feature (1187)..(1187): n is a, c, g, or t
  misc_feature (1196)..(1196): n is a, c, g, or t
  misc_feature (1215)..(1215): n is a, c, g, or t
  misc_feature (1219)..(1219): n is a, c, g, or t
ctctgccaagcagcatgcctgagctcctggagacgaggcaggcccaggtccttgctgcttgctgctgggaaaggacccagacggagaangggccatgttggggctggaccctcaggtagaggatcaatgtgtccgttatnttgggtatagagagaagtgggtagagctgcatgtgcatctgatcccagctctgtcctgagagggcccacagcccggactcagccacagcagatgccagttccacagttccaggcgctagttccatggttcctgccctgctcacaggagcccgggctctagcatggaggcaggttcggaaggcacaggaagcagctgaaaggggtccccaaggaccagaactaggccaataggcagtgacgttgaagaccacaatccactgactcaaccaggaaatcatgggtccaggctgatagcaatggacagatcggtcaggggaacggggcactcttccacgcgagagtgccagccaaggaacgcgacaggaacggcgcgccgggcgaccacggatgggtgctgaaccagagggattcccatcagacggatgcgaagcagcatctccccacacgtgacttcttatttccaagggaaatgctggctttccagtggagcagcctgtttgaccccagctgacccgagtgatcagagctcccatcgccagtgctgggatgcgcctgtgtcacgcgcctctgggcgggtcgcactgagacggcacagactcgcgctcggggtccctgccaaaaatgcagaacctgagcttatgcatgaggagacctcaggcaagcccaaacagagggacatctgcagatgagcgggtctagatgcttggcgagtgcccaaacatggaagctggggagccactccagttaggagacctgggagaccccatgtagaaatgccaggtgggaccctggaccctgcacaggagagacagcgtcagggcatcatctgtagaaacgccacgtgggaccctgggctctgtacaggagagacgggcatcaagtcatcatccgtagaaacgccacgtgggaccctggaccctgcacaggagagacggcgtcagggcatcatccgtagaaacaccacgtgggaccctggaccctgcacaggagagacggtgtcagggcatcatctgtagaaacaccatgtgggaccatggaccctgcacnggagagacngtgtagaaatgccacgtgngacnctggaccctgcacaggagagatggcgtcagggcgttatctggacggttggtgacatttgcacacgggccacggaccaggtcacgtattgtgtacacccacccaagtactgaggtgtgacgcggcactgcgtctccagcctacctcctgtagtgcaggaagccagtgcagggtgggtgaggaagtgcacaggggtccagggactgtcccacagcactcctgacgaaagctggtccccttccacggccctagccaaggagccaggtctgcaaagctgggaccaggtgtgtgcggaggcacgtgttcccacttctcccatggcagagggagagcctgtggacaacagtggggcactctgctcccaggcaggtcccactgggctgagccgcacagcctggctttgggcttccctgactgcaccacccacatcagctgcctctagcccttaaaatacaaaacttcccccagtcactggccgccagggctgagttgggggatgtgttacatccctgggtccactggggggcagtgttggccatggtgttggtgctggctctgccgagaggcgttggagtggctgtgtggggcggtgagcgccggcccagcctgatggaacccactgtaccaggcccaggcctcagcctctgagaaggacttccctgtgtcactcactcatacatgtcctcaggacgtgaagacatttcagcagaccaaagtttccttcgaattttcttcgaatcgtccagatacttggagacatctcctcctcacctgtggggtgctggggcagtcctaggcgtgggggcagatgggtggacagctgctgctgccctgctgggggtgggcagcccttggagcacacagtggtgaagacattcctgaatatgtctcaggctgtagaaatcttattttgtggaaagattttagagaatcatcaaaataaacttttaccaaataacattttaccag

SEQ ID NO: 693623 - DNA, 2366 bp, Homo sapiens
  misc_feature (89)..(89): n is a, c, g, or t
  misc_feature (140)..(140): n is a, c, g, or t
  misc_feature (1187)..(1187): n is a, c, g, or t
  misc_feature (1196)..(1196): n is a, c, g, or t
  misc_feature (1215)..(1215): n is a, c, g, or t
  misc_feature (1219)..(1219): n is a, c, g, or t
  misc_feature (2257)..(2257): n is a, c, g, or t
ctctgccaagcagcatgcctgagctcctggagacgaggcaggcccaggtccttgctgcttgctgctgggaaaggacccagacggagaangggccatgttggggctggaccctcaggtagaggatcaatgtgtccgttatnttgggtatagagagaagtgggtagagctgcatgtgcatctgatcccagctctgtcctgagagggcccacagcccggactcagccacagcagatgccagttccacagttccaggcgctagttccatggttcctgccctgctcacaggagcccgggctctagcatggaggcaggttcggaaggcacaggaagcagctgaaaggggtccccaaggaccagaactaggccaataggcagtgacgttgaagaccacaatccactgactcaaccaggaaatcatgggtccaggctgatagcaatggacagatcggtcaggggaacggggcactcttccacgcgagagtgccagccaaggaacgcgacaggaacggcgcgccgggcgaccacggatgggtgctgaaccagagggattcccatcagacggatgcgaagcagcatctccccacacgtgacttcttatttccaagggaaatgctggctttccagtggagcagcctgtttgaccccagctgacccgagtgatcagagctcccatcgccagtgctgggatgcgcctgtgtcacgcgcctctgggcgggtcgcactgagacggcacagactcgcgctcggggtccctgccaaaaatgcagaacctgagcttatgcatgaggagacctcaggcaagcccaaacagagggacatctgcagatgagcgggtctagatgcttggcgagtgcccaaacatggaagctggggagccactccagttaggagacctgggagaccccatgtagaaatgccaggtgggaccctggaccctgcacaggagagacagcgtcagggcatcatctgtagaaacgccacgtgggaccctgggctctgtacaggagagacgggcatcaagtcatcatccgtagaaacgccacgtgggaccctggaccctgcacaggagagacggcgtcagggcatcatccgtagaaacaccacgtgggaccctggaccctgcacaggagagacggtgtcagggcatcatctgtagaaacaccatgtgggaccatggaccctgcacnggagagacngtgtagaaatgccacgtgngacnctggaccctgcacaggagagatggcgtcagggcgttatctggacggttggtgacatttgcacacgggccacggaccaggtcacgtattgtgtacacccacccaagtactgaggtgtgacgcggcactgcgtctccagcctacctcctgtagtgcaggaagccagtgcagggtgggtgaggaagtgcacaggggtccagggactgtcccacagcactcctgacgaaagctggtccccttccacggccctagccaaggagccaggtctgcaaagctgggaccaggtgtgtgcggaggcacgtgttcccacttctcccatggcagagggagagcctgtggacaacagtggggcactctgctcccaggcaggtcccactgggctgagccgcacagcctggctttgggcttccctgactgcaccacccacatcagctgcctctagcccttaaaatacaaaacttcccccagtcactggccgccagggctgagttgggggatgtgttacatccctgggtccactggggggcagtgttggccatggtgttggtgctggctctgccgagaggcgttggagtggctgtgtggggcggtgagcgccggcccagcctgatggaacccactgtaccaggcccaggcctcagcctctgagaaggacttccctgtgtcactcactcatacatgtcctcaggacgtgaagacatttcagcagaccaaagtttccttcgaattttcttcgaatcgtccagatacttggagacatctcctcctcacctgtggggtgctggggcagtcctaggcgtgggggcagatgggtggacagctgctgctgccctgctgggggtgggcagcccttggagcacacagtggtgaagacattcctgaatatgtctcaggctgtagaaatcttattttgtggaaagattttagagaatcatcaaaataaacttttaccaaataacattttaccagaaactgaatccgagagaagtagaatcgttcactccctgcccccgaggtcactgtgtgcagaatcacgtgantaggacatgggccctgtgatccgtgccctccttcctttgcctgtggggtcaacagcaagaaggcccctcagtgcccctcaagcctggcaccagccgcagggcccggtgt

SEQ ID NO: 693624 - DNA, 320 bp, Homo sapiens
atatcctacgtagtgtaccatgctggtcgtcagacataaagtctcccatgcacacatctttgttttgtaagtatgtttgtttgtttgtatgtttgagacagagtaatcactctatgtcacccaggctggagtgcaatggcacgatcttggctcactgcaacctccatctcccgggttcaaggaattctcctgcttcagcctcccaagtagctaggattacaggtgcctgccaccatgcccggctatttatattttctttcttttctttctttttttttttaatgggtgtaaatttaaaaaagtgcactttgggggtcccg

SEQ ID NO: 693625 - DNA, 355 bp, Homo sapiens
agattggttgtagggaatttcatcgccatccccgccttcagcgccgagatagggagcactcccggctctaccttgcatggtctctgcccagcgactgcacctctgcctcacgggagcagacttgatagaggacggctgccagccgtatcgctgcatgctgtcctcgacacaagtcaaggccgctggagcactgcttactgtacggggggagcgcctgtcacgtgtcactgtccagccctgcactcgtgtgtcctctcactaaaggacgtagcagagtgcttttacagaaaaagtgagtactttcccacctcgggagagcctaccaatgggcattactcctcaggaagccacgggg

SEQ ID NO: 693626 - DNA, 177 bp, Homo sapiens
  misc_feature (137)..(137): n is a, c, g, or t
atgtgtcatacaaggattataatacaatcatgtcatcatggtaatggagtatacaagcatgatgattattccaatcattattcttcaattcattttccaattgttttgattttacatggtggcaatgtaaggtcatnggtggaagggatttatatggtcaattcatgttataaacca

SEQ ID NO: 693627 - DNA, 473 bp, Homo sapiens
gcgacatggcaactccttaaacgtgcattattagataataatagattatgataacgtgtttttaaaaagactcaaaactgggccgggtgccgtggctcatgcctgtaatcccaacactttgggaggccgaggtggctggatcacaaggtcaggagttcaagaccagactgggcaacatagtgaaaacccatccccactaaaaatgcaaaaattagctgggcatggtggcacacgcctgtgtgtcccagccactcaggcggctgaggcaggagaactgcttgaacccaggaggcagaggtttcagtgagacaagatcgtgccactgaaccccagcctaggcaacagagtgacactctgtcttaaaagacaaaagagaaactacactgttggtggtttggacaaatcctgcccctgcaccccaactgcatgtaccctccatgacttcctgttgtgtaccaggctccctgaggtgg

SEQ ID NO: 693628 - DNA, 451 bp, Homo sapiens
  misc_feature (45)..(45): n is a, c, g, or t
attcattaagtggtggttataactagggctcatgggaagactagnctaagtgaaattaatagccaatacattttaaattaatacattgaccattttaatgactttaaccatttctatttcagtggaatcagattgaaatgtcaaatagtgaaactatttttaatgtgttaagcctgtggtttagttttaagttaatgtcatctcagggctaaagtttgtccaattgagattcccattaattttatataaacctggaacggctctcaggagctgaaagtaagtggaaagtttccagaacactttaccatcagaatgccacactagcctggtaaaactctctttctgacagccttatagcaccatctagtgtgctattcttagatagcaagacaaaggactttcagctcctttttgttttctccatattaaaaagaaaactgttattctaaaa

SEQ ID NO: 693629 - DNA, 570 bp, Homo sapiens
  misc_feature (237)..(237): n is a, c, g, or t
  misc_feature (407)..(407): n is a, c, g, or t
gtgaaacggcctggcctccgggcattggcggtttccctgatcctctctcccaaattttccggcaggtgattgatctgatggcgacatttagtgactgggagtgggcgagggagtggcggttctcgtcccaaggttactaggtgatggacgttcagagccaaggcgtatgccaagatctgctgccgccctgatatgcttgatggaggcgcacgggattcgaactcaagtgctgtgccntcaattcctagagcccgtagtcgaggctcgttgatgagaaaacccgtatcattgacctcacatcgttatgggttatgtccgagtagaccaggtgacgcagggatgagttcgagatagctgcaaatcgccaacgacgtcgtgccgttattgcgaaataaatactatctttntcgagccacgcgatgaggtcgacactgttgggacactctagcaccatgggactccctactccagatgaggtagacgctaggagttttccctcacgctcgagttccgtgtctacccaagctgcaagatccgagctttcacggggtgtgcttttctccagatcgc

SEQ ID NO: 693630 - DNA, 829 bp, Homo sapiens
ggttagtgccatggaggcatcactagcttgaaggaggcgctatgagattctgcattgcgcaggcgagaagggatggttgcccgtcgttgaatgaagatgatgagcttgtgggcattattgcccggacagagcttgatgaagaatcgggactacccattagcctcctatgatgtgcaaggaacacagtcgtgctggtgatgccggcgcacgccagttggacagctcactgacgggagtgactaagttatagggctggacgttggctcgtgcccagggcgtgggtggtggaatgtggatgggtttctgtggagccatcgtatcccagcggaaaattccactcattcgcagtactcacaatagtggactcaagatagctgtccatcaggacgaaaatagccctatgtactccaagttcattgggagggcaactgtagagtaccaactgactgctcccagggcgcaaagaaactcttcatttgataggcaaggtgtggtgaatagctcctgcgagaggtgaggcagtggagaagggattgggcttcgcattctcgtcgttgactgcaagtgatatgtggcatggagcgctgtgaggtcggtccgcacaacgtcatagcgagcaaggtgtaccagagggtgtccacgaggtattgcaccgggtggctctatggtcgttccagagtctaatatgcgtggacttggatggaagtccgaaaaatgtgggatcatatttgcgaacagcacttggagcctgggggccatcccaccagtcgatgatgggctctctcgctgggctggacacacaattgagggcctcctggtgaaatacttc

SEQ ID NO: 693631 - DNA, 363 bp, Homo sapiens
tgcaggaattcggcacgagggattgtcatgtgtgtttgaacaatatgaaatcagtatacccggactgactgcctgcggggtcgggcagaatagagccatatttttcttcttgcagaaagcctatagaaggatgtgcaagtaggagaaatattgctgaattcttttcccagcatggaagaaccctggggaaggaatgcattcctgggggtaggtctatagatggccgctctgggagtgtttgtcttatgcggttgagataaggattgaaatacgccctggtgtcctgcagtaccctcaggcttactaggattgggaaattccagccgggtattctagtcaggtggttctctgttctcccctgtt

SEQ ID NO: 693632 - DNA, 429 bp, Homo sapiens
  misc_feature (83)..(83): n is a, c, g, or t
  misc_feature (111)..(111): n is a, c, g, or t
  misc_feature (151)..(151): n is a, c, g, or t
  misc_feature (163)..(163): n is a, c, g, or t
  misc_feature (206)..(206): n is a, c, g, or t
  misc_feature (228)..(228): n is a, c, g, or t
  misc_feature (251)..(251): n is a, c, g, or t
acaaaatggggcgggtgggggaggggccctatttttaaaataaaataactgttccaaaagttgggggttttttaaaaaaattnaagaaaaaggaaagcctaatcctgtaantgccacccttttccacaatttaaatacattttccttacantttccctgtgantttccgaaactaaaccattgtgtgtccctgtaagtgtccctgngtttgactgcccgctcagcagncttccctcggggggatttggaanacctgtgtctgtcgccgcactgcctgtgggaggcgcccagagggctgctgggactggcgtctgtacacacttgtttggccttttctgtagttgatgctgtaaactctatggctttttaaaaacgatttcatgtttttatttagtattggaaatccaatacacttttttaatccaatca

SEQ ID NO: 693633 - DNA, 222 bp, Homo sapiens
cagtcagttgaactcacattctggtgggcttgttgtgtccggcttctctcacttaggcaccatgtagagggggttacacacacactgcaacatggatcagtgcttccttcctttttatggctgaatcatgttctatgtatggaaggaacacatttggtgcgttaattcatctgctgacaggcattggggttcttcccaccttgtggccactgacaacggcct

SEQ ID NO: 693634 - DNA, 139 bp, Homo sapiens
ctataagctcgcgcttcttgaggtttttatggagtctcagatgtttgctggcttcatccaagacaggtagctaagaaagtgtcgggcaaagggcctttttgagcagcgagtggagcagtacttagaaggtccaggtatg

SEQ ID NO: 693635 - DNA, 394 bp, Homo sapiens
  misc_feature (391)..(391): n is a, c, g, or t
  misc_feature (393)..(393): n is a, c, g, or t
cagtaagaaggcaatcaatccaattagaaagtgggcaaaaggcatgaagagatattttacccaaagaggatatacggatggcaaataggcacatgaagagatgttctacatcaatagctgttaaggaaatgcaagctcagcatgggtgcacgcctgtaatcccagtggtttgggacccaaggcacaagaattgcttcaggcaggaagttcaagatcagcctgcgcaacatagtgagaccccatctctatgggcatggtggtgcgtacctatagtcctagctacttgggaggctgagatgggaggactgctgagcccaggagtccaaggctgcagtgagctataatcatgccactgcactccagcctggacaacagagcaaaaccctgaaantna

SEQ ID NO: 693636 - DNA, 614 bp, Homo sapiens
ttgcttccgagggtttctggcccctcattagttgcgttgtgcgtgcgcccctgtcttccctggctagctagggctttccaacgtgtgtctatgcgtgtcagttacccctttggtgtttctcagcgtgcgtctcctagggttttctccgcagtcctgttggctttgccgtgttatgctatgcccgggtgcttagctagcttcctagctgctctaaatcttgtctccgactctactttcgtcctcccggtaagagcttctatagtagcctaaagatacctgctgcaagtcactgccgttcacatagtgcagcaacccgagcccatggagtattgcctcttctaggcagctgctcaagccatgtccttcatcctgtttctggagagtagtctagaccaagccgattgcagaaccacattctcgtggttcccaggagagccccattcccagccgctggtactctccgtgccgcagttctatattctgcttcaaatcagccttacaggtgtcaccacagcatggcccactgctagacaccgagtacaccaaagtggttcccgaatctaaatcatgccatgacagaggccattacccccatggctaatatttgttatttt

SEQ ID NO: 693637 - DNA, 567 bp, Homo sapiens
tgggggtctcttccttgacctggtaacttgcactcttccacccactggtggaggactaagtgtcttgaacttccagaacgacagccaggccccatactgggccttggggagaagtggggaggcctaagcagtggtggggggccacagcaaggcatggcacacagtggtttttatttctttcagggatttataaaggcattgagcacagtgtaatttctagccaagtgaaatgaatccaaggaaatatatcaggacctgagggctgtttttttaacgttatgggaaaggatgatgagctgagagcacgtgtacagccacgcttgtgcgcagcgcccactctgtgcaataaacatgttctgcccatgttcctcagtcaggaggttcaggctcctggagagcacctgagggttccatcactttggtgcccaacaagcatatgccccccaagctgcatcttctcggagagctgcggcaggaagtctctcgtgaggaagagggtcaggaaccaggacagcgagatgctggagatcacccccaggtcctgcatcttctcggagagctgcgtca

SEQ ID NO: 693638 - DNA, 104 bp, Homo sapiens
ctggtggtgcgttgttttgacacgacgacgatgtagtctgtaggtggattctggactggtttgtgggtctgtgcctgagtctgggctggggcaggtgggctacg

SEQ ID NO: 693639 - DNA, 347 bp, Homo sapiens
ttttgtatttttagtagagacggggtttcacatgtattggcgaggctggtctcgagctcaacctcagatgatccatccacctcgggctcccaaagtgctgggattataggcataagacccagcacctggccaatagattagttttttaatgactccctcaactttgtcaggtctgtgtatttgagagcatgtatttatattggggccctaactgtatttttacatttacctattttatttatctcaggtcttgctttttacattagagacggacgctttactagtactctagttggaggggtcatctctttatcaggaaagcgcccgccaaagggtaccgaagctcg

SEQ ID NO: 693640 - DNA, 390 bp, Homo sapiens
  misc_feature (117)..(117): n is a, c, g, or t
  misc_feature (178)..(178): n is a, c, g, or t
gagatacgtccttatcgtctgtgtccaatcaccgattgagagagatgcaccatgcagtcaccatgttgattcgcgtaaaaaccagcgacgatcagacgagttgccaccatttactgnagaaaaaggatgctgaacacgcaagtcggtgcaaattattgcaattgctgtgttccaccgnccttaaagtagtcagttttcttctcttctttgacattctaagaacttatagataacttaaaacttttgtgaggaagattaatgtgggccataaaacctttaaatgttaagtgtcaagaaactgcactctcccttcttaaggactgcctaaagtgtaaaatacatttgaatgccattttgtggaagaattttttaaatgttccgttccattat

SEQ ID NO: 693641 - DNA, 212 bp, Homo sapiens
gtgaagatcctggtgtcggccatgggccggccgccccggcctgttgttacggtattgtaaggacaaggcggaaccaaaggcttggttcttccgagagtgttccttatgccaagattcggatattttgacctctgggccgaaaaagggcaaaagtgtgatatagagtttcgctttgtgtggcacatatgtgtgtagatagtgatatatagcag

SEQ ID NO: 693642 - DNA, 985 bp, Homo sapiens
ggttaagggtcactgctagatggcggcgcccaagaggctgctgagtgcgcggaacggaggatggtgctgttggcgttggtggctggggctcggctggggcggcggctgagcggtccggggctggggcgaaggggcactgtgactggcgggcgggcgctcccggagccggcgcgaagcgggagaatcctgatggccggacgtgcccctgtggtccagtacgtgagcgtagccgcgctgaccgcgccgatcgctgtcttcgtgtggggcttaaagtcttctcgggggacgctggcgtgcctacctttgtggtgcccagactccgggcccgggcccccgggacgatgcccgacgcgccggaagaatccaagcccgtgccctatcgcctgagctggacccacaagatttcatctgctgattgcaggtatggattacacactgctgtactctaatgactgctggataattacgaaaaatgtctgggagatgggactcaacaaagattctcagctagggattacacaggagccgaaagataaaacggaggggctacgaagtatgtgtgaagcctcacccgtctccctggctctgcacagaaccctcaggagaaacggttgcgttgcaggtctcatgggccgaggtcactctctaggtgtagacttgacaggaaaggagtctatcagtcaatgggaaacaattcttatgcgcaatgttgaacgaaaggttgttccaaaatttaaatttaacttgaaagtacacatagtccaacagatgcaagcattccatgtcccagttggaccagtcactatggacaggaacagacatcggtccccgaagaataacggaaaaacctaaacctgtgcaaggctgtctaatgcgaacaggatgaactacatataacaagacccaccacatgagagacgagaaagaatataaagtgacccagtatgcagcagcaccgagagatagatgaccgaaacacgcccca

SEQ ID NO: 693643 - DNA, 585 bp, Homo sapiens
caaggtgggaataatagaaactaacctatcatgcttaactctttgctgtactgcagagggaagcggaacctttcagggtgtccacttctcatctaaatggtttttgccacagacagtgacttcttcaccccagcagtgtctcatggcgtggcttagaaggtagatgaacttaccttggttggtgtttcaacttttccttttcttttctttttgagacagagtctcactctgtcacccaggctggagtgcagtggcgcaatttcggctcatagcaacctctgcttcctgggttcaagcaattctcgtgcctcagcctcccaagtagctgggattacaggcatgcaccaccacacccagctaatttggtataattagtagagatggtttcaccacgtcggtcaggctggtctcaaacccctgacctcgggtgatctgtccaccttggcctcccaaagtgctgggattaccagcatgagccaccacgccagccttggttatagctttaaatgtataaatcctttatcgacatagggatgcctgtggtctaaagagtcaggggatccaaagccttcgtgaatacagtgg

SEQ ID NO: 693644 - DNA, 2669 bp, Homo sapiens
ctgctggtaagtggtctattcctgcccacccccgggtgactagcttggccagtagtcgaccccacccggggaccgactctgggggttggagagactcttggggccggggtcgggcactccagctttcttctagccccgagctgggattccctggcctgcgccagctgcgtacacggcgagtacaccgcacctgcccgggacttcacccgcagctgcgagactcctccattcccggagggctccccacacctgctgcggccgtgccccatctccccgcagctgcggcgctgagcacccccatgtcgagaggctgagaccaggacagcagccctgaccaacgctccaataggccgggatccagccatacttcaatggatcccaggggtatcttgaaggcatttcccaagcggcagaaaattcatgctgatgcatcatcaaaagtacttgcaaagattcctaggagggaagagggagaagaagcagaagagtggctgagctcccttcgggcccatgttgtgcgcactggcattggacgagcccgggcagaactctttgagaagcagattgttcagcatggcggccagctatgccctgcccagggcccaggtgtcactcacattgtggtggatgaaggcatggactatgagcgagccctccgccttctcagactaccccagctgcccccgggtgctcagctggtgaagtcagcctggctgagcttgtgccttcaggagaggaggctggtggatgtagctggattcagcatcttcatccccagtaggtacttggaccatccacagcccagcaaggcagagcaggatgcttctattcctcctggcacccatgaggccctgcttcagacagccctttctcctcctcctcctcccaccaggcctgtgtctcctccccaaaaggcaaaagaggcaccaaacacccaagcccagcccatctctgatgatgaagccagtgatggggaagaaacccaggttagtgcagctgatctggaagccctcatcagtggccactaccccacctcccttgagggagattgtgagcctagcccagcccctgctgtcctggataagtgggtctgtgcacagccctcaagccagaaggcgaccaatcacaacctccatatcacagagaagctggaagttctggccaaagcctacagtgttcagggagacaagtggagggccctgggctatgccaaggccatcaatgccctcaagagcttccataagcctgtcacctcgtaccaggaggcctgcagtatccctgggattgggaagcggatggctgagaaaatcatagagatcctggagagcgggcatttgcggaagctggaccatatcagtgagagcgtgcctgtcttggagctcttctccaacatctggggagctgggaccaagactgcccagatgtggtaccaacagggcttccgaagtctggaagacatccgcagccaggcctccctgacaacccagcaggccatcggcctgaagcattacagtgacttcctggaacgtatgcccagggaggaggctacagagattgagcagacagtccagaaagcagcccaggcctttaactctgggctgctgtgtgtggcatgtggttcataccgacggggaaaggcgacctgtggtgatgtcgacgtgctcatcactcacccagatggccggtcccaccggggtatcttcagccgcctccttgacagtcttcggcaggaagggttcctcacagatgacttggtgagccaagaggagaatggtcagcaacagaagtacttgggggtgtgccggctcccagggccagggcggcggcaccggcgcctggacatcatcgtggtgccctatagcgagtttgcctgtgccctgctctacttcaccggctctgcacacttcaaccgctccatgcgagccctggccaaaaccaagggcatgagtctgtcagaacatgccctcagcactgctgtggtccggaacacccatggctgcaaggtggggcctggccgagtgctgcccactcccactgagaaggatgtcttcaggctcttaggcctcccctaccgagaacctgctgagcgggactggtgacccatggctgggggtgctgaggagagccgagttggactggctacccctcctggccacccagtactccctccagcctcagctggctgaacctcgccgctccaaccaccagcttcctcagcgagcagggcccagggctctgggcctgaagcaagagccagcccggctcccagtgtctgcccggctcccagtgtctgcccagccctctcccagacaggagcaggctgccaccccttctacctcaccactgcccctcgaagaattttgcaaatggccccttgccccattttaagcaggagcaggtggctggtttgaagccccaggtatcccccttccctgctatgggaaaggccaagctgctgggtggggacagaagctgcaggggagagggaagcagccgtgctgtcaacatcatccggcaccctctggggtaggagaacagccattccacatgtgttccctctatccgtcctgcttcctgggcagctggtggtgctgggaatggggtgccccagccttggtgaggacagtgttgggaggcccaggggcccagtaaagtgcatttgacattga

SEQ ID NO: 693645 - DNA, 254 bp, Homo sapiens
tgacgtgcaggttgtgggctgactggctgggactcgttggtgctgtgactacctgtgggccgctggggacacgacggctgctggggctggcgttgtgacgctgaacgttgctgctacgggctgacgcacgacctgggaccttgacggctgacggcacgacctggtgacccgaacgctgtgggttgaaccctgacgtgcctggactgggtggttgtcacgctggtggctgacggctggacgctgaccgaccgacg

SEQ ID NO: 693646 - DNA, 566 bp, Homo sapiens
acataaggcagtgtctaaagacatttacggttgagacaactgtgggtgaaggggtgctactggcatctagtgggtagaggctagggatactgctataataaatacctataaagaacaggataggctggacatggtggctcacgccagtgatcccaaaactttgggaggccgaggccagcggatcacctgaggtcgggagttcgagatcagcctgaccaacatggagaaacctggtctctactaacaatgcaaaaattagccaggcatggtggcacacgcctgtaatcctagctacttgggattctgaggtgggagaattatataaacctgggaggtggaggttgcattgagccgaaatcgcaccactgcactccagcctgggcaacacagtgagattccatctcaaaaaaaagaaaaaaaaagttccagaaaggagattaaattactatctggctggggcatacatagggttaattaagcaagacttactgaagttagggagcttgattattaaaaaggagtgaccagtgcaacagaagagggagcccattccatagcagcttaca

SEQ ID NO: 693647 - DNA, 2319 bp, Homo sapiens
aaaattctggccatttgccctccttccccccttcgtccgctctcattggctctgctgccttcatgtgcttcagccctacgttgtttatgtccagaatcagatattggagctgactctgcctgtccagggcctgcagagtggctgagctcccttcgggcccatgttgtgcgcactggcattggacgagcccgggcagaactctttgagaagcagattgttcagcatggcggccagctatgccctgcccagggcccaggtgtcactcacattgtggtggatgaaggcatggactatgagcgagccctccgccttctcagactaccccagctgcccccgggtgctcagctggtgaagtcagcctggctgagcttgtgccttcaggagaggaggctggtggatgtagctggattcagcatcttcatccccagtaggtacttggaccatccacagcccagcaaggcagagcaggatgcttctattcctcctggcacccatgaggccctgcttcagacagccctttctcctcctcctcctcccaccaggcctgtgtctcctccccaaaaggcaaaagaggcaccaaacacccaagcccagcccatctctgatgatgaagccagtgatggggaagaaacccaggttagtgcagctgatctggaagccctcatcagtggccactaccccacctcccttgagggagattgtgagcctagcccagcccctgctgtcctggataagtgggtctgtgcacagccctcaagccagaaggcgaccaatcacaacctccatatcacagagaagctggaagttctggccaaagcctacagtgttcagggagacaagtggagggccctgggctatgccaaggccatcaatgccctcaagagcttccataagcctgtcacctcgtaccaggaggcctgcagtatccctgggattgggaagcggatggctgagaaaatcatagagatcctggagagcgggcatttgcggaagctggaccatatcagtgagagcgtgcctgtcttggagctcttctccaacatctggggagctgggaccaagactgcccagatgtggtaccaacagggcttccgaagtctggaagacatccgcagccaggcctccctgacaacccagcaggccatcggcctgaagcattacagtgacttcctggaacgtatgcccagggaggaggctacagagattgagcagacagtccagaaagcagcccaggcctttaactctgggctgctgtgtgtggcatgtggttcataccgacggggaaaggcgacctgtggtgatgtcgacgtgctcatcactcacccagatggccggtcccaccggggtatcttcagccgcctccttgacagtcttcggcaggaagggttcctcacagatgacttggtgagccaagaggagaatggtcagcaacagaagtacttgggggtgtgccggctcccagggccagggcggcggcaccggcgcctggacatcatcgtggtgccctatagcgagtttgcctgtgccctgctctacttcaccggctctgcacacttcaaccgctccatgcgagccctggccaaaaccaagggcatgagtctgtcagaacatgccctcagcactgctgtggtccggaacacccatggctgcaaggtggggcctggccgagtgctgcccactcccactgagaaggatgtcttcaggctcttaggcctcccctaccgagaacctgctgagcgggactggtgacccatggctgggggtgctgaggagagccgagttggactggctacccctcctggccacccagtactccctccagcctcagctggctgaacctcgccgctccaaccaccagcttcctcagcgagcagggcccagggctctgggcctgaagcaagagccagcccggctcccagtgtctgcccggctcccagtgtctgcccagccctctcccagacaggagcaggctgccaccccttctacctcaccactgcccctcgaagaattttgcaaatggccccttgccccattttaagcaggagcaggtggctggtttgaagccccaggtatcccccttccctgctatgggaaaggccaagctgctgggtggggacagaagctgcaggggagagggaagcagccgtgctgtcaacatcatccggcaccctctggggtaggagaacagccattccacatgtgttccctctatccgtcctgcttcctgggcagctggtggtgctgggaatggggtgccccagccttggtgaggacagtgttgggaggcccaggggcccagtaaagtgcatttgacattga

SEQ ID NO: 693648 - DNA, 2370 bp, Homo sapiens
ctgctggtaagtggtctattcctgcccacccccgggtgactagcttggccagtagtcgaccccacccggggaccgactctgggggttggagagactcttggggccggggtcgggcactccagctttcttctagccccgagctgggattccctggcctgcgccagctgcgtacacggcgagtacaccgcacctgcccgggacttcacccgcagctgcgagactcctccattcccggagggctccccacacctgctgcggccgtgccccatctccccgcagctgcggcgctgagcacccccatgtcgagaggctgagaccaggacaggtgcagggcgttcccactcacccccgaaagtcctcctccttcctctgcgagtctgtgttggaggtagagaaatagtatgtggggtttatgtgcaggtcctccccaggctccgctccatcccctaaagctccatttcctagcccagcatcccatttggtaaagcccttcgaagtgggccgcagcagggctgtgctgaatctttagcgcaacccctctgaggaatggtgtcgtttcctactcctcaaaagtacccccgatggcaccagccttcccctcatttcccgtaatactccaacttcgaaaggctggggagtgtgaagctaggctaaaccactgaagtttaaccgggtttgaagagaccccctcccccgacccgcttccccaaactgggctgctacccccaaagcctggtcaggaaagaccctacctccataggcaaaggggttggagggcctcaattctggatttccacgtgcagcagccctgaccaacgctccaataggccgggatccagccatacttcaatggatcccaggggtatcttgaaggcatttcccaagcggcagaaaattcatgctgatgcatcatcaaaagtacttgcaaagattcctaggagggaagagggagaagaagcagaagaggcctgcagtatccctgggattgggaagcggatggctgagaaaatcatagagatcctggagagcgggcatttgcggaagctggaccatatcagtgagagcgtgcctgtcttggagctcttctccaacatctggggagctgggaccaagactgcccagatgtggtaccaacagggcttccgaagtctggaagacatccgcagccaggcctccctgacaacccagcaggccatcggcctgaagcattacagtgacttcctggaacgtatgcccagggaggaggctacagagattgagcagacagtccagaaagcagcccaggcctttaactctgggctgctgtgtgtggcatgtggttcataccgacggggaaaggcgacctgtggtgatgtcgacgtgctcatcactcacccagatggccggtcccaccggggtatcttcagccgcctccttgacagtcttcggcaggaagggttcctcacagatgacttggtgagccaagaggagaatggtcagcaacagaagtacttgggggtgtgccggctcccagggccagggcggcggcaccggcgcctggacatcatcgtggtgccctatagcgagtttgcctgtgccctgctctacttcaccggctctgcacacttcaaccgctccatgcgagccctggccaaaaccaagggcatgagtctgtcagaacatgccctcagcactgctgtggtccggaacacccatggctgcaaggtggggcctggccgagtgctgcccactcccactgagaaggatgtcttcaggctcttaggcctcccctaccgagaacctgctgagcgggactggtgacccatggctgggggtgctgaggagagccgagttggactggctacccctcctggccacccagtactccctccagcctcagctggctgaacctcgccgctccaaccaccagcttcctcagcgagcagggcccagggctctgggcctgaagcaagagccagcccggctcccagtgtctgcccggctcccagtgtctgcccagccctctcccagacaggagcaggctgccaccccttctacctcaccactgcccctcgaagaattttgcaaatggccccttgccccattttaagcaggagcaggtggctggtttgaagccccaggtatcccccttccctgctatgggaaaggccaagctgctgggtggggacagaagctgcaggggagagggaagcagccgtgctgtcaacatcatccggcaccctctggggtaggagaacagccattccacatgtgttccctctatccgtcctgcttcctgggcagctggtggtgctgggaatggggtgccccagccttggtgaggacagtgttgggaggcccaggggcccagtaaagtgcatttgacattga

SEQ ID NO: 693649 - DNA, 605 bp, Homo sapiens
  misc_feature (434)..(434): n is a, c, g, or t
taacaccactagcctaataatacccccacatattttctacccacattagagcaatattttctccccccaaattatgtttgcgcccacatctctagaaaatctctttgttattattgaatctcccctccctgtccctctttaataccacctgtgtctcatcatagatcctcaccgccacgacactgtgctaagaacaactattttgagacaacaagcaaaaggagcctccggtgttccaaaagctcttgtgtgtataaagagctctctctccccccctctctttgtcgcgattctgtgtgttaaagaaagcctcgtttttcgcccacactctctctcacagggggcgacgagagagagaattttgtgcccactactctctgtgagcagccatcggtttatctctctcgggaacagtgcgaacactcgcgccacanggttattctcacctagtgtaataggagtggagaaccctgtttcgcccacaaaaaggcgtatcttttgtcgcgccaaattcaccacctcctaacattctcgcaatattattttcatcgagccctgtaaacactaaaaagttaaaatatcggtccttcaaccaacagacaaaa

SEQ ID NO: 693650 - DNA, 917 bp, Homo sapiens
  misc_feature (905)..(905): n is a, c, g, or t
  misc_feature (907)..(907): n is a, c, g, or t
  misc_feature (909)..(909): n is a, c, g, or t
  misc_feature (911)..(912): n is a, c, g, or t
aggccctgtccaaacgggcactaattggccccgggtatttaggcgccccctttttttttttgcagtaagtaactcagaatgactttactcaggaaatatgaccatgactcactggctaggagtgccccatgcccagttcttagagacccttgatagctcctagaagacaggaggctgccgtggtcaagaagggccaagccttgaagtctcacggcaccccctgtggtggaggtataaggctcaggggccaactactgggtcttgcagtccccatcgttgctgtgggctgtcttcaccttctttagttccttctgtagctcagactcggccaccacaacctcctttggcttctggtaagagatgatcagggtgcagttggcgtgggcaaagctcagcaaggcgtcatccagaggtagctggtgtctatctagatcaggaatggagaacttcttgtagtacttcttgttggttgttctgacaatgatgcagcgctccttctggtccacagagacactatagacatccttaggataggggaggtttcgaatccgccactggaaactcatcttggtgtccttgcgcatgaagataggattggcattgctttccttgatgagttcaggccccaggttccctgctcctaggggcgctgggtctcctacttcaagctgccactggcccatggctcccagggcacttttcacacgccactttctcacaagtagttcactcgtcttctcgtcatattcttcagccatttccttgccgtctgggaataaatagtgaaccttccttctcccgtcctgcagcagcgcagtcttctgggctgtccgcagactctccaaccagcccgtcaccgccatctttcccctgctaagcagcacgcccagccgctgccatggcancngngnnccgct

SEQ ID NO: 693651 - DNA, 419 bp, Homo sapiens
  misc_feature (20)..(20): n is a, c, g, or t
  misc_feature (67)..(67): n is a, c, g, or t
  misc_feature (96)..(96): n is a, c, g, or t
  misc_feature (101)..(101): n is a, c, g, or t
  misc_feature (111)..(111): n is a, c, g, or t
  misc_feature (118)..(118): n is a, c, g, or t
  misc_feature (131)..(132): n is a, c, g, or t
  misc_feature (138)..(141): n is a, c, g, or t
  misc_feature (144)..(144): n is a, c, g, or t
  misc_feature (150)..(150): n is a, c, g, or t
  misc_feature (154)..(154): n is a, c, g, or t
  misc_feature (156)..(156): n is a, c, g, or t
  misc_feature (178)..(178): n is a, c, g, or t
  misc_feature (195)..(195): n is a, c, g, or t
  misc_feature (231)..(231): n is a, c, g, or t
  misc_feature (258)..(258): n is a, c, g, or t
  misc_feature (272)..(272): n is a, c, g, or t
  misc_feature (282)..(282): n is a, c, g, or t
  misc_feature (293)..(293): n is a, c, g, or t
  misc_feature (300)..(300): n is a, c, g, or t
  misc_feature (328)..(328): n is a, c, g, or t
  misc_feature (331)..(331): n is a, c, g, or t
  misc_feature (333)..(333): n is a, c, g, or t
  misc_feature (336)..(336): n is a, c, g, or t
  misc_feature (339)..(339): n is a, c, g, or t
  misc_feature (345)..(345): n is a, c, g, or t
  misc_feature (374)..(374): n is a, c, g, or t
  misc_feature (379)..(379): n is a, c, g, or t
  misc_feature (393)..(394): n is a, c, g, or t
  misc_feature (404)..(404): n is a, c, g, or t
  misc_feature (412)..(412): n is a, c, g, or t
ccacctttaatcaggctgangtcctggcttgcacaggaaacacgcacctaacctcaccaacctcaanccctccctcctcaagtctccatgcaaagnctgtnccagtcagantcgagcngtccccccgacgnncccccnnnngcncccggncggncntggctgtcattttgagggcggnaaataactggatttctngttaattggtgacatcctcaagagctgtggcaagcnatgtctcggccgcgtgatggggcaganatggtgggtcctgncggccttgtnttcaccttgtnctccttnctctcagcttacttggggttcattaccntcntngtngcnctcttnttaaggggattatcattgttccactgggncttgngcttctccttctcnnagcgcctgtnctcccggnggtcgct

SEQ ID NO: 693652 - DNA, 234 bp, Homo sapiens
agaatacagcataactaacaatttagtgttgaagttagatgatctggtgccattcatacataattagcataagagcttaaaaaccaaagttgtgcccgtggcttccatctataggcagtaacctgtcattccagaggatgctgagaaatgtgttagggcacttctgtggattctcatatttactaccgggcttcctgttcggcactttagagcctaaacgatcactcacccctg

SEQ ID NO: 693653 - DNA, 2282 bp, Homo sapiens
aaaattctggccatttgccctccttccccccttcgtccgctctcattggctctgctgcagccctgaccaacgctccaataggccgggatccagccatacttcaatggatcccaggggtatcttgaaggcatttcccaagcggcagaaaattcatgctgatgcatcatcaaaagtacttgcaaagattcctaggagggaagagggagaagaagcagaagagtggctgagctcccttcgggcccatgttgtgcgcactggcattggacgagcccgggcagaactctttgagaagcagattgttcagcatggcggccagctatgccctgcccagggcccaggtgtcactcacattgtggtggatgaaggcatggactatgagcgagccctccgccttctcagactaccccagctgcccccgggtgctcagctggtgaagtcagcctggctgagcttgtgccttcaggagaggaggctggtggatgtagctggattcagcatcttcatccccagtaggtacttggaccatccacagcccagcaaggcagagcaggatgcttctattcctcctggcacccatgaggccctgcttcagacagccctttctcctcctcctcctcccaccaggcctgtgtctcctccccaaaaggcaaaagaggcaccaaacacccaagcccagcccatctctgatgatgaagccagtgatggggaagaaacccaggttagtgcagctgatctggaagccctcatcagtggccactaccccacctcccttgagggagattgtgagcctagcccagcccctgctgtcctggataagtgggtctgtgcacagccctcaagccagaaggcgaccaatcacaacctccatatcacagagaagctggaagttctggccaaagcctacagtgttcagggagacaagtggagggccctgggctatgccaaggccatcaatgccctcaagagcttccataagcctgtcacctcgtaccaggaggcctgcagtatccctgggattgggaagcggatggctgagaaaatcatagagatcctggagagcgggcatttgcggaagctggaccatatcagtgagagcgtgcctgtcttggagctcttctccaacatctggggagctgggaccaagactgcccagatgtggtaccaacagggcttccgaagtctggaagacatccgcagccaggcctccctgacaacccagcaggccatcggcctgaagcattacagtgacttcctggaacgtatgcccagggaggaggctacagagattgagcagacagtccagaaagcagcccaggcctttaactctgggctgctgtgtgtggcatgtggttcataccgacggggaaaggcgacctgtggtgatgtcgacgtgctcatcactcacccagatggccggtcccaccggggtatcttcagccgcctccttgacagtcttcggcaggaagggttcctcacagatgacttggtgagccaagaggagaatggtcagcaacagaagtacttgggggtgtgccggctcccagggccagggcggcggcaccggcgcctggacatcatcgtggtgccctatagcgagtttgcctgtgccctgcaaggtggggcctggccgagtgctgcccactcccactgagaaggatgtcttcaggctcttaggcctcccctaccgagaacctgctgagcgggactggtgacccatggctgggggtgctgaggagagccgagttggactggctacccctcctggccacccagtactccctccagcctcagctggctgaacctcgccgctccaaccaccagcttcctcagcgagcagggcccagggctctgggcctgaagcaagagccagcccggctcccagtgtctgcccggctcccagtgtctgcccagccctctcccagacaggagcaggctgccaccccttctacctcaccactgcccctcgaagaattttgcaaatggccccttgccccattttaagcaggagcaggtggctggtttgaagccccaggtatcccccttccctgctatgggaaaggccaagctgctgggtggggacagaagctgcaggggagagggaagcagccgtgctgtcaacatcatccggcaccctctggggtaggagaacagccattccacatgtgttccctctatccgtcctgcttcctgggcagctggtggtgctgggaatggggtgccccagccttggtgaggacagtgttgggaggcccaggggcccagtaaagtgcatttgacattga

SEQ ID NO: 693654 - DNA, 1170 bp, Homo sapiens
ggcccagcggaacacactctcttggataattaccacgatggcgtcagcaaacactccaccctgtgcctttttagtccttcccgccctcctgcctctcccttacaccctcttaacgactttcaaactaaaggtatacatcattatactgacaaactcaatgtggtccctttcaaaggaattagccatggagtctcaaaaaggcaaataaatggctctaagtggaccaggttttgctttcaaaacaagtaacatctacatttgtgtcttttttttttcccagttctcctgttcatgtcctggttgaacatcacctgttggtgtcttaatttctcaaattccttttggggcaagaataatcaacgcacggtgaatttaaccattatgtccatgtacggtcaggtggctgtaacctaatagttaatgtgggacttgattctttacccaagcctgggctcaacgaatctgtggaggcatgtgactgacgtacctaaattaaaactttattttgtgaaaaccaaaactaattttttaaagcccacaaaggttgtccataggtgcatttcaactcacaggggactgaacaacaccactgaactttttaaagaactgtaaggttggaacctattggtcaaaggacagtttttacaacgcagcggaatgtccgtgtatttccagcattttcaaataattggcttaaaatccccttttcacagacatctggacaattcgggcattcggtttaaacccttgtgctggacctaacaattcaaattcacctcggggggttgtgctaaatctaatttttacccatatttggggttaggcggcgtattaatacaacgaactcgggtaagcgggggacccacaacggaaccgggtaaggccaccaggggaaacgtaccgcgactatcaggcaaaacggcatttggaaacaaccaagtccatgacacaggtgcttctgattaccacaccgacagataagcgcaccaatacgacgaaccatggggtacaaccccgttgggataccactgggacccaacatgggacaacacagtcgccctgagtgcacccacctgcgagtcaaaccaaaacacgcgacagcagcagaacacccacaagacaacaaacaatgatgtcggcccacacacgagagtaggacaacaacaacct

SEQ ID NO: 693655 - DNA, 1535 bp, Homo sapiens
cctggctctgcccacaatcaccagggcagcttggtaaggatgaagatgacaaggtccatcctcagactgatggaatcatgaacgagcatcttaggatagtggcagggctggatgatggcatgtttcccatgctccctgcctttcccaagtcctgctgagtacagacccaactgcccctaggttggtcctgcctctagccttccctagagtctggggcgatggaagccttgtgtgtgtgctcactcatgcctcttcattggtcctggatccttacagcttcccatctggctgcttttttccagggcttccgaagtctggaagacatccgcagccaggcctccctgacaacccagcaggccatcggcctgaagcattacagtgacttcctggaacgtatgcccagggaggaggctacagagattgagcagacagtccagaaagcagcccaggcctttaactctgggctgctgtgtgtggcatgtggttcataccgacggggaaaggcgacctgtggtgatgtcgacgtgctcatcactcacccagatggccggtcccaccggggtatcttcagccgcctccttgacagtcttcggcaggaagggttcctcacagatgacttggtgagccaagaggagaatggtcagcaacagaagtacttgggggtgtgccggctcccagggccagggcggcggcaccggcgcctggacatcatcgtggtgccctatagcgagtttgcctgtgccctgctctacttcaccggctctgcacacttcaaccgctccatgcgagccctggccaaaaccaagggcatgagtctgtcagaacatgccctcagcactgctgtggtccggaacacccatggctgcaaggtggggcctggccgagtgctgcccactcccactgagaaggatgtcttcaggctcttaggcctcccctaccgagaacctgctgagcgggactggtgacccatggctgggggtgctgaggagagccgagttggactggctacccctcctggccacccagtactccctccagcctcagctggctgaacctcgccgctccaaccaccagcttcctcagcgagcagggcccagggctctgggcctgaagcaagagccagcccggctcccagtgtctgcccggctcccagtgtctgcccagccctctcccagacaggagcaggctgccaccccttctacctcaccactgcccctcgaagaattttgcaaatggccccttgccccattttaagcaggagcaggtggctggtttgaagccccaggtatcccccttccctgctatgggaaaggccaagctgctgggtggggacagaagctgcaggggagagggaagcagccgtgctgtcaacatcatccggcaccctctggggtaggagaacagccattccacatgtgttccctctatccgtcctgcttcctgggcagctggtggtgctgggaatggggtgccccagccttggtgaggacagtgttgggaggcccaggggcccagtaaagtgcatttgacattga

SEQ ID NO: 693656 - DNA, 281 bp, Homo sapiens
  misc_feature (217)..(217): n is a, c, g, or t
aaagttcaatgcgaagttccttatgatgagactttcttacaaaattaaaccatcaattaatttgtaattttttgagtatagaaattgaaagaagagggccgggcaaggtgctgggattacaggcgtgacaccttgcgcctggcctatagaattcttaatgatgaaaatcttatgaacatatcaatctcctaggaaagtttttgttgttgttttaggnttttaggagcatacatgacgtattaccttgctctaaaggggttgttggcattctggtatagaag

SEQ ID NO: 693657 - DNA, 128 bp, Homo sapiens
gggatgggagatgtctggacggtcacacacaacgctgcatgcaggaactagaaacacatcttcagcctcctccggggccagctcttgtgctagagggtggggcggagccagcccctcaccttccgggt

SEQ ID NO: 693658 - DNA, 751 bp, Homo sapiens
gggcccagtggctcaagtgaggtcctcctgtctgcccatcagtccacactcaggcctttcaagtagttcactcgtcttctcgtcatattcttcagccatttccttgccgtctgggaataaatagtgaaccttccttctccccctccataggcaaaggggttggagggcctcaattctggatttccacgtgcagcagccctgaccaacgctccaataggccgggatccagccatacttcaatggatcccaggggtatcttgaaggcatttcccaagcggcagaaaattcatgctgatgcatcatcaaaagtacttgcaaagattcccccaccggggtatcttcagccgcctccttgacagtcttcggcaggaaggtataagctccatctctgggtgagcaggttgacagagggcagcacaggtctgggggccccctcagagggagaacctcagaagttccagtcctgaggcaggaagcaggggaacagtgctttgccagcatcccatctctctatcggggccggaatcctctccagggagagatggaacagccccgccacaccttgtgcccacgggagcctcaggaccaccaagcggagggcggtctgcaaggagatgtcccctctctacctccctgcgaagaataaattcgggctgcagatgcccctcgggctccgcagggaggagcctcactcgccactctagcttcaggctctgccttcctgatcctaacaccctccaccctctgggac

SEQ ID NO: 693659 - DNA, 893 bp, Homo sapiens
  misc_feature (79)..(80): n is a, c, g, or t
  misc_feature (123)..(123): n is a, c, g, or t
  misc_feature (125)..(126): n is a, c, g, or t
  misc_feature (156)..(156): n is a, c, g, or t
  misc_feature (168)..(168): n is a, c, g, or t
  misc_feature (201)..(201): n is a, c, g, or t
  misc_feature (205)..(205): n is a, c, g, or t
  misc_feature (231)..(231): n is a, c, g, or t
  misc_feature (236)..(236): n is a, c, g, or t
  misc_feature (238)..(238): n is a, c, g, or t
  misc_feature (248)..(248): n is a, c, g, or t
  misc_feature (255)..(255): n is a, c, g, or t
  misc_feature (263)..(263): n is a, c, g, or t
  misc_feature (294)..(294): n is a, c, g, or t
  misc_feature (297)..(297): n is a, c, g, or t
  misc_feature (302)..(302): n is a, c, g, or t
  misc_feature (309)..(309): n is a, c, g, or t
  misc_feature (316)..(319): n is a, c, g, or t
  misc_feature (323)..(323): n is a, c, g, or t
  misc_feature (326)..(326): n is a, c, g, or t
  misc_feature (344)..(344): n is a, c, g, or t
  misc_feature (349)..(349): n is a, c, g, or t
  misc_feature (356)..(356): n is a, c, g, or t
  misc_feature (358)..(358): n is a, c, g, or t
  misc_feature (383)..(383): n is a, c, g, or t
  misc_feature (409)..(409): n is a, c, g, or t
  misc_feature (431)..(431): n is a, c, g, or t
  misc_feature (854)..(854): n is a, c, g, or t
tatgtgccaggcactgttctagaccccccccagaagaaaaaacaaaaaacaagatagaggcagcaaacacaaattctgnnggagaggaaaggggcagttgagtaagacggctaagggaactgngnnggcgtgggggtgatgggggctctgccttangcctcctcttcngcctcctcaccgaaatcctcctcctcttctgcngtgncatcctggtactgctgatactcaganacgangncgttcatgtngctctcngcctcggngaactccatctcgtccatgccctcgcctgtntancagtngaggttngtttttnnnngggngangggagtggaatggtccgngatgngcttgangngctcctgggtgggtgtgctattgcnaatgaaggtgactgcgatcttgaggncacgaggtgggatgtcacaganggctgtcttgacattgttggggatccattccacaaagtagctgctgttcttgttctgcacgttaagcatctgctcatcgacctccttcatggacatccgaccacggaagacagcagccacggtgaggtatcggccgtggcgggggtcacaggcagccatcatgttcttggcatcgaagacctgctgggtgagttccggcactgtgagagctcgatactgctggcttccacggctggtgagaggggcaaagccaggcataaagaaatggagacgtgggaaggggaccatgttgactgccaacttgcggaggtcagcattgagctggccagggaaacggaggcaggtggtgacacactcatggtggctgagacaaggtggttcagatccccgtagttgggtgtggtcagcttcagagtgcggaanagcatatcatagagggcctcgttgtcaatgcaataggtc

SEQ ID NO: 693660 - DNA, 307 bp, Homo sapiens
tttattcccctttattttctattttatccccttgttaagaaagtagtggtttttatgtatgaatgttatatcacccccaattgtgattcccactggtttttaaggaaacctttggctctcccctttccaatgggtctcttatttctttcttgtatctagttgatttgagatcagtgttgagtcccagtgattcaggtggcatgcttattttgttcgtgacatcagtgggacgttttaatgtttcagcgtttaacttgtatgaagacatgtattttccttgccataataaaaaagtatttgtgtgttt

SEQ ID NO: 693661 - DNA, 510 bp, Homo sapiens
tagcagtgaattatatggtcaggctccttccgtgagccccctcccgtggctctcccccatgctgaattagagatgcgctattctcccacaagcataccctagggcttggggctagaactgaggactcttatgggatgggaagtgggcagggaaagaggaagactctccctgatgcagtgtccaagaagtctgggtgaatcttacagagatgatcaagagatgatcagggtgcagttggcgtgggcaaagctcagcaaggcgtcatccagaggtagctggtgtctatctagatcaggaatggagaacttcttgtagtacctgtggggacaccgagaggccataggggcactcggaaaggtgacccaacagacaggcgtcaggccctctgctgcctagcttctacctagttcttccacaccttccacatacgcagagagggagaagggaaaccagttagaacaccagtatttcagagctcagtggccctggaaagcatagaatgcaagcctt

SEQ ID NO: 693662 - DNA, 973 bp, Homo sapiens
ggcgcgctggggctgcagagcgggatgctgtacccccaggagagcccgtcgcgggagtgcaaggagctggtacggcctctggagcttccgcgccgacttctctgacaagcgacgaccggggcttcgaggagcagatggtaccggcgggcgctgtgggagtcagtgccccactcgtggacatgccgagttccctccagcttcaatgactatcagccagtgactggcgtctgcggcatttttgtcgtgctgggtgtggtactgaacgggaggtgatccttgccggcagcgatggacccattgacctgcgcacaatgagtggtgctgcatgattggcagttgcccattcctatgccatcgtgtgggtgaactggggtcgacaacgctagagcatgaggggtggctaccctccccttcgaggccgacaattcatgcaaaacttggtccagtgttggtggccccgtgccactcccggttccggaatcacgtatcgccatcaaacgaagacaatcaacaccgcaacagcctgcctagcagaggaccatcccaagtaccatgatcgtgacatctccaagtatcccaagggttactttagtccaagaacacataatttggacgttattcaagctacgctggactgcaggcggtctgtacttctgtacacgagagccaacactacatcgatgacatcaccgtcagcaccagcgtggagcaagacagtgggctggtgaattaccagatctctgtcaaggggcagtaaccttgttcaagttggaagtgcgtataatgggatgcaaaaaacaaagtcgtggcgacatggaacttgggaccaggggcaacttaaggtgccaggtggtcagcctctggtggccgtaactgatgcagaaggccctgcatatctagatcattggaaggtgaagatgattgacctgaagtcactggggctggtttgattttaaaactccaggggggaacg

SEQ ID NO: 693663 - DNA, 285 bp, Homo sapiens
gttgctgcgtaccaggtgaactaagggcttccaccggtacgtcgcgcatccacgttcaccacgacgcttcgagcgatcccaatcgcgactcagatgccgggtatcggaccagatagcgccggtccctcggtggcgattacggccttggcgaaatatcgctggaatttcgtcgtagctcatcgcatgcttgtgcttctcgcgcatgcgcagggccgccgcctgcctcacgcgcgcggcgacgggattcaacgtgcggaagtacacgtcctgccccacccacaaggc

SEQ ID NO: 693664 - DNA, 394 bp, Homo sapiens
gatcatcccccggcctgttccccttcctcccgagctgcctaacggggagggagccgagggccctcgggcgtggccccagaggagaacccagaggccatgctcttccccttcctgctggcaacagtcctgagcgccagcttcccacctcagagactctgagaaccagggtccacccacctgagggcctccttggctctcccttaccttgtgcccacgggagcctcaggaccaccaagcggagggcggtctgcaaggagatgtcccctctctacctccctgcgaagaataaattcgggctgcagatgcccctcgggctccgcagggaggagcctcactcgccactctagcttcaggctctgccttcctgatcctaacaccctccaccctctgggac

SEQ ID NO: 693665 - DNA, 3196 bp, Homo sapiens
aggccctgtccaaacgggcactaattggccccgggtatttaggcgccccctttttttttttgcagtaagtaactcagaatgactttactcaggaaatatgaccatgactcactggctaggagtgccccatgcccagttcttagagacccttgatagctcctagaagacaggaggctgccgtggtcaagaagggccaagccttgaagtctcacggcaccccctgtggtggaggtataaggctcaggggccaactactgggtcttgcagtccccatcgttgctgtgggctgtcttcaccttctttagttccttctgtagctcagactcggccaccacaacctcctttggcttctggtaagagatgatcagggtgcagttggcgtgggcaaagctcagcaaggcgtcatccagaggtagctggtgtctatctagatcaggaatggagaacttcttgtagtacttcttgttggttgttctgacaatgatgcagcgctccttctggtccacagagacactatagacatccttaggataggggaggtttcgaatccgccactggaaactcatcttggtgtccttgcgcatgaagataggattggcattgctttccttgatgagttcaggccccaggttccctgctcctaggggcgctgggtctcctacttcaagctgccactggcccatggctcccagggcacttttcacacgccactttctcacaagtagttcactcgtcttctcgtcatattcttcagccatttccttgccgtctgggaataaatagtgaaccttccttctccccctccataggcaaaggggttggagggcctcaattctggatttccacgtgcagcagccctgaccaacgctccaataggccgggatccagccatacttcaatggatcccaggggtatcttgaaggcatttcccaagcggcagaaaattcatgctgatgcatcatcaaaagtacttgcaaagattcctaggagggaagagggagaagaagcagaagagtggctgagctcccttcgggcccatgttgtgcgcactggcattggacgagcccgggcagaactctttgagaagcagattgttcagcatggcggccagctatgccctgcccagggcccaggtgtcactcacattgtggtggatgaaggcatggactatgagcgagccctccgccttctcagactaccccagctgcccccgggtgctcagctggtgaagtcagcctggctgagcttgtgccttcaggagaggaggctggtggatgtagctggattcagcatcttcatccccagtaggtacttggaccatccacagcccagcaaggcagagcaggatgcttctattcctcctggcacccatgaggccctgcttcagacagccctttctcctcctcctcctcccaccaggcctgtgtctcctccccaaaaggcaaaagaggcaccaaacacccaagcccagcccatctctgatgatgaagccagtgatggggaagaaacccaggttagtgcagctgatctggaagccctcatcagtggccactaccccacctcccttgagggagattgtgagcctagcccagcccctgctgtcctggataagtgggtctgtgcacagccctcaagccagaaggcgaccaatcacaacctccatatcacagagaagctggaagttctggccaaagcctacagtgttcagggagacaagtggagggccctgggctatgccaaggccatcaatgccctcaagagcttccataagcctgtcacctcgtaccaggaggcctgcagtatccctgggattgggaagcggatggctgagaaaatcatagagatcctggagagcgggcatttgcggaagctggaccatatcagtgagagcgtgcctgtcttggagctcttctccaacatctggggagctgggaccaagactgcccagatgtggtaccaacagggcttccgaagtctggaagacatccgcagccaggcctccctgacaacccagcaggccatcggcctgaagcattacagtgacttcctggaacgtatgcccagggaggaggctacagagattgagcagacagtccagaaagcagcccaggcctttaactctgggctgctgtgtgtggcatgtggttcataccgacggggaaaggcgacctgtggtgatgtcgacgtgctcatcactcacccagatggccggtcccaccggggtatcttcagccgcctccttgacagtcttcggcaggaagggttcctcacagatgacttggtgagccaagaggagaatggtcagcaacagaagtacttgggggtgtgccggctcccagggccagggcggcggcaccggcgcctggacatcatcgtggtgccctatagcgagtttgcctgtgccctgctctacttcaccggctctgcacacttcaaccgctccatgcgagccctggccaaaaccaagggcatgagtctgtcagaacatgccctcagcactgctgtggtccggaacacccatggctgcaaggtggggcctggccgagtgctgcccactcccactgagaaggatgtcttcaggctcttaggcctcccctaccgagaacctgctgagcgggactggtgacccatggctgggggtgctgaggagagccgagttggactggctacccctcctggccacccagtactccctccagcctcagctggctgaacctcgccgctccaaccaccagcttcctcagcgagcagggcccagggctctgggcctgaagcaagagccagcccggctcccagtgtctgcccggctcccagtgtctgcccagccctctcccagacaggagcaggctgccaccccttctacctcaccactgcccctcgaagaattttgcaaatggccccttgccccattttaagcaggagcaggtggctggtttgaagccccaggtatcccccttccctgctatgggaaaggccaagctgctgggtggggacagaagctgcaggggagagggaagcagccgtgctgtcaacatcatccggcaccctctggggtaggagaacagccattccacatgtgttccctctatccgtcctgcttcctgggcagctggtggtgctgggaatggggtgccccagccttggtgaggacagtgttgggaggcccaggggcccagtaaagtgcatttgacattga

SEQ ID NO: 693666 - DNA, 738 bp, Homo sapiens
agcggtgtatatgacaaacattccctatgtaaaatcagctgaagtgtttagtgtgaaatttcagattatttaaagagaagtttcactatgtttaagtagagacaagtcataagaagtgccctctagcagaaatttacctgaacttgctttaatgagcatggaagatgcactacttacacagagatcattcagtccaagtcgtggacctaatcttgtttctagtcaaagtatacctccttttcatcgcaattgtgatatttgatttgcaaggctaattatttcaagatttgtacaaagaacaacataagtggaatgacattatttactgtggattttagtgatttacaatgtgggtggtgtgtgtgtgtctgtgtggcagagagagaaaaagaagagaggatgagaaaggtatggtttcggtttgagaaaaatatatatatggttaataatttctttatgattaacactaacaagtcatacctgtgtcaatgaatataattctaaggcaactaactaactttaaatttttttccactagaacattttgagaattattaacaatactagacattttattctctaattcctttctggtgactgtaattttcgtatctgggattcaaacctcaaacacttacttgattgggcgaaaaaccattcatgaacaattcttcaagccaaggctctacatgcagttgaaactgtaactattggtgcctataacagtgattcgcgggg

SEQ ID NO: 693667 - DNA, 320 bp, Homo sapiens
aaaagtggcttccgggtggcgctctctgcagggccacagcctcagtttggagactagatggaggatgttaggtgttctggctaggcccatcaacctagttgcatttcctcgtgcgcagtattacctttcataatgcttctggggttttttgtttgtttgaagaccagacattagaaatcaaatattttatttgaaggtagacctttcagtgacttttttccactcttacttttgtgtgaaagaaaaagctataaatgcgccaattacttgtttgcccgtaataaaggaaaaagtgtattggcttctctttttatgcaaaa

SEQ ID NO: 693668 - DNA, 664 bp, Homo sapiens
gggggaagccaggacaccttaaacggtcccacatttaggggtccggcctaggtaacggggcacaaattagcttcgagattttcccggacttttccttaagggccttttcttgatggttccaggactggttactgcagaaattcacagggtcactaaccggggcatggaaaaaagggttactcaataaggggatcactggattctgattgaaagaaataggctcatatctgaaattgaccgttactatgtgtaaaagggttaggagaacatggattaaggaagcattttcctgattgacgaaaaacttaactcagaaatggccatctacccttggtacaagtgcccagggtataatgtaacatgcaatgaggtatgaagcgctgaataaagttgagcttaataaaaaaaaaaaaaaaaaaaaccatgtcggccgttttggcccattcgactctagactctatcaaccttatccagctgaccaaattcacgcaaattggggcaatttggcctatagtccgtttattaacaattattggcctaattttcccacgtttacacttggaaaaccttgaaacccccaacttaaaccccttgaagcctatccccttttcccccattggcccaattgccgaaaagcccaacgggtcggccttttctttccttt

SEQ ID NO: 693669 - DNA, 230 bp, Homo sapiens
ggaaacaccagcatcggcagaggtgatagctgaggaggagcggggatttggacgagagacacaggatgagtaccgcggggcagcccgtgatcacaactgctgcagaggcgcgtttgttcgactcgctagtcttctgcggctctatgcggtactaagagcagaggcagagatacacaacacaaaagtagccggcgtgtctgccgtcaatatccagctactcggagctagca

SEQ ID NO: 693670 - DNA, 283 bp, Homo sapiens
catttccaattaacctgctacctgatctggccctgaaccccggccaaagcactcaccccggtcatcttctttaaataagccaatcggaattagtttagcctgtgcgtctaaccctagtcaacaggggaatgacacagcagcaaggggccacatgcatcagggataaagaaccccttcccctcccttgtccaagtgtacgttcaccattgttccatctgtaagggcgcacccttctatacagaagtaacttgccttgctgagagtcgacgcggccgcgaattta

SEQ ID NO: 693671 - DNA, 343 bp, Homo sapiens
cctaacaggcttggagctctgcaagtaatctctagccacactgattactactaaaccagagaaagcatcaaggtgtcttgaacttcctttaactattgagtgcattagaacattcctgtacccacattatactgcaagttgtgtctctctctgtcatgtattccacagcgcttaagtggataagaaagacaacagtgtcagcacagccatcgacattaatgcactgaatgcatgcatctttcctcctgagacagcaatcgattttacaccgttctgagattgatcatccatgacagcacaacatacccactcggatatctaaaagctagggatggcattgctg

SEQ ID NO: 693672 - DNA, 280 bp, Homo sapiens
  misc_feature (26)..(26): n is a, c, g, or t
  misc_feature (28)..(28): n is a, c, g, or t
tctagaggatcccggtcaggcactgnanagcgggcgacagagcgagactccgtctcaaaaaaaaaaaaattaaaaaaagttacttgactcatatggccatattttaacattcttggctctgttatgtgatcaattgtccctaaaaccttgggataggaaagttagttcccctatgtttaagatgtgcttctttacaaagagaaaaagaccaggagacttatttttttatttcagtagggaaaaaattgtgattaaacatcgcgtgggtaaaaatgatttt

SEQ ID NO: 693673 - DNA, 1321 bp, Homo sapiens
gccggcgtcgagccgccatcatggacaccagccgtgtgcagacctatcaagctggccagggtcacccaacggtcctgcgtgcaggatacggtatcatcagggaacagtagcacagcaggtgctgcgtggaattcatgtgacagacaacagagccgatccatcatccgccaatgtaagaagggcccgatgtcgcgattgggccgaccagtggtcagccctattgggaagatcacgagcgacagaatagcccggacggttgtcgctgaggcttggactagttcgctggcgtctcaggaatgatcgtagattcgacccactttgggtcccgcactgcggaaactgcgatcatggtcaacaagatcatgcgtcactattgtaacgttgggctctcgacacaacaacgtctagccatcgacactggctcgcctttaacgaaatcacaagaccgtgggggaagatagcaccaatacggctacaacaataaataggacaattaaagacacacattagaacgccctatccacactctacgcactaaccgcttcgataacgcgacacgccacttgagatccggcaccaacgaaacagacaccattacacggcacagccccaagcatgtctgatcaagaatagagtgattcagataagcgaacccatgggccggagcatggcattatcaattaatacccgcctcataaagcagatgaagcacactggctacactgatacaactcggcacgtcaaacacccccggcacctcaaacaccgtccaaccacaacccacaccaatgggaccctacaaccgcccactaacctacttagcagcgggcccacacttcacttatcaagatcataccagacgaataggaaacagcacacagcgccaccccccacccgtgaacaaggccgcccaaaagataccacccaccgaacacacgacaaggataagacggaccaacacggcggctaaagaccccacatgaacgcgccagagcaccggacacacaagggcagacaacccagactcgcataaaaccccaacgaaaaagactcacggcaaaaagcacaacaccatagcaaccccccacaaggtgtacaacaacgctgagactaaacgcacacgtaacacatcacgcagtccgcgctgccttagctagcacccaccggaacctccaactccgcgtaccaaacaccgccccgcaccacccaccccacatctacccatacacaacaacacgaatgaaccatactcgcaatgccgcacacggcctactacaactagcaccacacaccccacgtccacacaagcaaacataatttg

SEQ ID NO: 693674 - DNA, 747 bp, Homo sapiens
ggacgcgtgggttttttggctggggctgccccaaaggggcagacaggtttattgggcagcagctgtgtgaaaatcggtggctggacatggtctgtagcgcgtgccagcttcgtccttgcttgctgtagatggcatagcgagtctgtggcctcccttggctcgcaactggatcgaccagcgctatctgtcaggctactcaggagtgttctgaagtgttcctggactgcattacttctctgagcggccttggtgcgtcatgtcgacgcccgtagtggttctggtttcatcgcggctctagatgtccggacggatccagagccatgtcgtctcacagtcccggctgcgcccaatgcgtgtggagatcctcccggggaccactgtatgactgatggcgttcaccaggacctgcagagggttctcgcctgtgcaacaggtgtatgatctcgaacggcatgcttgaccgatgcgcacacgtcatgacacttcttgccgcatgtatgcggccgtgcatcatcaattgcacgtaaagtagaaggccgcatccaaccaaatgcggaacacttgacgcctattagaggcgaaagccagtatagagcggaataaaccgacccttggcaacatgttgaagagcagggtaaccctgagcaaatcacatacatacatatcactatgaactgtaacatccatagcaagggcaaactgtaaattgatactagcacaatcaacacatggacaccaactagcaca

SEQ ID NO: 693675 - DNA, 122 bp, Homo sapiens
aggatctctcagaggcgtttagtgaccaccccgatcaggccaacagcacatcgcggcggcaagaaagtagtagacctgttcggcgtccaaatttattccttggtttttcaattagttacata

SEQ ID NO: 693676 - DNA, 471 bp, Homo sapiens
atggagagtatattcctttgtttcaaatttgggtaactctcctgtgtttcaggaacagctctccctattttttcactgccatcttcaggcttcctagccaggctccaaacaaatgtcatataagaaagaaagattaattattacatattgtgtattgagagtttgtaccctgtggttctcatcgtgctgttaattttacttttcttgccaaacaaaaataatttgacattgattatgtgctttttgatattttcaagggcaattattaaggttatgagctctgtcttagggcacttgatgccttatatgttaatagcaagtgtgtcatatcattttaaaataaaactattcaaaggctttattgtgtttattaagcttaatttaaattggaatctgtaatgctgatttggtcttttaaaattatatttgaaattatttgtccaaaaaaaattaaaatgaatatttacccct

SEQ ID NO: 693677 - DNA, 1031 bp, Homo sapiens
  misc_feature (272)..(272): n is a, c, g, or t
  misc_feature (545)..(545): n is a, c, g, or t
  misc_feature (705)..(705): n is a, c, g, or t
gacatctagtgatatatactctctttccacatatctgtgttctatgctcttcaactatcttggtttctcacctcttctttacattcacgaatgccttgtgagtaatatctatatctgtagaacaacatattcttgcggtttgcactaattttttccacacgtggcacattcaccatcactggtggacgcatcttgtggacaaatgctcatggtgcgaaacatagacttgtgggttccacaaatatctcttaaaccacaatatatacccgtgnataggcttccccaagaagttgacttgtcttgaccagtatgcgttgacttgtcagcacagcaagactaggttaggggtagtctttccttggggcccacaggcaacatttcaaacattgtccttgccaactggttcatacccataccatatacctattatattgcgttggtccaagcacagtgggcattgtgcgcagcatattgtacaagcgatatatcatctcaccttcatctggccacttatcttccaagcaagatatgaccctgttgatgcnacgaaagctcatccacacctatgtgaggtcgtcaaagtgcaaagcattgtgggccagtggacatattcttgttggaacaccacgcacaactaaccttgtcagtcacaccttacaccttccttggttcgttgttcgttcaaaacacattagtgttggcacnttgcacgtaccaccgtcatttgcacgcaccacttccaccacaaggcacaaaaccacttcttccaagcctggttatcgtcgtgtggcacaccttgttttacattcccacctttttcctatattcccacttaaggtggcccaacaatagggcataggtggccattaatcctataatttttacatattaccgccctgacatccctattagcaacggaggtaatcacatattacaacagaatgtatacaaggacatctgggaagcagcatcaggacacacttgacgaacgccctcttcacactctgtcaacagtattttacctatcgcct

SEQ ID NO: 693678 - DNA, 252 bp, Homo sapiens
gacgaacgtaagccgacgggcgtctttgacttgtgtcgtacctgggtggacacggtgactttactcggacactgggacggtgacttcctacgggggttgttcgactcccgatttcgatgcaacgacataggacggtggacgtgcttgctacgggctgtcaactacactgacacggtgcacggactgacagtgacccggtacaacgacactcgtgtgacgggatgggaccttgtcgtgctgacgctacgcctc

SEQ ID NO: 693679 - DNA, 274 bp, Homo sapiens
tgtaaatggccgagagaatggctgacgggttgatcttgctgagttccttgaagacctctagggtgcgccgttgatccacacaccaggcttctgcgatttgcgccagcgcccggttgatgtaaccgcgcaacgtgtcataggtgaactgcagctgggcgtagaccagattgtgcaccgattccatgctggacaaatgagttgtattattgtcactcgtacttcttctggtcctatgagtgatattcagactgcttcggtcggccgatcgttccag

SEQ ID NO: 693680 - DNA, 330 bp, Homo sapiens
atggcttggatagtaggtgaccatggcgtggtggtaggtggccatctcttccctgtgtcttcacatggtcatcgctctgtgcctgtctgtgtcctaatttcctcttcttataaggacaccagtcatattggataaggccccaccctagtgacctcactttaatttaattaccccattaaagaccctatctacaaagataattacattctgaagcactggcaggtacaggactacactatttgaatatgaggcagagacacaagtcaacaccttagcaggtaaaacccccataacctgcaacagatccccaaatctcacctgctggcactc

SEQ ID NO: 693681 - DNA, 316 bp, Homo sapiens
cgtatgtgagttttagcttaattggtggaggaagtgatctaaaacactctttacgcctggcttctattgacttgggttaatctgtgtgactgtgtgtgtgctggcactgaaattgaccaaccctgtgtgtgttagtatagcttagttaaactttctgtttattgctaaagtgttaatcactgctgtttcccgtgtgtgtgtgtgtggctaggctaagcgtttatgagcttgattgatgtgtgcttgattgcttgatcccttttgatctgtggttgacttacgaggtgattgtactcacatgacaacggactgggta

SEQ ID NO: 693682 - DNA, 318 bp, Homo sapiens
cacgccgaagtgcgcgcgccggtggacggcatcgtcggcctgcacgacctgcaggtgggcgaatacatcaacgtcggccagaggcgatgccgctggtggccacctcgccgatctgggtggaagccaacttcaaggaaaccgagctggagaagatgaaggtcgcccagcccgcgacgatcgaagtggacagctatccgggcgtgaagtggaaggcgcacgtggcctccatcgcgcccgcttccggtgccgagttcagcgtgtgccgccgcagacacccaccggcaactgggtgaagatcgtccacggcatcccggtgcg

SEQ ID NO: 693683 - DNA, 643 bp, Homo sapiens
cctctgcgggctactgtgctggtcgctctgccgagtgtggcttctatgcctccccaggactgtgcttcccgcacgcttctcgctggacctctctcctcttgcgtattttagtccttgcagaaggaagttaatttctcttggttcctttgaatttcctcccagaaagctcagatttcttgctttttttttccccccttgttcttcagtaatcgctcccctcatggatactagaagagaagaccacaggcatgaggcaagtctctcgaaatacacactgacaaagagacactcctcgctaccggaagtcattcagaatagtcttatactctaatttgcatttctttctcttcttccttccgtaggaattaccttctcttttggtagtccctaggccaaagataagttcaccttaaaacaaatggctagaacttttacacagagacacgcaattggatgcttcttattttaaaatgcaaagataatctaggggcacaaaaatgcagagcgggtacttaactttcattctccagatgtcttcagccaggtccccatccagcctccagtctgtctgtgagggttagaatgtttccttcagtttggatgttggggttgtaggttgtagaaggctttaatccctcatcaa

SEQ ID NO: 693684 - DNA, 493 bp, Homo sapiens
agatgccacagaatggggagacaaacctattcttaagaaacaaaccaaaaccatcatgccaggtgcggtggttcctacctataatcccagcacttgatgaggtcaaggcgggtggatcactagaccccaaaagtttgagaccaccctgtgcaacataacaaaaccctgcctgtcctaaaatttttaaaaagcataaactggtcatgggggctgcgacctgtagtcccagactgacctaggaggatagctggaccctgggaggtgcaggttgcagtgacccatgatagtgccattggactgaagcttgatcaacatagcgagaccctgtctgcggccataacccgtccattaggacctgcgatgaacagtttgtgaagatctacttaccacagttgaactgctggtattttgcaacactctatttataaaatctgtgaggccaatcccctaatattagcaaggacgtcaaggatcttttcatgaccctgattac

SEQ ID NO: 693685 - DNA, 1105 bp, Homo sapiens
  misc_feature (690)..(690): n is a, c, g, or t
aatgagagcgagtctgattgagaaggtccctgttcacgtagccgagatgaagaggatgatagatgagaaagctatcagagatgctctcgacaacaaagtgataagaggaacgacactcttggtcaatgcaagtcgaatcccctagacccacgtgaagcatgccagtttgaatccgtgaatcctttggtccttgtataacgcataggaggaggtggtcagtgaacatacggcaccacgtctgggacaacacacttgcattccgagctgtactgagctcagaagagcaacctacctagaacgacactatggaatcacacgtcaactatgattcgcaagcgctacaagatgacaccctagagtcagtcacggccagaaaacctgatgactattaagtcgttcagtcctcagtagacgagctcagatcctacggccatagtggtcgctgaaattccttgtccatggcaagcattctagtagagttgtgatatcgatactagttgtcagaacggttatacacggatgcctacaatggattcatggagccgcgacgaacgcgcggaactaaaatccctatggtacgcgaattacttgaatcctccttgtctgaaacatagcgtgtgctgagtagacgcaaaagacgaacttacagcgtgaatgttgtgacacatggcttccgaggaatgggagggnttcactgacgggaaggagtgcaatagtacatttttaaccaaccgtctaagctcattcgttccccactgaatgccacaaaaccggggttagaacgaaggagggcaaggtccacaccgaattggggcctgacatgtcggcggtggtcttttctcgttacttcccaaaatgtagaacattatttgagcagggtgcaaagccatttgtaagaccaaaccttttccctccaagtccaattaagacaacgaacatttttgccaatttgcgtcctagagggcatttccttacttgcacgtggtaggggagctaagccaccatttttggacaatttgcttacgcaattgtgtcaatgtcgcgtaaaactggaatttacctcgaatggttgacctggcacccggtaagggggcaatactctaaa

SEQ ID NO: 693686 - DNA, 621 bp, Homo sapiens
  misc_feature (534)..(534): n is a, c, g, or t
  misc_feature (620)..(620): n is a, c, g, or t
tgagacctgtggctcgaccctgctgatagcaagatgtcttcaggaaatgcaaaaattgggtatcctgctcccaacttcaaagctacagctgttatgccagatggacaattcaaagatatcagcctaagtgaatacaaaggaaaatatgttgtgttcttcttttacctcttgactttacttttgtgtgtcccacggagatcattgctttcagtgatagagccgatgaatttaagaaactcaactgccaagtgattggcgcttctgtggattctcacttctgtcatctggcatggattaacacacccaagaaacaaggaggattgggacccatgaacattcccttaatatcagatcccaagcgcaccattgctcaggattatggagtcttaaaggctgatgaaggtatctctttcaggggcctttttattattgatgataaaggtatccttcgacagataacaataaacgatcttcccgttggccgctctgtggatgagattatacgactagtccaggccttccagttcactgacnaaccatggtgaagtgtgtccagctggctggaaacctggcagtgataccatcaagcctgatgtcaataagagccaagagtatttctnt

SEQ ID NO: 693687 - DNA, 1029 bp, Homo sapiens
  misc_feature (1029)..(1029): n is a, c, g, or t
tggaagacaagagtctcactctggtcacccaggctgggagtcacaggggtggggatctcgggctcactggcaagctctggcctcccaggttcatggccattctcctggccccagcctctccggagtagctgggaactacagggtggcccgccaccaggcccagctaattttttctattttaagtcatggccgggctaatttttggtgattttaagtaagagataggggtttcaccgggttagccaggagggtctccatctcctttaccatcgaaatccgcccgcctcagcctcccaaaggtgtggggatatacgggcatgagccaccgggcccggcctatagaaatcaatcttttggactcttctacactttaatctcccaatggcccaaggttggcctgttccataacattcattcccttccccctggctaatcagaagccatctcctctacagggtcggaactcgggtcttcatacatgattacagtcatggggtacacagtgctggctaaatctatgccgtaaatcctaagggggcttcaaatttccagggcttcaaaaaacccttgtaccgtgatgtgcaagattcttaaccagctgaacctcctggttactacagtatatggtattgaccgccaaatggtcttccattcttcaattggtgaataagggatctcacacgggttcacgaaggtttaccttccactaaggctgtgaaaccaaggtaaaaagagggcacacggcaagggcaatccggttacccggactctcgccaccagggcaggctctaatcatacgccacggacagcggacaaccctccgggggaagatcccacattggccaactggggacccaaacaactgggggactcccgcaaccaggagtaaagaaggagctctacaacaattaccccgtgagagacacgtgcacacctaacaactgttaaaccaccaaccgcgccgcacagcacgatcacacaacacacagcactcacctatccttcatgacttcgcatattattttatgn

SEQ ID NO: 693688 - DNA, 451 bp, Homo sapiens
gagccccggagtagctgggactacaggcgcccgccaccacgcccagctaattttttgtattttgagtagagatggggtttcaccgtgttagccaggatggtctccatctcctgacctcgtgatccgcccgcctcggcctcccaaaaaacaggaaagggcaatggtatatgaaatggaagattgatatctgaacaaggagtctaaataattctctgacttaattgcaatatcattaaataaaagggatcaaataaagaggtgataaggaaaacattggccttcttaattctctctacacggaggtcaaaggcgactgagggcagaaaagagagcacagggaatatcaaaacagctatggcccggtatgtgatctctcacgccagcagggatccggcacgtaatcgattattcgtcaattgttcagatacgttatcgaggtcgtatgtaatcc

SEQ ID NO: 693689 - DNA, 177 bp, Homo sapiens
gccagatgttggccagtcatccctgagctgaatgggaagctcactggcatgtgcttccgtggtcccactagcaacgtgtcagtggtggagctgaactgcgtctagaaaaactgacaaatatatgacatcaagaaggtggtgaagcaggcgtcggagaggcccctcaaaggcattctg

SEQ ID NO: 693690 - DNA, 113 bp, Homo sapiens
cacgttctcacactctgaggatgactgtctagcttacaaagttcgaccaatactttaatgtagagcttatccagccgggagcagtcaacggtctacgcctattacaagccggg

SEQ ID NO: 693691 - DNA, 1292 bp, Homo sapiens
tgtgttggaatattgttgttgttgattcgcgctgtgttacgtgtgtttagggttttgttgtgtatttggatgttgtgttaggtgcgggttagtggcttgttgggttaggtgtatgggagatggcgtgttgtttgtgcttgtggtgcacgcagtaggggtgcgcgctggatagtgtgcgggtatgcttttgcgcctgcttggtttttgttttggtgtgttggtccctatgggataatatatgggttaccaatcgtaagtgtaacggtggtggtgtgtgatggaatatttctatatttttggctatattgtttatgtttggtaagagtggttgtcccgccgagtaatgtgactgggtaggaagcactgagctgatcctaacgtgttgttatatagaaatctgttgtgctctaaagtgcagttgtaggtggtaggacatttcactgaagggtccctagttggagttggtgagtgttgcggatggtgggaattctgtttgcggtatccataggggtgtgatgttccggtagcgtgttataacggctgaatgctcttgccatgtgggttcctccatgttgtgtttgttgagtgtggggactgcttgtggttgtgtgagtgtaagtcggcgttgtgtgtactgtatggtcggtggtggcccgcctttctatattgttgtttaattcatgtatttaagttatgttagtggtcttatttgtttgtttttttactatatccgtctgaagaagtgcactattgataagaaggcagtgtaatgtatacaaagtatgtagggcgttggcaattaaatatagggtaagtgtttaattggtagataatggagagttactagcagatgtcttgtttatatagcaatggacgaaatgtatcttgtatacggatgtccttaggttgtaaagtctttctgcttggtcacattgggcacatagtgtatgacgttgtttgcctggcctggataataatgttagtatattatgtatgttttttaatagtgtcatctttgatatgagaatatatgtatttttaagcactgcacgctaataggtaatatgcacacagttttattatgtgtgtgtgtgctatattgttttgccatatagttattgtaatactattgtaactgtaacaatattacctatatatggtattttggttatatgtacttatgagtcaagtctggtttggccagactagtatacctcaaacttttagtataatatacagaaggctatcacacttgtgaaattctgcttatacattatctgggatttgcattt

SEQ ID NO: 693692 - DNA, 128 bp, Homo sapiens
tggcccaagggtgatccctgtttacagtggttcaacttttaagttaagggaaaaactttttctttgtagataaaataaaataaaaacttaaaaaaaattttaaaaataaaaaaagtttttaaaactga

SEQ ID NO: 693693 - DNA, 496 bp, Homo sapiens
  misc_feature (309)..(309): n is a, c, g, or t
  misc_feature (329)..(329): n is a, c, g, or t
  misc_feature (383)..(383): n is a, c, g, or t
  misc_feature (454)..(454): n is a, c, g, or t
tctgattagtttatttgttctgaaatatactatatctggcattaatatagccagtcttgctttcctttggctaaggtttgcatgatatatcttttcccacccttttcatttcaacttgcctgtatcatcatatttgaagttagtctctttgtagccagtatgtagttggttcgtgtccattaacctactctgccagcctgtgtcttgcaactggtatacttaggccattgatatttaatgatattgacatggtagggcttaaatctgccattttatttttccttttctgtttgttctccctggtttcgntttctgggatatgctttctntttcttaccttcctgtcatgacttgaacatctttgaggaatggtgttttgcctnatccatagtggcttttgagtatgtctgtttgtataggccctcttgggtttttccagacatttcgtatatcngtggcatctataatcttaaccacacggtattacgggtggtct

SEQ ID NO: 693694 - DNA, 268 bp, Homo sapiens
  misc_feature (178)..(178): n is a, c, g, or t
tctcctggtcactgctattttatgagtggccagagataaaggtattatccctgtcttctatattcaatgataacatatgacactctgcaagaatatagactaagaaacagtttaagttaaatagtgttttataaaaacttgagtctactaacaagtcgtatgatcataattctagccnagcaactggcatggacttacatatggtactctttatccttactactcttatcttttgcaagtacactgagctctacagtgaaacgactag

SEQ ID NO: 693695 - DNA, 342 bp, Homo sapiens
tccggccgtatgattggctgatgacacatgggagagggttgaagagaatgtgggtggtagctgaggacagacgagggccggagtgcaatggctcgatctcggctcaccacaacctccgcctcctgggttgaagcatttctcctgcctcagcttcctgagtagctgggattacaggcatgtgccaccatgcccggctaattttgtatttttggtagagacaggttttctccaggttggtcgggctggtctcgaactcctgacctcaggtgatcctcctgcctcggcctcccaaagcgctgggattacaggcgtgagccaccacacccagccattgcactccgg

SEQ ID NO: 693696 - DNA, 976 bp, Homo sapiens
gtgactggggagcctttggtgttggggtttcttgaagtgggaggagtgtagagtaagttggtctttcccggtgctatacttgcatcctctccatggaagaattgttcaggagatgcgcttggggtgactgacttccttaaatacacgctgtagcggggtgaagacgcttggagtgaccaggcgctttgattgaccttgagcgaacgggcagttcgtgggctggggtgggaacatgtgatggcgggcacactacgactaggggtaggccgcgatgacctgtaagacaggttgcggggagacgggttctaaatgcagggttatggggcgacactcagaaccaagtctaaagtgattctatcttggtacccaaccaagagtccgcccgatctagcacacatcacctgttgtctcacaacaaagtaggggaaccttgtcagtcacataggacaggatatttactcgtactacttcctttctactgaagccacaggaataagctgctattcttgaggcatcccaagggaaacgtgggctagacacaaacgccacatctcattcttcaaggcgcgcacatgtcttaggggttctcagaaattccatattataacctaggatgctcgtgatgggtgggcacaatcccctgaattcttgtccctgggtatcttacgctaacttcactatgacacaattactcctacaatatccattgcttgggtcaaaccgtgttggacttataccatttagagattactaacaccacagcattctataactactcatatacataccacccaactacacaatacacaatattaagaccaaaacacatccaaaaaatctaacttaatcaaatagtatatcacgacactagatccttataataaccatatataatgaaaaaacatcaaaaacacaaatcacacatcataacaatacacgtttcaaaatatatcactatataaaaaacaacacttaa

SEQ ID NO: 693697 - DNA, 414 bp, Homo sapiens
atggaaagtgaggagctgtctctgccctggccgctatcccatctaggcattgaggagcgcctcttcccggccgccatcccatctaggagtgtgaggagcgtctctgtccgagcgtccagtgtctgggatgtgaggagtgcctctgcctggttgccccatctgggacgtgaggagtgcctctgcctggccgtcaccccgtctaggaagcagggaactgactcatgcctgatcagccatcgtctgggatgtgaggagcgcctttgcccgtgccgccccgtctggaatgtgaggagtgcctctgcccggctgccccgtctgggacttgaggcgcgtctctgcctgagcgcccatcgtctgggatgtgaggcgcgccttggccctggccgccccgtctgggctgtgcggcgttgctct

SEQ ID NO: 693698 - DNA, 167 bp, Homo sapiens
gagccggcccaatgtgatactgtgtcagaccttagtttaaatcttgatatgtgcgtgtcccggatcaggaatggttcatttttcttaataatgtgtgtgtgtgtatgtgtgtgtgtgtgtgtgtgtgtttgtgagtgtgtgtgtgtgtcctaattaagggtgttaga

SEQ ID NO: 693699 - DNA, 566 bp, Homo sapiens
  misc_feature (15)..(15): n is a, c, g, or t
  misc_feature (20)..(20): n is a, c, g, or t
  misc_feature (40)..(40): n is a, c, g, or t
  misc_feature (74)..(74): n is a, c, g, or t
  misc_feature (137)..(137): n is a, c, g, or t
  misc_feature (157)..(157): n is a, c, g, or t
  misc_feature (552)..(552): n is a, c, g, or t
tgctgcttgggagcntaccntgtcttggtacccagtgtancttaaattctgagtgcttcctgaagtgtgcatgnttttgatgtatggattcttttctcctaaactcagcagcacattttagtgacccgtgttggtgnctaacctgatttaaaatggnacagtccttttgagcaagcagcattaggaattttaactcatttggaagaacaatcttactggttgtgggtttttcagcaagtggagtatacagcctgggagagtgtgtatcctaattggggctcagaagatgcgttggatgcactgtcctgcagccacccccacctccagcagctgccttggggaggaaacatcccccctgaactccctgtctctggtcgacatgaggagctttgcttctactgctaccttggaagggaaccatggtggttaatgggactattggtggtggagactggaccccttaagaggaactgccctggttgactgggagctgcctctgacctgcctgtgacttggaggatgagagacagttgacttgggagcctccctgtntgagccccagccac

SEQ ID NO: 693700 - DNA, 144 bp, Homo sapiens
ttgtgcacagataattatttggggtatttgggggtgatggaaatgtctggaattctggataatggtgatagttgcacagccttgatgaatatactaaaaacccctgaattcactttaaaatggtgaataaggtatattaattct

SEQ ID NO: 693701 - DNA, 115 bp, Homo sapiens
tgctgctgtgggggaaaaacgggtcttcaaggctgcttcctgccatctagcgctgcccaatggggaagagaaggggatggcacctaagatggctctgcaactccatactcagtac

SEQ ID NO: 693702 - DNA, 279 bp, Homo sapiens
cgccgggcgactctaaggacccgctgatcgcttagggtaacactgcttcccagaaatcaaatattttcattataagctttaggtactttttatttccctccatctgtttcgaatgaatagataaatcgtcactgacagctccctcaccaaattggtattctctcccaaattcccatgacttccaatgcctttccacttttttcctgctttctgaatttttcccgggtttttttcccattagaagttccgtgggttgcttaagcggatccacgggtaccg

SEQ ID NO: 693703 - DNA, 1521 bp, Homo sapiens
gtgacgcatcatagttccttgcgagaaggcgtactatctcttctcctcatgcctatcaaatgaactctatacacatcatcagcagtccctcactctgtcagtgtcctctctactactggcatgactgatttccgagtatatactgcacagcgtcaaaactccaaacccgatagaactgaactaaacgtacatccaagcgatactccaggacgatctcgatggactatatacgagagagaagctactaaatgctaatcacctgtacgcgcgtctgatgctagtcctaagtgcctaccatacggcccgttgcgcataacccgtaacatcctgccgtgtgtgacctatacctgccatggacgctacgaatgctataccattgctcctatacagtgatgccagaatggattagtgggcgacgcgaatgaggaactctgggcacccttcaccgcaagtaacctagtagcaccttagccgagacgggttagctcaagtgcctctgcataggcttgcgctttacctaggtaagccttttgcgctccccgatcttatattccgctcaatggaacccacgagcgggagccatgtgggacccttaccgtttgtaacctggtagcctagattgccgcattgatacaggagtaagctacgccctgcaatatggaatagtggccctcgcgctaatttccggattcagtaacctttgaccgttatcaagcactttccaatcacactgcagctggtgccttttggcaactttgccactaggaacgcttatgtggtagcacacaccatcaattgtcacgcggagtggtacaccaaacacattctatggaatttgcgcacaatttctctcttgagaaagcaagctcctaacacaaaggcctgaacacaggtcgagatactacactcaagcacaggccggttcatcggagcaaacgacaaggagcgtggaaatatcactaacccgaggggctatcattgccctctctttccaaagggtactttgtctgacgcattggcaaccaaccccattcaggttataaacaagaatgccccacaaaataccgatcactgataacgtacacctttaaggtattgccccggcgaatacatcaagagggtcgttcccaggcacatagtatagggggttacacagatcaattataaggggcgataaataaaggttaacaccacgggacatactataatccccccgggttcgatacagttaaggccgcccggtttgaatacgaacaacacaccaaaagcaaagaaactctagggaacacgcggacccatactagagggggagtagagagatatcagtgagacggaagagtagcgacgacgagaccaaaacgagagcggtggtagcacaccaaataggtggtgcaacaaagggacgggagtaaataccgaggagggaagacgacaggagatagacgacgagtaaccacacaagtgtggtgcacaaacagacagcgaggcgagaggaatacataccccggaactagtgtagcg

SEQ ID NO: 693704 - DNA, 404 bp, Homo sapiens
tctgaatagtggtggatgtaccacatggaataatgtgacaggttcctgacgatcatatccctgtcttacattctgcccgccgagaacacagagattcttcctattttataggggacggggtgcaacatgaacatctgaggctgatctccctctggcacatcattcattcaaatctattcactcctctaatggctgttgctttttttattttttgtccattataggtgcgtgtaggaccgaggctagatgacactgtggtacacccatcacaattacccataggatagcccccttctgtcgaatgcccttagactccataatgcctttcagctgggtgcaatactttcactttacccttcgggcttcactttctattcctacgtttactcccattgcatacatag

SEQ ID NO: 693705 - DNA, 250 bp, Homo sapiens
aaaaaaacaaaggctctctcccccccagccgggtctttctctttgggggcccccttagttattgttgtgagcaatggaagttcaaaggaaccccctctccagcttttttgaatcttgggacccagcctaaaaaggccaaaaagttagaagccagcatagcaactcagctcagggagctaccaaagaaaaaaagcaactgatgggggggcttttttttttttttaatttgaataaaaagaattagaagtga

SEQ ID NO: 693706 - DNA, 152 bp, Homo sapiens
tccccaagaatgttttgagttttttgaaagaccccaatttaaccctggcttatttttaaattatttccatccagtgatgtgggatggagaccaattatttagtaaatattctcaataaattttgagctgtggcctttgttaaaaaacacgca

SEQ ID NO: 693707 - DNA, 272 bp, Homo sapiens
tcagctatccaagtcatatagaggcaggtaaagccgggttaccaggccgggtgtgcggaaaggagaagcgggtcttctggggtcctgtggtcagggagaacccggtttctcaggtccttgacgcaagggtcaatggtttcctctttcactttctgcattccttcttcaactctttccgaaagcttcctgttttacccctctgtagggtccgagtaatacacctgggcgcgtgagcggtgccaggggatggggtctcggcaagtgggtcaccg

SEQ ID NO: 693708 - DNA, 355 bp, Homo sapiens
catttcaggtggagacacagaagggaaaaatccagtaaatgattagaccttgcacagggtcacagattaaattgtccgagtaatttcatgcatctgatctccttgtgcgtaatttagacacttaagtcagcccatgtatatttttaggttaaagagatgctgcttgatagataaatgcccatttgagacccaaattctatttgaacttcccttttaaaagtataaaattctttccatcatcatatacaaatgagagtatagatggaacctctaagccgagtaatttattttaattaggctcattaagatattacacaataggtctccttatactcactcagtatttaagaaatct

SEQ ID NO: 693709 - DNA, 387 bp, Homo sapiens
  misc_feature (5)..(5): n is a, c, g, or t
  misc_feature (30)..(30): n is a, c, g, or t
  misc_feature (74)..(74): n is a, c, g, or t
ttttnccaaaacaaaacggtttaaaattgncctttcaccccaaaccctacatagttaccccttaccctctgccnctttatttccttcatcctggatgcaagttaaatgtctggtgttcctggtcgggcgcagtggctcatgcctgtaatcccagcactttgggaagccgagtcgggtggatcaccctggggtcagcagtttgagaccagcctggccaacatgccgaaaccctgtctgtactaaaaatacaaagattagccgggcgtggtggcgtgtgcctgtaatctcagctactcaggaggttgaggcaggagaatcgcttggacctggtaggcagaggttgtagtgagccgaggtcgcaccactgcactgcagcctgggtgacag

SEQ ID NO: 693710 - DNA, 614 bp, Homo sapiens
aacgatggtctcagctgtagcacagttgcagatggaggggtcctgggggcgttgggagggggcccccagcgagacactctgcgcactgcagacgatacgatgcgacagtgacgagcttccagaggtaccacgaggcctgtaatacacccttcgagctgaacctgtcaggggaacctggaaaccaggggttgcggcgagtggtcatcgatggcagcagtgtggccatggtgcatggcctgcagcacttcttctcctgccgaggaattgccatggcagtgcagtttttctggaaccggggacaccgagaggtcactgtgtttgtacccacctggcagctgaagaagaaccggagggtgagagagagccactttctgacgaagctacactcgctcaagatgctttcaatcacaccctcccagcttgagaatggcaagaagatcaccacctacgattataggttcatggtaaagctggcagaggagacagatggcatcattgtcaccaatgagcagatccacatcctgatgaatagttccaagaaactgatggtcaccgatcgcttgctgcctttcaccttttgcggggaatctcttcatggtggctgatgactcctg

SEQ ID NO: 693711 - DNA, 1003 bp, Homo sapiens
tagactacttgaaaaggcccctaaaattaaaatgtacatttagcatatgcttctcacattcctccagatctcagtggttctagtgagatctggaggaatagtgggaagggtatgctgaaatgaaacttagatcagaaataaggaaatcggccggaacttaggttacagggataaggtaccagcaggcccaagacgtccaggaacaacacgacacagaggaacgagaccatggacagccgagaaagagcagaaaactcgattcaaaccgggacgaaatggaccctgaacgatgaaaagcatatacaagagcaactacagaaaaatggaggtacagagaaaaaacaaagcaagaaaagcacatccccgcaagaacaaacagagagcaaagaagcaaaggcaaccaatcaacgaaggacacaaacacggaaccactaaccaacgacactgcaaaccaactgagagaagaaaaaaaacacaaaagtacacaaaccaacatacacagaacaaaaataataaagcaaaaaacaaagaaacaagaaaatcacaaaagaagaaaccaaacaaagacagcaagcgagcaagacacaacaggcacccaaccacaaacaaagggcatacagcagaaagaaaacgaacaaaagacagtacaaaaacagcaagtaggacaagacaatcaaaaacagaccatgaaataagaagacacacatctaataaatgtcaccacatggggcaccagtgacaggaatcgcaagaagaacatgtcctggatagagctggtctactcaaactacacaagctacgaaacagatcaaacaacaagccaacaagtgcacacatggataggactagacaagaccaaagtgagcacgaaagcagctaggcacagacacaacaagcgataaggagtatcaacaaaaatcacaagaagcacgagatctacaaggagaaccatcacagcatggcaacgcatatcaagagaacaagtcgataacacgaagagaca

SEQ ID NO: 693712 - DNA, 186 bp, Homo sapiens
ccgctggccaatggcataacgggccagaacattggcattttccatgatggcgaggctgagggggtgtgttccccaactcttcagcgacacaactgccactctggcggaagtcgagctccgtcgcttcttgtacttgggcacagcgctcatgacagcccatccaaccacttgggtaggtagtctcgc

SEQ ID NO: 693713 - DNA, 307 bp, Homo sapiens
gttcaatttctacagaccctgaaggctgaaacataagtgaggcgcaatcggcaaaggaagttcgacatgtaggagaaagtgaacgtgtagaaagtgaaccaatttctacacctcccctcagaacttcataagggcaagatctttagttccgttcacttattgctgaaaccaagagcacaatgcccattgagagaaagatctctgtgctgtagactataacaaatagtgcattccttccggggccgtcgtctttgtctgcttattggtcttgaagtgaattttaagaggagatatatactagaaatgt

SEQ ID NO: 693714 - DNA, 1051 bp, Homo sapiens
  misc_feature (140)..(140): n is a, c, g, or t
ggcgtcctagaggcatccggtggcagttggaaccgctgcgtatcgcggaggcggcggccaggccgagaggctggccgggcatggggtgtcgtgatcgcagtggctgctgggccgggtttctggcttcgcgccacaggacntatttcttattctcaaggtgcaactgacaagccattccacagcgtattactgatgttagtccttctggatgtttggggagttgtctcttgaaggccaacgttcttgatgagttaattgacggatgaagcgacgcgacactatgctacgaagttactgactgactacactgcacttcgcctgaacttctgacgcgactgatcaatgggacacgacctctgattacgtgaattctcctacaacgggctcataattcagctgaacgaattgtattgacacgaattgaagaacccaacttggtgcgaaagctttgggcacacgtggccagcgaattgcaaaaaaccgaacgcgacagcgaagacattctctggaaacggactcgcccacgaattaaccccaaagcgcaagcgggcaagcacttacccgtgcacgcaagattggaaaacccaattacttgcacttgaagttgcacagcgcaacacttcctcggaaacgcggctccacttggaacagcggaacaaaaatctgcgaaggaattcgccgtttcctctgtccgttaggccccacacacacacgtttaccacagaaaacccccaaaagattaagaagcggaaacttccgaggttacgcgaaccttgtattatacccccttggtccatacagacaccgccttctgcacaaggcgaaaacgccaaacgaaaccctagagggagtacagcacaagaattactacgtcacaaccttccccttcagcgcaagaaaaattcttcagttcacgggaaatttggcgactcgggcagccttgggcggaattccatggagcgattgattgcgccacatttaactttacattccaacgttgggaacacgcttttacacacaagaattataaacatttctgccgacgcacaca

SEQ ID NO: 693715 - DNA, 635 bp, Homo sapiens
  misc_feature (428)..(428): n is a, c, g, or t
  misc_feature (463)..(463): n is a, c, g, or t
ccgtgattatctgttccgagggctatgaggctcctgatgccaccatttactaagtgtgcttgctgcacagtggccagaactatggatatcatattacgccagggccttcacgggacatgtggacagtctttcagctgatgataagcatgacatgcctatggtcacacttatgattggatctctatacttcagcattcttgtgcactcagcatattgcatctgacatcgaaagatatcactgagacaagatacgatggactctaattggcatatcttgcagcctacataataggcccttgaggcaagatgctggagtctgccataacattactacatgcagcagagaactcagacttgttcaccgagatcggatacatagcaggcttgacaagatgcatgtgcagcatgtatgttagaagtcaatcctncattccaatcatgccttcagatgactgcaggcttngccaacacatggggtacgacttgaccagacactgtatgccatgaacgatcatataacatgcttctagattcttaccctctggaaactgtagactataaatgttcgttgtccatgctgtcgacgtagtttaccaacgtggaactgtgaaaccctggtgtccccaactaattaa

SEQ ID NO: 693716 - DNA, 318 bp, Homo sapiens
cacagaggtgtgcccaagttacattagcagcatgatccaatattatagtgaaggagtgtttctgagaagataaacattgggtctgtttcatctgtaccactgaagctcatataatgaagtgttttatacattagcaatagttctgtgtcatttctaggctagataacatcaaaagacactgccttccatcctcagagggttgacaacatcatagaaaggccctaagtgcaatctgagtgtgccttcaccaatgctggttgcatgatcttcttttctatgatcccaaaggagctccctatgggtttttagcacaaaact

SEQ ID NO: 693717 - DNA, 591 bp, Homo sapiens
cagtgtctctgtgctccagacgcatcaggggcttggtggggtcggagccaggagcgcgggctgctgaaaaagaccaggtctgggcacctttctactggcgcttcagtagaatcgtcagaaggggggcataacctggctcctggggtggagcaccgaggatgatggacaaggtgctcatctatctctgtgcaaccgtacacgagggaggtgctgcagtcactcccgctgacggaaatcatccgccattaccagtggctcacggaggagaatatacctgaaaacccatggtgcttcctctatccccgaatccccggggatgaagctttggggtgctactaccaggagaaatgttaatctccaggaagggaggaaatacctgaaacacaggctcatggtggtctctaatagacgggtggatgaactggaacaaccggtggagcttaagccagagccagagttggagtcattagagctggaactagggctggtgccagagccagagctcagcctggacttaagagcattgctgaaggcaggttggatctggggccagactagagtctgtggggagtcactctgggcctgtgaaaa

SEQ ID NO: 693718 - DNA, 335 bp, Homo sapiens
atgtgtggtgctggctcatacctgtaatcctagcactttgttaggccaaggcgggtggattgcctgagctcaggagtttgagaccaacctgggcaacatggttgaaaccctgtctctactaaaacataaaaaaaatcagccaggtgtggtagcgtgcacctgtagtcccagttacttgggaggctgaggcacaagaattgcttgaacctgggaggtagaggttgcagagatcatgccactgcactcccagcctgggcgagcaccaccaatacagggagcaccaccaatacaggagcaccaccaatacaggtagcaccaccaatacagggtaccga

SEQ ID NO: 693719 - DNA, 1135 bp, Homo sapiens
  misc_feature (1)..(1): n is a, c, g, or t
nggtgggagcttggaaagggaatcattagtgtggtgaacgtgcccttctgggtggggaagttcccacttggatagccccggaagtgtcctcttgtctaaacccccctgtgtactggatgaatccatatgtcacgtcccaagaacaggtaggccgcaatccgaagagtgtccaacaatagaacgttgttcgaatccgtccggtttatacccaaaggggggacgggcggtggcctcttgggtcggtgcacggcgtcgtgtgggccatggaatgttagttcgctgtttggtctccccatttaacccacaggatgtcagcccacatttctggatgcttctcagaccgctgtgatcgccacgctgggttcgcatctctgtaggaatgacgcgtttcatgcttcccgtccatgtcctgtctggaccaaagtcgcaaacccactgacaagatcatgatgcgagcttctccgcgaccacgtggggttccttcgtaggacatgatcagatatccacaccagctacttcaatgcacaccgtggcccccaggtctccatgggacccagttggctgctctgtctgggatgtggacggtgaacgacttggacggctttctaggcgtaggaagcccaaagcagacgaagcttagccatagaacgccactctggacgggtggtagcgtgactagactgcggatagggcgagtacgctggaggtccagaggtgggcatttaccatggcacactggacctcccttgtgtctggaccttctgttgctggattgacatgatgaacacgctagatcctataacccagatcatagtccctgttcgcagcaacagtcgggctggagcatggaggtccatgagtcgtaagcagagctaagcaccaggtaatagagaaccgaatactgcatattctcatctgtacaagtaggagcgtaaacatatgtagatatacatagatactaggaggggaacagcatgacactggggcctgattgggggtggagggtcgggaggagggaggatgagacataaaatacccatcaggtactatgctgcttacctcggtgatgcaattagtctgtacaccaaatccccatgacacagagtttatactacatgaagcaacctacaacatt

SEQ ID NO: 693720 - DNA, 604 bp, Homo sapiens
ggctggggcagtggcagtgaatcggatctctgcagctggcgagagcgtcggcggcagctcagccgtggcagcagccacgcagtcaggcctcggctaacgcccggggctccccccgcccacccacgacaaggctatacagtggtggggggggcaccgggggacccctgtccggagctggtgcgccccccggaatgacaggcacgcatcttccagaaggctatggggaacccctgcgagttcttcgtggacatcatgtgactcgtggcgcatgccccagacctgcctgaggtggggagctggcggtcctgccgcatgcagagctcgcgtgggcttgccttcgtgggggccaggacgggaggcaggtggggggcaggctggaccacagcatctgccctggcagcctggctgctccagctcctgacagcacctgtgtctgagcagccgtgtgggggcgctccctctctgacctcagcgagaggctcggaactcccaagcccttgtgtctggtggggatccctcctgggatgaggaagaccccctcgggtctcggttgaccccactcctgacaggtgtgccaggaccccagggtggtcacgcggggacc

SEQ ID NO: 693721 - DNA, 1187 bp, Homo sapiens
ggcccaattaggcttggcatctgctctgatgccagatggaaaatacactttgcatggcacctgtgagtaatagcatttgctgagtgatactctcatcatggatcagcgcctccttaagttcagttctgcagaatcacatatagagagtaaagctgtctggccttaatgagctttaggcaacgggcaaatactggacaagcatcggaggcaaaaagactcacgagtctgtcgtactatcgtaccagcttggtctgcattggaataacttcaatgcactggacgaagaggggatgtaacgcacagggatgaatagtggtgtgattgtctactatacttccgccgaatgattcactcaatgccacgcagtaagacaagtcgactctcgattgaaacataagtttcaaaaacaaggatcacagcgacttctagctagctttgacctcagtcactaaccttgaaaagcttgtgggaactgttgatactgagtgcgtccgtggacatactaagcctgtgatatgactcgggactaggttaattctagtagttcaaccaaatcgcatcgtctatgctcaatgggggaggttagaacgtaagctaggacatgtaaccaacaggaaactgtcctcgtagtctccgtggaactagtaatattgtcgtctttttcctcagaccatttcatcctatttatttcatcctggaacatccacaggcacgttttcgactcttgggaaaaacagtgtattgtgaaccctgggatgataagattacgtccattgacttcataacaggactccgaccaacagaagggaacagtcaataaaccattcctttcgctcgacatacggaagggttcttaaattggagttgaccttctgatacttagggttggtaaaacttgaacactttggtacaaagtctcagacatgatgcacatgttcattgtaacagttccatttggtagcaaccaccaataaatgggatctggttaacaacactccagtgagtttgcgttacggaaatagaagactcccgtttcttacttccccgagaggcagtaaggcacccaccctggttatcgggagcaacatggcaattccaatatgggccttgggcaaacatctatccttttaaacttaaaagcaatttaaacgttcccagcagcataaactcatttcgcacaagtgtac

SEQ ID NO: 693722 - DNA, 872 bp, Homo sapiens
tactggctaggtagccaaggcctgggtttagctttgggaaaggacaggtgcctgagccctgcatgtgtgagccctcccaccccagcctccagaatagagggaaataaccaaaaaactaccacagcaacagaaacctcacacgtctagacttgaaaccccaaagtggtgtcttgatgggtgggttttgttgtttcaagggtgaaagtgaggcagagtgttctgaaaagggtctctgatatatatagttgttcatgtagaccatagtgcacagtggtagcagaatacttaatgcctggcctccgcgaaatgcaccctgacacacacacttgccacacctgacgcatgattctatgttgtagtagcgtgcacccacccaaggttgtagtaggagtagcttggcattgaaggcatcactgagagacagcgtgaagtgcagccttgtgggaatacttgatgttggctaggatggaccagggtgttgtggagggtagggcggcctctcatgtgcagcacattcaaggaggtgaaagacaaagagagcacccatactcccatagactatctaccttgtataggcaccactttccttgcattccatagagaccacacagcatccttatgacctctttgtggcagccaccctaataatggtcctcattgtggcatactcgtacctatttgtacccacacccaacgcataccaatggtgtagcagtcccccaaacccgtaccctacatatgagtaacctagataacttatgttacacaatagcataaacattattgggaaaacactgttaagccaggaagcaaaccaggtccaaggaaaactgtacacaacacaaggggtcggtttgaccaaacatggtacg

SEQ ID NO: 693723 - DNA, 524 bp, Homo sapiens
gaaataaggatatcctgggtagccttggttagagtagttctggtggaatggtagacatggaagtcacattctatgggttgagaagaaaagggagattagaaagggtaaggagtggatgtttgagtgcaggaaagacctagaaaagctacagagcattttctaaaaaaggggagcattttttagaataaaagagatttgagcactcctttcatttactcattcatttgctcaagaaatctttacaggccgggcgcggttgtcacgcctgtaatcccagcactttgggaggctgaggcgggcggatcacgagttcaagagatcgagaccatcttggctaacacggtgaaaccccgtctctactaaaattacaaaaatttagccgggcgcgttcgcgggcgcctgtattcccagccactcgggaggctgagccaggagattggcgtgaacccgggaggcggagtcatatttagctctttagtgctccacttcattctggcctgggtgaaagagcgagatccgtctca

SEQ ID NO: 693724 - DNA, 654 bp, Homo sapiens
  misc_feature (181)..(181): n is a, c, g, or t
  misc_feature (276)..(276): n is a, c, g, or t
aggctatcaccactactccgtccctagaccctctttctcacacctctcgtccggggggtctccatatgctatcagtccttctgcacgactatgtataagcttatgctgtagtatccccttcgtgtggaatcgtactatagtagtcgttgtagaattcggtgcggtacgctaggtagagttngggaatcatttgcacaagttgcaatccttggctgccaatcatccgtgaggtaggcccctactcctcgagtctcggtgtatcacgctagactacgntcgtttactaatagaatcaggacatgtggtgatgcaccggcaaacgattgctggccgtgactgaacgaatacttgcatagacgattctggtttccagcgccaacatatatatagacaatggctgatcgaccttagatgccgtgacatacgagccggggcgtcactgactgtctggcgcagcgagtcgagtggcataggtcaagcgcatacattcaatagcacagaaccagcagagtcatccccttttcctgagccagagtgcaaggaacactgtgaactgtgctttgttcagactgggatcaggtaggggggcagcccccagtccctgtctgtcccagctcagttttccaaaagacataccacgtagtctctctatga

SEQ ID NO: 693725 - DNA, 231 bp, Homo sapiens
agtagtgacaatacgccagtatttgtccctactaagtagacagccttggtggcatgccatatggatagtaaatcctccgctacactacctaactagagcgggccccatcatatggattgaacagagtcgccttaaataatactagcatagaaatatggcagactactataggggaaactaggacatatagacaagtaagctataggctagatattgtactaatctactact

SEQ ID NO: 693726 - DNA, 450 bp, Homo sapiens
  misc_feature (205)..(205): n is a, c, g, or t
cccttttgagatggggcaagcggggtcgctggtgcccagggaaggaccaacccgaagcgggcgaccgggtaagaagaagagctgactaaaaagttctggaaactgggcgccctctttgatctcagtctctgcaaaagcacatggactcactttcctgaaagtccaaagacagccgggcatcctccacgtgatcttcaactatgtntgctgccttcaattcttccgcaggaacataagctgccgagcgccggggggccggctgcttcctccggggcaggcggctcggccgcggcagccgtcgcctcagccacaaaccggaaaaaacggggcgcggggacgcggggccccgggcgcgggcgcaactccgcggcgcgcccaactttggcctggtccccgcgggctccgggctccgggcgcgccgcggaccgcggggagccgctcgcatggacc

SEQ ID NO: 693727 - DNA, 573 bp, Homo sapiens
gcagtttacagcgcagggaatacagattattctctctgaggcagatgcagtggttacacctgctatcccagcactctgggagaccaaggtaggcggttcacctgaagtcaggagttcaagaccagcctggccaacatggtgaacaccctcatctctactaaaaatacaaaaacttagcctggcgtggtggcagctgtctgtaatcccagctactaaggaggctgaggcaggagaattgcttgaacctgggaggcagaagttatagtgagctgagatcatgccactgctttctagcctggatgacagagcgagactctgtcaaacaacaacaataaaaaaaaaacaaaaacacacacacacacaccaaaaactgcaatggcagagaggtggatatgagccatgactcaaccattaacatggcagggaagcagacaattacctacaaaagtaggcctgtctacctaaacggagaaggtctgtccctaccatagaggacgacaatgatattggtgggcatcaccaaagtgtatgtgtctattggcagcttaccagtgtcataatggctttatgctt

SEQ ID NO: 693728 - DNA, 224 bp, Homo sapiens
gcaaacctccgacactcctgggttcaagccatatcccctacctatagcctcccaggtagctaggactacaggcatgcgccatgatgcccagctaattttcgtctatttactagagacaaggtttcaccatgttggccaggctggtctcgaactcctgatctcaggtgatccacccatctcggcctcccaaagtgctgggattacaggcgtgaggcgcaatcggg

SEQ ID NO: 693729 - DNA, 198 bp, Homo sapiens
gcggattataagcggtcatatcgtattgacctggtgcttgtcaaactcctgagctcaagtgatccacccgccttggcctcccaaagtgctgggattacaggattgagccaccacacctggccatctataaggattctttaatcataaccacaataccattgtcatctgaaaaaagtgaacatcaattccttaataaaa

SEQ ID NO: 693730 - DNA, 222 bp, Homo sapiens
tgaaattataaaagaaacacattgtggaaagctttattaaatacacagtacaagccactctatgttgaaacctatttttccacaactggcactggaagagtgatgtcatggatacataatgtgcaaaggatgagtggtgatgttgggagtgagttggttttcctttgatagaatccattttgaatgtggagcgcggaaatgagggggtacaatggggaaccg

SEQ ID NO: 693731 - DNA, 551 bp, Homo sapiens
  misc_feature (22)..(22): n is a, c, g, or t
ctcttttcaggagaggacacantgtgcccgtgttcccaaattgattttgccccaggaaccctgtgacggttgtggggcaccacgtcagcccccctgcagagcgtggaagggacgttgccctccccacccccaaggctgccatcaaccaatgccatccctactgcccccggcaggacagggagctggaagctgtgacaccccattttaaggggccacccattaattaattaggctccatgaataatgcatgccaccttgggtatattaatagcatatttatatggtgtgctatggggagtatacattctcgtctgaacacctcacaaataattcacgacaccgctccttccccagcctccaggagatcctggccggtgctgcggctggggctggtgggctgcttcccacagccaaattttacatttcattataaatggctttgctaggcatgtcggtaactcgtgcatttccatccactttattattaatggctttgctgaactgtagcagcccaacgccgcgcacagtgcgttataaatatttgatccggc

SEQ ID NO: 693732 - DNA, 413 bp, Homo sapiens
gagtcatcacgtactatgtaaatgtcttgagtacttctatagggatgggcataatgcacgtggctctccctattcaggcacgtctagattcaaagagcttgaatgaggacgtcacaggtttcgtggctccatgttatgacgaaagtggccctttatgaaaagcactgtgcaaaatattaatttttaaatatctttttaacaacataggaaaggcattcttctacttttgcaaaggaggcagaaccaaaatctgtgaagaacctttggctatacagacaccccacagggaccaaatctcctgccccatcacacattcctgggaattaaaaagaatggagaacgtttacaagctgctgtactttataattgttatttctttgaaatgattctttttctttgtgagaggaaaataa

SEQ ID NO: 693733 - DNA, 145 bp, Homo sapiens
cgttgctcggggtcatccgcagtcacgtcggggccatccggcatcaggccgcagcacacagtgttgtgcggcacagcaacagttcagcatttcacgccgcataccatcatgcatcagtgccccatggcattaaggcagtcagtaa

SEQ ID NO: 693734 - DNA, 320 bp, Homo sapiens
acctcctaccccacgttcaagtgattctcctgcctcagcctccagagtagctgggattacaggcaagcgccaccacgcccagctaatttttgtatttttttagtagagacagggtttcaccatgttggccagcctggtctccaactactgacctcaagtgattcacctgcctcggcctcccaaagggctcgaattacaggcatgggccaccgtgccgaccacatgctcttatattaacaaccagtatttactaagcacatactatgtgccaggagatagtctacatattccatgtctattagtattcttaatacttgcag

SEQ ID NO: 693735 - DNA, 477 bp, Homo sapiens
  misc_feature (193)..(193): n is a, c, g, or t
atcctgagaggcaggaactgtgtgtctgatgagatctactgcactgtgatgaaggggaggtgagctcaggcagtactgaaggtgaggggggcgtctgtaaatactgatgaagctttgcttggttgcgggctgctcacctcctgttttgttgcccagttcctaacaggccatggactgttacaggtcccatggnctgggggctgtggagccctggcttagaaggtgaagtctttgggcaggggcagtggctcagacctgtggtcccagcactttgggaggccggggcgggtggatcacgaggtcaggagatcgagaccatcctggctaacacagtgaaaccctgtctctactaaaaatacaaaaaattagccgggcgcggtggcgggcgcctgtagtcccagctactcgggaggctgaggcaggggaatggcgtgagcccgggaggcggagtttgcagtgagccgagattgcgccact

SEQ ID NO: 693736 - DNA, 562 bp, Homo sapiens
ccggaccgaccaaagcccgcgcgccgctgcatcccgcgtttcagcacctacgtccctgctgccgtcgccgccgccaccatgcccaagagaaagtgctgaatggtgtgatgctaagtggagataaatgcaaaggtgaagtgacgaaccacagagaacgatccgcgaggttgtcttgctaaacctgctcctccaaagccatgagcccaaaggccttaaaaaagtgccccttgcaaaagaaggggagagcaagggtacccaaatgggaacaaatgggaaaatgctgattgctgtgcaagtgatggggaataacccttgcagaaaacatgtgagattgccaaatacagaaccaagtggcacatgaaatgcttgaatgtgttgcttgggaagattgccaaagtgaaagtggttgttgcattttttggattaacctgttgtactttcttggtgactgtacaggtttggcaaattactattttttattcaagtttttataagaaaattgccagaatttttgtttttactttttaataaaataattattttaaacaagcgccaatttgtg

SEQ ID NO: 693737 - DNA, 224 bp, Homo sapiens
gggtgacacagcaagactctttctcaaaaaaaaaaaaaaaaaaaaaaaaacattataatttggggctaccccattttcaggggttccttagccactttgtggcaggggtttttggtttggaagggggcgggctcaggggcccggcctgaaagcctgtgcttccccggggggccggagatttctgcccgtctagaggggggggggtgggcgttcagaaaaccctt

SEQ ID NO: 693738 - DNA, 439 bp, Homo sapiens
  misc_feature (292)..(292): n is a, c, g, or t
  misc_feature (396)..(396): n is a, c, g, or t
agaaaagtaaccaaacatgaaaaacaaatttgtagatttcagtattaactgatctgttttgggatgtgggtgacagctttgattttcaggttaccttatgaacacatttgctagcatgggaaaagttcttcactgtccttggagagaactgtatgccttacagtattggtactagccctggagacagacctggatgagcagttccatcatcctgtttgcaggggtgaactacaaatttcatctttgtatcttttggttaacttcttggctaaggtaacagatttatatttanggacaatgaagtcacttttccattttctgcatcccaacacccccagctcacatgttgataagcagcatagtatcaacacagtacactttccttctactggaggntgctcctcctgccccttacgtctgtaggcacacagcttgaagg

SEQ ID NO: 693739 - DNA, 184 bp, Homo sapiens
ctaagatctatctgagtgatggtgagtgattggttttggtggatgatagatatatatgatggtgtgtcggtgggtgaatggatgattagacagaaggatagtgtgatggatggatgaatgaatagatgtgtggaaagtagatgtgtaatgaatgggtagatggatgagtgcatagataagtggg

SEQ ID NO: 693740 - DNA, 932 bp, Homo sapiens
ggagaactagtctcgagtttttttgttgttttttttaaacacttaaaggatggaacctaattcctctcccgagaaccgcctccttgtgtgttaatgcctattcttacaacagagaaacaagttacatttaattattataaaacgagtttgactatactgggggtataaaactcctctatcactcgtgtagcacaaccgctccttccccacaccgctcgaggggttagtgcaaagtccctatctatctatagccatctctccttctcctcctttcaacaagaccagagttttggggggatcacactctttcgtcccttaggggctataaacttccagaaattatggaagcgggcgcaaaagacaccaacgaggaaaaaaaccaacccacacacaacaggaggacaatagtggaaaactctttactccccctatgtgtgggtattccacacagagtggtccccgcggagaaaagagagagagagacacgtgatacagtgtgagaagcacacctcgtgggagccccgggatatacgacgcaaccaatacgcacttcggagaatgtgtggcgggtgtgcgcagcccccgagtgacgttggacccgtggggcgcgcccccttccgagagagttgtctcaccagggtgtccccgcgcaccagggtttgcgaggtgagggtgtgttcgcacagcccgaggggttcacaacgcgtccctctctctttcctcatccctattttcccctcggcttcccattcagtggtagggacctatgtgggaggtactcccagtgtttcccgtgtcttgtgtggctcccttgtcgctccaacgcgtcttggcggcacctccctcacgggggcgtttccagcaatattgtggggctccttgtggagcggccctcccctggtatgggtcccggtctatctgggcgttacacg

SEQ ID NO: 693741 - DNA, 816 bp, Homo sapiens
agcgggggccttcgccggcgccaggagtacgcggggtagctgcgcaacgtcggccctcgctagcgtgcccaggttcggcccgtaggcgtctggctgaccggagccacttcttcatgacgcgtccatggccggagactgcggggcgtcggcagttcaggcggggtacgtgcattgcatcgcgtcgggtgtgccttgtggtgttcctgagtgaaccagagggtcactgacctgggggctggaacagaccctgaatgaactgtttagcgggcgcgaattgtgagaagcgtcatttacccttcagatagtggatctgctgataaacgaagactgcgggaaaaaggttggagaatacgccaagttcccaacagagatgcgaacaaggtggtgcggcaaaggctaacaggactgaggaagaggtggaccaacatttggttatccccctgataaatttcaaataaagaagatgctcccgggaaaaacaagagggcgtggtacaaatcatcgggtaatacaagggttgaccacgggggtgcacaacattggttaacgcaacagagggaagatatgagaaacgtaattcgtgccgggctaaccaaaagacttatttggggcagagccagacaaaacatcgggtgggagtgcaaagggaacgtggtgacacaaggagggaggaattagaaggccttcccaccattgtaagaggaaacccaaaagagaaaataggttgctttacaaagaaagcgggtgcgtcataagggggcgtatggggagaataattacaaaattaaggaagaaaatgaggagaaaaacacttta

SEQ ID NO: 693742 - DNA, 108 bp, Homo sapiens
ggaccagcacaacctgatctttttcaatggttttatttgcttccagcacaacctgggcacaacctcagcacaacctcagcacaaccccagcacaaactggggggatct

SEQ ID NO: 693743 - DNA, 283 bp, Homo sapiens
cggtaccgtgaaatcggggcaggcgacaccctcacgcccgcagcgccttccacatcccccagttcgccaaagtccatgttacgccgcatcaccagacccatgcgcaaacgggtcggaacggggcggtgataaccagtgcgcgagcggggagcggaagatttgctttgagcgtacaagacgtctcctttgtgggtttcaataaaacgacaggtcatgcgacccatgtcgccgaaccaccgtcacaactgatcagaaaaatgaaaatcgacgggatcaatgatcg

SEQ ID NO: 693744 - DNA, 1071 bp, Homo sapiens
  misc_feature (1035)..(1035): n is a, c, g, or t
gcacgagatttgtgcttgtggttggagttgaagctaaatgcgagtttaagtttgagtttgaagttttcttgaacaactttgaagtcttgttagccaaacgatggaaagactcaaatccaggtgagtgtttcgcgggtggtggaatgctatcgtaattcatttgtgatggtgtagatggtagaaagtctaaggagtcatcacttgacctttgagaactattattagtattgccactgaagttgctatgtcgcttggggctttcatcaaacgacgtggacttcttatgggcttttatgaaagaccgcatgatgaaatattccagttatgcgtgtgcgtcttgtgatgcagatccttttgggcaaaaacagttggtttgtgcgaaaacgcaaggtaataaataggcttaaaggaactaaaaaaaaaaaaaaaggaaaataaccagctaagatttaaggtacaagaaagcggttgcacctcaagtaatgatagttattaaaccttggattggaccagatgtttaaaattgttttcaatagtagatttgcagtcgtaaatgcgtgctcagcaatatcatattgtgtttatgaagtattaccaaatgggtagaagaacggtttaagagaatatgtccggataaagcgatcaggagaaaagcttaaaacccaaagtggtcaatctgcagcccatttaggcactctgcatttaactgatacccggattgaagaaagctggcgggtgtatgggtgaaggagaagaaaggaagtgattaggagaaacctcatggagatgagcacatgctacaactaataacgttattctacttaaaacgagaaaaacaaaaaaaaaccaagacaattgaaaacgcaatggatgcattcagcttaaagaaggataatcgaaaaaaatttcaagataaacagaaattgaaaagaaaacatgccacacccagtgatagaaagtaccggctattgaaccgccaaaaagaagagaaagctaccacagaggagaaagagcaagaccaagaacagcccgccngaagtcaaacgaggacaggtactatgaggacccggt

SEQ ID NO: 693745 - DNA, 309 bp, Homo sapiens
agacagaggcaaaaacaaagaccagtgcacctataagtgattatgtcgaatgactatcgggtgtatgacagggaagtgaaatggcaccgtcatggtgtgctgaaatccggcacgttcttgtcacacgtggtgagacagatgacagaggaaggagtagagatgcttgttgagcatggcatgatgtgacagcaatgtgttgtatcaactatgacgcgtatgtgaggcatatcctgtcggggtgacgggcccatggtgcggagctcgtccgcatggtgctgactgtcttggtaccttcccagtctccccaga

SEQ ID NO: 693746 - DNA, 962 bp, Homo sapiens
  misc_feature (1)..(1): n is a, c, g, or t
nccgtgtatggctgtgtgtggtgtgtgttttcgtttctgctcgtttgctacgtccgtgccggtggttcatgttggtctcgcgacggcggttttggtggctgttctcgtgcattatgactgcccggtcgaacttcgggtgtccgtttccggcggatttttgcttttttccgggcagcccttgttggtcgcactccgtccggaccccgctcccgtgtgcctcgtaagttgggccgccctgtgtgtccgcccgaaatcgcccgggtgtctctttgcgagcgacgaccgggggtgtgtacagggtggttcccactccccgctgcgcattggagccggcgtgtgccctctagttcgcgcggcggcggagacccctgcttgttttccagcgcggggccccctttacttcttgacttggcctcttttttttgcggcatttcccccgcccctcagggtgctcccacctgccgcataagtcgtggcccctccctggggctcctccctctgctgtcgccagcgttgcgcggtctagtgaaagctatgatgcacacggcggtccacccatagagtggggggttcttatatactgtggacccttacccgcgcgcgggcactatgcctcagttagctggtttgtcatgcctgccccatgtcttcttaaagttttcccgacagccgtctgggagagagactgggattttctgtggtagcggtacattatgggctattccgtgcaccatgggtgtgcggaaagtggatgtacactgctgtgtcgccggccgacaaccgtgtgtctggccggattccaggatatccttcccgtatgtaatgccttggctctcttttcttctccggctcctcgccacgccaatgttgtgtcttgttcctgattgtggtgtggatccccacggccgggagtttttccccccccataaaacctctttaaaacccccagcccaacaataacg

SEQ ID NO: 693747 - DNA, 217 bp, Homo sapiens
tcagaggatctcgttactggcatttaaaagacacattttataaaatgaaaaaaaaaagggacagcctggccaacatggtaaaacaccatctccaccaaaaataaaaaattagctgggcatggtggcacgtgcctgcaatcccagctacctgggaggctgagggcttcaccatgccggccagactggtcctgaactcccgaccttcaagtgatctgcc

SEQ ID NO: 693748 - DNA, 880 bp, Homo sapiens
tgtatgatgtcttaaaaattgtttaatagatatggccgagcgtgatggctcacccctgtaatcccagcacttagtgaggccaaggtgggcggatcactatgaggccaggaatttgaaaccaggctgggcaaaatcctgtctctgctaaaagtataaaacttagccaggcatgatggcacaatgctgaggtacatagacagctactgaggtggctgagggcacacgaatgcttggaacacctggaaggtacaaggcagcagctgagcacaagacatagataccaacgatgataacaaccagaacactggagactggacaagacggaggacatatcaaagagctagcagccgacatgcacaaagcaccaagaaaaacaaacaaacctgaaatcacaacacaccacagcaaagcgggagacacccacaaaaaaaaatagaccacacacaactatagcccctcaacaaaaaactacagacagagcacagagacgagaaaaccaaccccgtaaaaggccgcaccgagcactcggcgcagccagaccccatagaacgagaaaccacaaagcgacagcttcaaacgcccagcaaacgaacgcacaacagcacaaacatcaacacacagacacacgcgacagaccacaccaccacacactaatgacaactggacaatacacgcgcacaacaacccaccaacccggccacaatcagcgcagaccacgcaagacgatcagaataaaccatgccgagacaacgagagagacacaacaacgagcagagacgataacaaaaagcaacaggagcgagcagagcaaagaacgcaagacaagacaagagcaaacgagacgcaaggaaaaaaactacgggaagaaacacccgaacag

SEQ ID NO: 693749 - DNA, 524 bp, Homo sapiens
agcaggagatgaaaatggcggattcaggcatgcacacgcccggcccggtgcagctgagcgtcgcggtcgacgacccggcccagcgcgaaatcctttcccctgaggccttgtcgatgctggccgagctgcaccggcgcttcgatccgcggcgccggcagctgctggccgcccgccgccagcgccaggcgcgcttcgacgccggcgagctgccggacttccgtgccgacacccgcgcgatccgcgaagacgactggcgcgtggcgcccttgcccgacgcactggtcgaccggcgcgtggagatcaccggcccggtcgagcgcaagatgatcatcaacgcgctcaattccggcgccaaggtgttcatggccgacttcgaggactcctcgagcccgcgcctggacaacatgctggccgggcaggtgaacctgcgcgacgcggtgcgcggcacgatcgatttcaccgcgcccaacggcaagcactacacgctcaacgactccggcctggccaccctgatcgtgcggccg

SEQ ID NO: 693750 - DNA, 528 bp, Homo sapiens
  misc_feature (1)..(1): n is a, c, g, or t
naggcctaaacccaatccaaatggtggtcctggaactggaccctagtggccacccatctagtaagcacaccccctacatgtttggccccgagtccacctgggaagggctttgccagaggggccgcctggcctctcggccgtatgtttcctcgcggcccttaaaacgggcctcccgggcacacctgtgcacatcttcgtgccactctctgaatcggcggcggcaacaattggcgggccgcccggcccatggtaaaattttgcgccggctgcggcagggacttcaagctgccaccctggcgccacggccagccactgccaccagagcgttgccacggagtgtgagggcagctgagtccacagcagggctgcggaggggcgcgctggggcttcgacctggctgcactaacccaggctcctcctcgccccggcctccgggtcgggaaattgaggggacggcaggcccggctgccactggaactgggagacagggagaatccctgcgggggtccttaacagggcacccacatc

SEQ ID NO: 693751 - DNA, 172 bp, Homo sapiens
atgtatccacaggtgcaagcagatctcaagtccagctgctcttgtaaatgctgatggtaacgccctcatcttgcacatgcagcagtgcttttggatacatgccatctgtgggtagtcagctagtgcaagcaaaaacagtcagcaaacgtcaagcatacaaaccacaggcaag

SEQ ID NO: 693752 - DNA, 185 bp, Homo sapiens
  misc_feature (82)..(82): n is a, c, g, or t
  misc_feature (104)..(104): n is a, c, g, or t
  misc_feature (117)..(117): n is a, c, g, or t
  misc_feature (141)..(141): n is a, c, g, or t
  misc_feature (163)..(163): n is a, c, g, or t
tacgtgtcaggattctgctggtacgagaggccttcctctttctgtttttaaaaaaagttttactgccatattggattccatncctgttgccatcctcactgttnctgttttgggttnctggtctctttgactttcaaagtnctccagctcctcatacgcacancttttggatgacctcagcttga

SEQ ID NO: 693753 - DNA, 414 bp, Homo sapiens
ctcagagggtgtgctgcaccggggcctgggcaggagggaggtgcttttagatctgtcaggagacaggttagctgatccccacgtcagctgtgacactccgacttttgtttaccagagctggtaggcagagaggtctgcctttggacttgatccggcacacctacgctagagtgcagagagacaggccctgcaggaggattggaggcgaagcgttgtactcaggctcatgtggtacttgagcttggcacagactgtctgcggactaacctgctgagagttcatcagcttccatcctaccccttgtgccttgctacgccagacttgccacggatcatggagatcccaacatctgtccgcaataagcttcattcctctactgactcgcttctctggcctgaagcttatgccgagtcg

SEQ ID NO: 693754 - DNA, 2243 bp, Homo sapiens
gtccaattccctaatgtgacgggcgcccgcggaaggcgacatgggctccgctccctgggccccggtcctgctgctggcgctcgggctgcgcggcctccaggcgggggcccgcagggccccggaccccggcttccaggagcgcttcttccagcagcgtctggaccacttcaacttcgagcgcttcggcaacaagaccttccctcagcgcttcctggtgtcggacaggttctgggtccggggcgaggggcccatcttcttctacactgggaacgagggcgacgtgtgggccttcgccaacaactcgggcttcgtcgcggagctggcggccgagcggggggctctactggtcttcgcggagcaccgctactacgggaagtcgctgccgttcggtgcgcagtccacgcagcgcgggcacacggagctgctgacggtggagcaggccctggccgacttcgcagagctgctccgcgcgctacgacgcgacctcggggcccaggatgcccccgccatcgccttcggtggaagttatggggggatgctcagtgcctacctgaggatgaagtatccccacctggtggcgggggcgctggcggccagcgcgcccgttctagctgtggcaggcctcggcgactccaaccagttcttccgggacgtcacggcggactttgagggccagagtcccaaatgcacccagggtgtgcgggaagcgttccgacagatcaaggacttgttcctacagggagcctacgacacggtccgctgggagttcggcacctgccagccgctgtcagacgagaaggacctgacccagctcttcatgttcgcccggaatgccttcaccgtgctggccatgatggactacccctaccccactgacttcctgggtcccctccctgccaaccccgtcaaggtgggctgtgatcggctgctgagtgaggcccagaggatcacggggctgcgagcactggcagggctggtctacaacgcctcgggctccgagcactgctacgacatctaccggctctaccacagctgtgctgaccccactggctgcggcaccggccccgacgccagggcctgggactaccagatctcagagccgccagcaacatcatcttctccaacgggaacctggacccctgggcagggggcgggattcggaggaacctgagtgcctcagtcatcgccgtcaccatccaggggggagcgcaccacctcgacctcagagcctcccacccagaagatcctgcttccgtggttgaggcgcggaagctggaggccaccatcatcggcgagtgggtaaaggcagccaggcgtgagcagcagccagctctgcgtggggggcccagactcagcctctgagcacaggactggaggggtctcaaggctcctcatggagtgggggcttcactcaagcagctggcggcagagggaaggggctgaataaacgcctggaggcctggcaaaaaaaaaaaaaaaaaaaaaaaaaaaaaaaaaaaaaaaaaaaaaaaaaaaacaacaaaacaaaaaaaacaaaggggggggggccgcaacaaaaaaaccccacacgggggggagcgccaccccagtcacgcccaccccgcacgctttttgtgtggacaccaggaagggcggccccaaacaaaggggagtgcactaatatataacagaccgaaggccagcgcgggcggcgatataacaaaacacgccggccgagggcagaggaggaaacaaacgtaccataataggcgggctcatctagtcgcaggggagggaacccacacactacacggaggaggccgagcgaacaaaaggggggacaccacacaccaacccaaggcaaaatacataaatggctcaagggacgggagcaacaactcaaaaacgacgccgcacgcggagggtaccgaggtgcggccagcccaaccacgcagaaaaaatacgccgcgggcgaaaaaaagaacttcgggccaccaacggcgcgcacgtagatacccgtaaacacaaccattataccaccgcgggccgcgggagtgcagataaaaacagaagaactggaccgcaagcagaccacagacaaccccacacgcgacgaaacccgccacagacggaccaacaaaaagcaagcccccacagcagagccgaccacgccaagaagaccacggcgagaaggcgacgcagagacgccacgaaatagacagcataacgcaagacaacacgcgagcacggagtcacgcagcaac

SEQ ID NO: 693755 - DNA, 1026 bp, Homo sapiens
  misc_feature (483)..(483): n is a, c, g, or t
  misc_feature (750)..(751): n is a, c, g, or t
  misc_feature (753)..(753): n is a, c, g, or t
ggtggagccagggcagcagggctgtctctgaactcccaggcttgtgtttgagcaaaggaattctctccccctccctctcccctcggggcgggcccgagcctccagctataaactccccggagcttcagtgccctcagcaaggctcagcctcaagattcacagcatctcagacgcagcctaggccgcaccaggatgtcggacaccgaggagcaggaatatgaggaggagcagccggaagaggaggctgcggaggaggaggaggaagcccccgaagagccggagccggtggcagagccagaagaggaacgccccaaaccaagccgccccgtggtgcctcctttgatcccgccaaagatcccagaaggggagcgcgtagacttcgatgacatccaccgcaagcgcatggagaaagacctgctggagctgcagacactcatcgatgtacatttcgagcagcggaagaaggaggacgaggagctggtngccttgaaggagcgcattgagcggcgccggtcagagagagccgagcaacagcgcttcagaactgagaaggaacgcgaacgtcaggctaagctggcggaggagaagatgaggaaggaagaggaagaggccaagaagcgggcagaggatgatgccaagaaaagaaggtgctgtccaacatgggggcccattttggcggctacctggtcaaggcagaacagaagcgtggtaagcggcagtgggccgggagatgaaggtgcgcatcgctcnnancgtaagaagctctgacattgactaaatgggggaggcacagcccggaagaaagcccaggagtggcgggtggatccaccagtgagtctgagaagtcgcggaggcaaggtgaaccagggaattgagatcacgtgtgtaaacgttcagcagccaaagtcggaggggggaaggccgtgagcgtgaatgggatcgcctgagcccggatggggtcccagagggaaagcccaacccaaaaaaaattggcgcgcaatcaatggggcgaatacacgggagcaa

SEQ ID NO: 693756 - DNA, 1464 bp, Homo sapiens
gtccaattccctaatgtgacgggcgcccgcggaaggcgacatgggctccgctccctgggccccggtcctgctgctggcgctcgggctgcgcggcctccaggcgggggcccgcagggccccggaccccggcttccaggagcgcttcttccagcagcgtctggaccacttcaacttcgagcgcttcggcaacaagaccttccctcagcgcttcctggtgtcggacaggttctgggtccggggcgaggggcccatcttcttctacactgggaacgagggcgacgtgtgggccttcgccaacaactcgggcttcgtcgcggagctggcggccgagcggggggctctactggtcttcgcggagcaccgctactacgggaagtcgctgccgttcggtgcgcagtccacgcagcgcgggcacacggagctgctgacggtggagcaggccctggccgacttcgcagagctgctccgcgcgctacgacgcgacctcggggcccaggatgcccccgccatcgccttcggtggaagttatggggggatgctcagtgcctacctgaggatgaagtatccccacctggtggcgggggcgctggcggccagcgcgcccgttctagctgtggcaggcctcggcgactccaaccagttcttccgggacgtcacggcggactttgagggccagagtcccaaatgcacccagggtgtgcgggaagcgttccgacagatcaaggacttgttcctacagggagcctacgacacggtccgctgggagttcggcacctgccagccgctgtcagacgagaaggacctgacccagctcttcatgttcgcccggaatgccttcaccgtgctggccatgatggactacccctaccccactgacttcctgggtcccctccctgccaaccccgtcaaggtgggctgtgatcggctgctgagtgaggcccagaggatcacggggctgcgagcactggcagggctggtctacaacgcctcgggctccgagcactgctacgacatctaccggctctaccacagctgtgctgaccccactggctgcggcaccggccccgacgccagggcctgggactaccagatctcagagccgccagcaacatcatcttctccaacgggaacctggacccctgggcagggggcgggattcggaggaacctgagtgcctcagtcatcgccgtcaccatccaggggggagcgcaccacctcgacctcagagcctcccacccagaagatcctgcttccgtggttgaggcgcggaagctggaggccaccatcatcggcgagtgggtaaaggcagccaggcgtgagcagcagccagctctgcgtggggggcccagactcagcctctgagcacaggactggaggggtctcaaggctcctcatggagtgggggcttcactcaagcagctggcggcagagggaaggggctgaataaacgcctggaggcctggc

SEQ ID NO: 693757 - DNA, 921 bp, Homo sapiens
  misc_feature (378)..(378): n is a, c, g, or t
  misc_feature (645)..(646): n is a, c, g, or t
  misc_feature (648)..(648): n is a, c, g, or t
cagacgcagcctaggttcccatggacttgtcataagacaaaagaggacagctgtgctgagggggcaggttctgcagcctcctggctgtgccaggaccacacctaccaaggccgcaccaggatgtcggacaccgaggagcaggaatatgaggaggagcagccggaagaggaggctgcggaggaggaggaggaagaagaggaacgccccaaaccaagccgccccgtggtgcctcctttgatcccgccaaagatcccagaaggggagcgcgtagacttcgatgacatccaccgcaagcgcatggagaaagacctgctggagctgcagacactcatcgatgtacatttcgagcagcggaagaaggaggacgaggagctggtngccttgaaggagcgcattgagcggcgccggtcagagagagccgagcaacagcgcttcagaactgagaaggaacgcgaacgtcaggctaagctggcggaggagaagatgaggaaggaagaggaagaggccaagaagcgggcagaggatgatgccaagaaaagaaggtgctgtccaacatgggggcccattttggcggctacctggtcaaggcagaacagaagcgtggtaagcggcagtgggccgggagatgaaggtgcgcatcgctcnnancgtaagaagctctgacattgactaaatgggggaggcacagcccggaagaaagcccaggagtggcgggtggatccaccagtgagtctgagaagtcgcggaggcaaggtgaaccagggaattgagatcacgtgtgtaaacgttcagcagccaaagtcggaggggggaaggccgtgagcgtgaatgggatcgcctgagcccggatggggtcccagagggaaagcccaacccaaaaaaaattggcgcgcaatcaatggggcgaatacacgggagcaa

SEQ ID NO: 693758 - DNA, 259 bp, Homo sapiens
ggaaatgttgacaagcaattttcctgggcaagctgcttcaacctgggattcccagtgtatcccgcgtttagcccactggagatagtatggtgggcacagatgtatgctcatcagtattatatgcagtatcaagctgcagtttcagctcagggccacacttcaaattttaagccaaaccaggctactacttcacaggctctaaatttgggcatgttcttggagaagaaacccccaacaaggtccaaaactaattggggcc

SEQ ID NO: 693759 - DNA, 1371 bp, Homo sapiens
gtccaattccctaatgtgacgggcgcccgcggaaggcgacatgggctccgctccctgggccccggtcctgctgctggcgctcgggctgcgcggcctccaggcgggggcccgcagggccccggaccccggcttccaggagcgcttcttccagcagcgtctggaccacttcaacttcgagcgcttcggcaacaagaccttccctcagcgcttcctggtgtcggacaggttctgggtccggggcgaggggcccatcttcttctacactgggaacgagggcgacgtgtgggccttcgccaacaactcgggcttcgtcgcggagctggcggccgagcggggggctctactggtcttcgcggagcaccgctactacgggaagtcgctgccgttcggtgcgcagtccacgcagcgcgggcacacggagctgctgacggtggagcaggccctggccgacttcgcagagctgctccgcgcgctacgacgcgacctcggggcccaggatgcccccgccatcgccttcggtggaagttatggggggatgctcagtgcctacctgaggatgaagtatccccacctggtggcgggggcgctggcggccagcgcgcccgttctagctgtggcaggcctcggcgactccaaccagttcttccgggacgtcacggcggactttgagggccagagtcccaaatgcacccagggtgtgcgggaagcgttccgacagatcaaggacttgttcctacagggagcctacgacacggtccgctgggagttcggcacctgccagccgctgtcagacgagaaggacctgacccagctcttcatgttcgcccggaatgccttcaccgtgctggccatgatggactacccctaccccactgacttcctgggtcccctccctgccaaccccgtcaaggtgggctgtgatcggctgctgagtgaggcccagaggatcacggggctgcgagcactggcagggctggtctacaacgcctcgggctccgagcactgctacgacatctaccggctctaccacagctgtgctgacccccctgggcagggggcgggattcggaggaacctgagtgcctcagtcatcgccgtcaccatccaggggggagcgcaccacctcgacctcagagcctcccacccagaagatcctgcttccgtggttgaggcgcggaagctggaggccaccatcatcggcgagtgggtaaaggcagccaggcgtgagcagcagccagctctgcgtggggggcccagactcagcctctgagcacaggactggaggggtctcaaggctcctcatggagtgggggcttcactcaagcagctggcggcagagggaaggggctgaataaacgcctggaggcctggc

SEQ ID NO: 693760 - DNA, 481 bp, Homo sapiens
  misc_feature (10)..(10): n is a, c, g, or t
  misc_feature (71)..(71): n is a, c, g, or t
  misc_feature (81)..(81): n is a, c, g, or t
  misc_feature (90)..(90): n is a, c, g, or t
  misc_feature (92)..(92): n is a, c, g, or t
  misc_feature (94)..(95): n is a, c, g, or t
  misc_feature (97)..(97): n is a, c, g, or t
  misc_feature (104)..(104): n is a, c, g, or t
  misc_feature (134)..(134): n is a, c, g, or t
  misc_feature (192)..(193): n is a, c, g, or t
  misc_feature (198)..(198): n is a, c, g, or t
  misc_feature (204)..(205): n is a, c, g, or t
  misc_feature (207)..(207): n is a, c, g, or t
  misc_feature (212)..(212): n is a, c, g, or t
  misc_feature (218)..(218): n is a, c, g, or t
  misc_feature (221)..(221): n is a, c, g, or t
  misc_feature (239)..(239): n is a, c, g, or t
  misc_feature (249)..(249): n is a, c, g, or t
  misc_feature (252)..(253): n is a, c, g, or t
  misc_feature (279)..(279): n is a, c, g, or t
  misc_feature (281)..(281): n is a, c, g, or t
  misc_feature (294)..(295): n is a, c, g, or t
  misc_feature (298)..(298): n is a, c, g, or t
  misc_feature (300)..(302): n is a, c, g, or t
  misc_feature (310)..(310): n is a, c, g, or t
  misc_feature (331)..(331): n is a, c, g, or t
  misc_feature (335)..(336): n is a, c, g, or t
  misc_feature (347)..(347): n is a, c, g, or t
  misc_feature (359)..(359): n is a, c, g, or t
  misc_feature (362)..(362): n is a, c, g, or t
  misc_feature (364)..(365): n is a, c, g, or t
  misc_feature (368)..(368): n is a, c, g, or t
  misc_feature (371)..(371): n is a, c, g, or t
  misc_feature (385)..(385): n is a, c, g, or t
  misc_feature (394)..(394): n is a, c, g, or t
  misc_feature (397)..(397): n is a, c, g, or t
  misc_feature (413)..(413): n is a, c, g, or t
  misc_feature (477)..(477): n is a, c, g, or t
gacatctccnttgacaattgtgtctgcatcaaacggagagtccttcgtcctgcagtatgattgttactggnggggaacatncggtgaccngngnngngggggcntgcttggaaaagacctccctgtcatctgcnatactacgggacaaatcagtatctactcaaattcccacttccagaatgagaggactcnncaggngtttannantttgnaaagcnttnaaaatgtatcgtggttgnattttgactnttnngaaatagaataactgacaaatggtcnanaaacaaacttgtnnaantnnnattgggangggtctcggtggagacttggngtgnngtcgacgaggnggggggaatatnagngnnggntcnccgccacacggganaagggagtnttntgtttgtttttttttngcatgcagcatatataaaatgtgatctagaattgaaattgtaaaacagaataatcctcttaaanaaaa

SEQ ID NO: 693761 - DNA, 649 bp, Homo sapiens
ggcgggccagctcgaggacgcatcagactgtctttcagcaaggagcgatctttctagttctctgatagctattacagagattcaccgccactgaacaagatgagtatgcctgccgtgtgaagcaggtgactctgtcacagtccaaggatagttaagtgggatcgagacatggtggcagcatcatggaggtttgaagatgccgcatgcggagtcggatgaattccaaatactgcgttgctggcgtggtttaatactcgatatgcttatacacgttacactttatgcacaaaatgtcgggttataataagtgtgttacatggacatgagtcttctttataattctacttcgagtgctgtctccacgtatgatgtatctgagccggttgctccacaggtagctctagcatgggtggggacttagaggtggggagcagagaattctcttatacaagatcaacatctcggtcagatttgaactcttcagatctcttgcactcaacagcttgttaagatagttaaggcgtggatagagttaagttccaagtttacatactctgcttagaattcggggggaaatttaggagtataatggacaggatgatcggaacttcgtgctaatgaatgggtgcgtcgaagggggatcctctag

SEQ ID NO: 693762 - DNA, 610 bp, Homo sapiens
  misc_feature (20)..(20): n is a, c, g, or t
  misc_feature (129)..(129): n is a, c, g, or t
  misc_feature (176)..(177): n is a, c, g, or t
  misc_feature (186)..(186): n is a, c, g, or t
  misc_feature (218)..(218): n is a, c, g, or t
  misc_feature (252)..(252): n is a, c, g, or t
  misc_feature (262)..(262): n is a, c, g, or t
  misc_feature (264)..(264): n is a, c, g, or t
  misc_feature (296)..(296): n is a, c, g, or t
  misc_feature (303)..(303): n is a, c, g, or t
  misc_feature (348)..(350): n is a, c, g, or t
  misc_feature (356)..(356): n is a, c, g, or t
  misc_feature (364)..(365): n is a, c, g, or t
  misc_feature (374)..(375): n is a, c, g, or t
  misc_feature (378)..(378): n is a, c, g, or t
  misc_feature (387)..(387): n is a, c, g, or t
  misc_feature (389)..(389): n is a, c, g, or t
  misc_feature (392)..(392): n is a, c, g, or t
  misc_feature (396)..(396): n is a, c, g, or t
  misc_feature (401)..(402): n is a, c, g, or t
  misc_feature (494)..(494): n is a, c, g, or t
  misc_feature (496)..(496): n is a, c, g, or t
  misc_feature (604)..(604): n is a, c, g, or t
atagtaaatatttacaaaantgttgataacattactcaagtcacacacatataacaatgtagacaggtcttaacaaagtttacaaattgaaattatggagatttcccaaaatgaatctaatagctcatngctgagcatggttatcaatataacatttaagatcttggatcaaatgnngtccccgantcttctgcaatccagtcctcttagaaattggnttctctctttgggagattcagactcagaggcagncagagggganangtcaagagctgaaataatcacataactactcnaattttnttcattctattgactgtgtcaagttatagacacagccaaagtgtnnntcttcngcctctgnngatttgagnngangaagaacangngcnattnctcanngcttaaagaaaaacttggcacatatagaggctgagtgtaggtagagtatctgtactagaaccataaagttctatctgttggtaaattcatgnanaaaactaagataaaacagataattatgctctatctcatatctactgaaagtagaaaaggaggaagagtgacacttttaaatcaaactggctctagtttttagcttagnggatgg

SEQ ID NO: 693763 - DNA, 2084 bp, Homo sapiens
gtccaattccctaatgtgacgggcgcccgcggaaggcgacatgggctccgctccctgggccccggtcctgctgctggcgctcgggctgcgcggcctccaggcggggggtgagtggcggcgccccccggcccattccccggtcccggccccgcctctgaggttcgcgtccccccacagcccgcagggccccggaccccggcttccaggagcgcttcttccagcagcgtctggaccacttcaacttcgagcgcttcggcaacaagaccttccctcagcgcttcctggtgtcggacaggttctgggtccggggcgaggggcccatcttcttctacactgggaacgagggcgacgtgtgggccttcgccaacaactcgggcttcgtcgcggagctggcggccgagcggggggctctactggtcttcgcggagcaccgctactacgggaagtcgctgccgttcggtgcgcagtccacgcagcgcgggcacacggagctgctgacggtggagcaggccctggccgacttcgcagagctgctccgcgcgctacgacgcgacctcggggcccaggatgcccccgccatcgccttcggtggaagttatggggggatgctcagtgcctacctgaggatgaagtatccccacctggtggcgggggcgctggcggccagcgcgcccgttctagctgtggcaggcctcggcgactccaaccagttcttccgggacgtcacggcggactttgagggccagagtcccaaatgcacccagggtgtgcgggaagcgttccgacagatcaaggacttgttcctacagggagcctacgacacggtccgctgggagttcggcacctgccagccgctgtcagacgagaaggacctgacccagctcttcatgttcgcccggaatgccttcaccgtgctggccatgatggactacccctaccccactgacttcctgggtcccctccctgccaaccccgtcaaggtgggctgtgatcggctgctgagtgaggcccagaggatcacggggctgcgagcactggcagggctggtctacaacgcctcgggctccgagcactgctacgacatctaccggctctaccacagctgtgctgaccccactggctgcggcaccggccccgacgccagggcctgggactaccaggcctgcaccgagatcaacctgaccttcgccagcaacaatgtgaccgatatgttccccgacctgcccttcactgacgagctccgccagcggtactgcctggacacctggggcgtgtggccccggcccgactggctgctgaccagcttctgggggggtgatctcagagccgccagcaacatcatcttctccaacgggaacctggacccctgggcagggggcgggattcggaggaacctgagtgcctcagtcatcgccgtcaccatccaggggggagcgcaccacctcgacctcagagcctcccacccagaagatcctgcttccgtggttgaggcgcggaagctggaggccaccatcatcggcgagtgggtaaaggcagccaggcgtgagcagcagccagctctgcgtggggggcccagactcagcctctgagcacaggactggaggggtctcaaggctcctcatggagtgggggcttcactcaagcagctggcggcagagggaaggggctgaataaacgcctggaggcctggcaaaaaaaaaaaaaaaaaaaaaagaagaaaaacaaacacaaccacaagaaaaaaaggggggggcgacgaaagaaaaatccccgggggggggcccaaattagagcgacacccagatcgtctgtcaaaaaggggggcccacaaagagagaaggacaaaataaaaaaacgcaaagcacgcggcgcccgacgctataacaacagattagagagcgcgtgacacacacacgcgccagcacggggggcgacaatgtgagaggagagggacaacccacacaaccacgcggggggggggacaaaccacaataggggacaaaaccaacaccccaaacacgacaagttacaacgcgccccggacgggggcaaccaaaaaaacaccgaagagggacaccagggga

SEQ ID NO: 693764 - DNA, 101 bp, Homo sapiens
atgaatcaccctgagtacaaatatctttgttgtttagcacttaaatttcccacatttattaaattgatgtaaatcagatcttttctacaaagctcctatcc

SEQ ID NO: 693765 - DNA, 1087 bp, Homo sapiens
  misc_feature (937)..(937): n is a, c, g, or t
  misc_feature (958)..(959): n is a, c, g, or t
gtccaattccctaatgtgacgggcgcccgcggaaggcgacatgggctccgctccctgggccccggtcctgctgctggcgctcgggctgcgcggcctccaggcgggggcccgcagggccccggaccccggcttccaggagcgcttcttccagcagcgtctggaccacttcaacttcgagcgcttcggcaacaagaccttccctcagcgcttcctggtgtcggacaggttctgggtccggggcgaggggcccatcttcttctacactgggaacgagggcgacgtgtgggccttcgccaacaactcgggcttcgtcgcggagctggcggccgagcggggggctctactggtcttcgcggagcaccgctactacgggaagtcgctgccgttcggtgcgcagtccacgcagcgcgggcacacggagctgctgacggtggagcaggccctggccgacttcgcagagctgctccgcgcgctacgacgcgacctcggggcccaggatgcccccgccatcgccttcggtggaagttatggggggatgctcagtgcctacctgaggatgaagtatccccacctggtggcgggggcgctggcggccagcgcgcccgttctagctgtggcaggcctcggcgactccaaccagttcttccgggacgtcacggcggactttgagggccagagtcccaaatgcacccagggtgtgcgggaagcgttccgacagatcaaggacttgttcctacagggagcctacgacacggtccgctgggagttcggcacctgccagccgctgtcagacgagaaggacctgacccagctcttcatgttcgcccggaatgccttcaccgtgctggccatgatggactacccctaccccactgacttcctgggtcccctccctgccaaccccgtcaaggtgaggcgccgcctcccagggcgcagngagaggccggctggagtgtcnnaaggctggtggtcagcgcctgaccctcatcctggagccagggaggcggagctggtggaggggaccccgctgagtcccgctgccctgcaccccctcaggcctgatcatactgtagtgcactggcgaggg

SEQ ID NO: 693766 - DNA, 2233 bp, Homo sapiens
gtccaattccctaatgtgacgggcgcccgcggaaggcgacatgggctccgctccctgggccccggtcctgctgctggcgctcgggctgcgcggcctccaggcgggggcccgcagggccccggaccccggcttccaggagcgcttcttccagcagcgtctggaccacttcaacttcgagcgcttcggcaacaagaccttccctcagcgcttcctggtgtcggacaggttctgggtccggggcgaggggcccatcttcttctacactgggaacgagggcgacgtgtgggccttcgccaacaactcgggcttcgtcgcggagctggcggccgagcggggggctctactggtcttcgcggagcaccgctactacgggaagtcgctgccgttcggtgcgcagtccacgcagcgcgggcacacggagctgctgacggtggagcaggccctggccgacttcgcagagctgctccgcgcgctacgacgcgacctcggggcccaggatgcccccgccatcgccttcggtggaaaggaagccctcccacctgtcctcccagccacctgctcagcttggatgtgcggccacactagcggcctttcccagtgagagctgcacccgcacctggcccagggttggaatttgtgggtctcagaagtgtcgtcctccttgtggcacctgtgggcccctgaggaggaaaagaggaaatggggtgttgggggcagcagcctaaccctgtgtccctcacccagttatggggggatgctcagtgcctacctgaggatgaagtatccccacctggtggcgggggcgctggcggccagcgcgcccgttctagctgtggcaggcctcggcgactccaaccagttcttccgggacgtcacggcggactttgagggccagagtcccaaatgcacccagggtgtgcgggaagcgttccgacagatcaaggacttgttcctacagggagcctacgacacggtccgctgggagttcggcacctgccagccgctgtcagacgagaaggacctgacccagctcttcatgttcgcccggaatgccttcaccgtgctggccatgatggactacccctaccccactgacttcctgggtcccctccctgccaaccccgtcaaggtgggctgtgatcggctgctgagtgaggcccagaggatcacggggctgcgagcactggcagggctggtctacaacgcctcgggctccgagcactgctacgacatctaccggctctaccacagctgtgctgaccccactggctgcggcaccggccccgacgccagggcctgggactaccaggcctgcaccgagatcaacctgaccttcgccagcaacaatgtgaccgatatgttccccgacctgcccttcactgacgagctccgccagcggtactgcctggacacctggggcgtgtggccccggcccgactggctgctgaccagcttctgggggggtgatctcagagccgccagcaacatcatcttctccaacgggaacctggacccctgggcagggggcgggattcggaggaacctgagtgcctcagtcatcgccgtcaccatccaggggggagcgcaccacctcgacctcagagcctcccacccagaagatcctgcttccgtggttgaggcgcggaagctggaggccaccatcatcggcgagtgggtaaaggcagccaggcgtgagcagcagccagctctgcgtggggggcccagactcagcctctgagcacaggactggaggggtctcaaggctcctcatggagtgggggcttcactcaagcagctggcggcagagggaaggggctgaataaacgcctggaggcctggcaaaaaaaaaaaaaaaaaaaaaagaagaaaaacaaacacaaccacaagaaaaaaaggggggggcgacgaaagaaaaatccccgggggggggcccaaattagagcgacacccagatcgtctgtcaaaaaggggggcccacaaagagagaaggacaaaataaaaaaacgcaaagcacgcggcgcccgacgctataacaacagattagagagcgcgtgacacacacacgcgccagcacggggggcgacaatgtgagaggagagggacaacccacacaaccacgcggggggggggacaaaccacaataggggacaaaaccaacaccccaaacacgacaagttacaacgcgccccggacgggggcaaccaaaaaaacaccgaagagggacaccagggga

SEQ ID NO: 693767 - DNA, 200 bp, Homo sapiens
cgccagccagcaatgttgattaagcagattattaaaaaatgagcaggcattttccctcttcgcgtaactgaagcattgccgaacgggttatttttgcttaatctgccagaaggattgatcaattctaaatgttcaataagcgcagccaaaaaccgcctcactatccgccccattttttaacgcctgactggctactgtct

SEQ ID NO: 693768 - DNA, 1473 bp, Homo sapiens
  misc_feature (8)..(8): n is a, c, g, or t
atgtggtnatctagaggatcctggctcccacttggttgcgggggcgctggtgtgcagcgcgccgttctagctgtggcaggcctcggcgactccaaccagttcttccgggacgtcacggcggactttgagggccagagtcccaaatgcacccagggtgtgcgggaagcgttccgacagatcaaggacttgttcctacagggagcctacgacacggtccgctgggagttcggcacctgccagccgctgtcagacgagaaggacctgacccagctcttcatgttcgcccggaatgccttcaccgtgctggccatgatggactacccctaccccactgacttcctgggtcccctccctgccaaccccgtcaaggtgggctgtgatcggctgctgagtgaggcccagaggatcacggggctgcgagcactggcagggctggtctacaacgcctcgggctccgagcactgctacgacatctaccggctctaccacagctgtgctgaccccactggctgcggcaccggccccgacgccagggcctgggactaccaggcctgcaccgagatcaacctgaccttcgccagcaacaatgtgaccgatatgttccccgacctgcccttcactgacgagctccgccagcggtactgcctggacacctggggcgtgtggccccggcccgactggctgctgaccagcttctgggggggtgatctcagagccgccagcaacatcatcttctccaacgggaacctggacccctgggcagggggcgggattcggaggaacctgagtgcctcagtcatcgccgtcaccatccaggggggagcgcaccacctcgacctcagagcctcccacccagaagatcctgcttccgtggttgaggcgcggaagctggaggccaccatcatcggcgagtgggtaaaggcagccaggcgtgagcagcagccagctctgcgtggggggcccagactcagcctctgagcacaggactggaggggtctcaaggctcctcatggagtgggggcttcactcaagcagctggcggcagagggaaggggctgaataaacgcctggaggcctggcaaaaaaaaaaaaaaaaaaaaaagaagaaaaacaaacacaaccacaagaaaaaaaggggggggcgacgaaagaaaaatccccgggggggggcccaaattagagcgacacccagatcgtctgtcaaaaaggggggcccacaaagagagaaggacaaaataaaaaaacgcaaagcacgcggcgcccgacgctataacaacagattagagagcgcgtgacacacacacgcgccagcacggggggcgacaatgtgagaggagagggacaacccacacaaccacgcggggggggggacaaaccacaataggggacaaaaccaacaccccaaacacgacaagttacaacgcgccccggacgggggcaaccaaaaaaacaccgaagagggacaccagggga

SEQ ID NO: 693769 - DNA, 1923 bp, Homo sapiens
ggctcgctcccttggcccgtgtcctgcttgctggctgctcggtgctgcgcgtgcctccaaggctgtggtgtgtgagtggcggcgccccccggcccattccccggtcccggccccgcctctgaggttcgcgtccccccacagcatatcctgaggtcaccgaccggcttcaggacgttctttcgtaggtttgacattctttcgagcgcttgagcacttccctcagcgcttcctggtgtcggacaggttctgggtccggggcgaggggcccatcttcttctacactgggaacgagggcgacgtgtgggccttcgccaacaactcgggcttcgtcgcggagctggcggccgagcggggggctctactggtcttcgcggagcaccgctactacgggaagtcgctgccgttcggtgcgcagtccacgcagcgcgggcacacggagctgctgacggtggagcaggccctggccgacttcgcagagctgctccgcgcgctacgacgcgacctcggggccccgttctagctgtggcaggcctcggcgactccaaccagttcttccgggacgtcacggcggactttgagggccagagtcccaaatgcacccagggtgtgcgggaagcgttccgacagatcaaggacttgttcctacagggagcctacgacacggtccgctgggagttcggcacctgccagccgctgtcagacgagaaggacctgacccagctcttcatgttcgcccggaatgccttcaccgtgctggccatgatggactacccctaccccactgacttcctgggtcccctccctgccaaccccgtcaaggtgggctgtgatcggctgctgagtgaggcccagaggatcacggggctgcgagcactggcagggctggtctacaacgcctcgggctccgagcactgctacgacatctaccggctctaccacagctgtgctgaccccactggctgcggcaccggccccgacgccagggcctgggactaccaggcctgcaccgagatcaacctgaccttcgccagcaacaatgtgaccgatatgttccccgacctgcccttcactgacgagctccgccagcggtactgcctggacacctggggcgtgtggccccggcccgactggctgctgaccagcttctgggggggtgatctcagagccgccagcaacatcatcttctccaacgggaacctggacccctgggcagggggcgggattcggaggaacctgagtgcctcagtcatcgccgtcaccatccaggggggagcgcaccacctcgacctcagagcctcccacccagaagatcctgcttccgtggttgaggcgcggaagctggaggccaccatcatcggcgagtgggtaaaggcagccaggcgtgagcagcagccagctctgcgtggggggcccagactcagcctctgagcacaggactggaggggtctcaaggctcctcatggagtgggggcttcactcaagcagctggcggcagagggaaggggctgaataaacgcctggaggcctggcaaaaaaaaaaaaaaaaaaaaaagaagaaaaacaaacacaaccacaagaaaaaaaggggggggcgacgaaagaaaaatccccgggggggggcccaaattagagcgacacccagatcgtctgtcaaaaaggggggcccacaaagagagaaggacaaaataaaaaaacgcaaagcacgcggcgcccgacgctataacaacagattagagagcgcgtgacacacacacgcgccagcacggggggcgacaatgtgagaggagagggacaacccacacaaccacgcggggggggggacaaaccacaataggggacaaaaccaacaccccaaacacgacaagttacaacgcgccccggacgggggcaaccaaaaaaacaccgaagagggacaccagggga

SEQ ID NO: 693770 - DNA, 284 bp, Homo sapiens
tccgcccaaatggggtatggagattttccaggtgtttgtggttgaagttagttaagaaagagtttaggagcacattacaggagggtttttacttaaaggtccagcctcccccccaaggtaaagcaagaagtaaacatgaggttttgaagagaagtttagatgtatgaggagtcattagaggtgaacagttgcagtatgtagctagagtgtcgatgttagatcttggttccagagatctttacaatgattatgaagatcaaagggcattagaatcaagctataaa

SEQ ID NO: 693771 - DNA, 1878 bp, Homo sapiens
gtccaattccctaatgtgacgggcgcccgcggaaggcgacatgggctccgctccctgggccccggtcctgctgctggcgctcgggctgcgcggcctccaggcgggggcccgcagggccccggaccccggcttccaggagcgcttcttccagcagcgtctggaccacttcaacttcgagcgcttcggcaacaagaccttccctcagcgcttcctggtgtcggacaggttctgggtccggggcgaggggcccatcttcttctacactgggaacgagggcgacgtgtgggccttcgccaacaactcgggcttcgtcgcggagctggcggccgagcggggggctctactggtcttcgcggagcaccgctactacgggaagtcgctgccgttcggtgcgcagtccacgcagcgcgggcacacggagctgctgacggtggagcaggccctggccgacttcgcagagctgctccgcgcgctacgacgcgacctcggggcccaggatgcccccgccatcgccttcggtggaaggactttgagggccagagtcccaaatgcacccagggtgtgcgggaagcgttccgacagatcaaggacttgttcctacagggagcctacgacacggtccgctgggagttcggcacctgccagccgctgtcagacgagaaggacctgacccagctcttcatgttcgcccggaatgccttcaccgtgctggccatgatggactacccctaccccactgacttcctgggtcccctccctgccaaccccgtcaaggtgggctgtgatcggctgctgagtgaggcccagaggatcacggggctgcgagcactggcagggctggtctacaacgcctcgggctccgagcactgctacgacatctaccggctctaccacagctgtgctgaccccactggctgcggcaccggccccgacgccagggcctgggactaccaggcctgcaccgagatcaacctgaccttcgccagcaacaatgtgaccgatatgttccccgacctgcccttcactgacgagctccgccagcggtactgcctggacacctggggcgtgtggccccggcccgactggctgctgaccagcttctgggggggtgatctcagagccgccagcaacatcatcttctccaacgggaacctggacccctgggcagggggcgggattcggaggaacctgagtgcctcagtcatcgccgtcaccatccaggggggagcgcaccacctcgacctcagagcctcccacccagaagatcctgcttccgtggttgaggcgcggaagctggaggccaccatcatcggcgagtgggtaaaggcagccaggcgtgagcagcagccagctctgcgtggggggcccagactcagcctctgagcacaggactggaggggtctcaaggctcctcatggagtgggggcttcactcaagcagctggcggcagagggaaggggctgaataaacgcctggaggcctggcaaaaaaaaaaaaaaaaaaaaaagaagaaaaacaaacacaaccacaagaaaaaaaggggggggcgacgaaagaaaaatccccgggggggggcccaaattagagcgacacccagatcgtctgtcaaaaaggggggcccacaaagagagaaggacaaaataaaaaaacgcaaagcacgcggcgcccgacgctataacaacagattagagagcgcgtgacacacacacgcgccagcacggggggcgacaatgtgagaggagagggacaacccacacaaccacgcggggggggggacaaaccacaataggggacaaaaccaacaccccaaacacgacaagttacaacgcgccccggacgggggcaaccaaaaaaacaccgaagagggacaccagggga

SEQ ID NO: 693772 - DNA, 1610 bp, Homo sapiens
gtccaattccctaatgtgacgggcgcccgcggaaggcgacatgggctccgctccctgggccccggtcctgctgctggcgctcgggctgcgcggcctccaggcggggggtgagtggcggcgccccccggcccattccccggtcccggccccgcctctgaggttcgcgtccccccacagcccgcagggccccggaccccggcttccaggagcgcttcttccagcagcgtctggaccagttcttccgggacgtcacggcggactttgagggccagagtcccaaatgcacccagggtgtgcgggaagcgttccgacagatcaaggacttgttcctacagggagcctacgacacggtccgctgggagttcggcacctgccagccgctgtcagacgagaaggacctgacccagctcttcatgttcgcccggaatgccttcaccgtgctggccatgatggactacccctaccccactgacttcctgggtcccctccctgccaaccccgtcaaggtgggctgtgatcggctgctgagtgaggcccagaggatcacggggctgcgagcactggcagggctggtctacaacgcctcgggctccgagcactgctacgacatctaccggctctaccacagctgtgctgaccccactggctgcggcaccggccccgacgccagggcctgggactaccaggcctgcaccgagatcaacctgaccttcgccagcaacaatgtgaccgatatgttccccgacctgcccttcactgacgagctccgccagcggtactgcctggacacctggggcgtgtggccccggcccgactggctgctgaccagcttctgggggggtgatctcagagccgccagcaacatcatcttctccaacgggaacctggacccctgggcagggggcgggattcggaggaacctgagtgcctcagtcatcgccgtcaccatccaggggggagcgcaccacctcgacctcagagcctcccacccagaagatcctgcttccgtggttgaggcgcggaagctggaggccaccatcatcggcgagtgggtaaaggcagccaggcgtgagcagcagccagctctgcgtggggggcccagactcagcctctgagcacaggactggaggggtctcaaggctcctcatggagtgggggcttcactcaagcagctggcggcagagggaaggggctgaataaacgcctggaggcctggcaaaaaaaaaaaaaaaaaaaaaagaagaaaaacaaacacaaccacaagaaaaaaaggggggggcgacgaaagaaaaatccccgggggggggcccaaattagagcgacacccagatcgtctgtcaaaaaggggggcccacaaagagagaaggacaaaataaaaaaacgcaaagcacgcggcgcccgacgctataacaacagattagagagcgcgtgacacacacacgcgccagcacggggggcgacaatgtgagaggagagggacaacccacacaaccacgcggggggggggacaaaccacaataggggacaaaaccaacaccccaaacacgacaagttacaacgcgccccggacgggggcaaccaaaaaaacaccgaagagggacaccagggga

SEQ ID NO: 693773 - DNA, 319 bp, Homo sapiens
  misc_feature (34)..(34): n is a, c, g, or t
  misc_feature (46)..(46): n is a, c, g, or t
  misc_feature (48)..(48): n is a, c, g, or t
  misc_feature (78)..(78): n is a, c, g, or t
  misc_feature (104)..(104): n is a, c, g, or t
  misc_feature (116)..(116): n is a, c, g, or t
  misc_feature (169)..(169): n is a, c, g, or t
  misc_feature (200)..(200): n is a, c, g, or t
  misc_feature (214)..(214): n is a, c, g, or t
  misc_feature (224)..(224): n is a, c, g, or t
  misc_feature (227)..(227): n is a, c, g, or t
  misc_feature (229)..(229): n is a, c, g, or t
  misc_feature (232)..(232): n is a, c, g, or t
  misc_feature (245)..(245): n is a, c, g, or t
  misc_feature (257)..(257): n is a, c, g, or t
  misc_feature (278)..(278): n is a, c, g, or t
  misc_feature (313)..(313): n is a, c, g, or t
ggcccaatcccttttaaaagcccttgggggggtnctgggggacctntntttgggaacctttttttttttgccatttgnttttttcccttaaaagtcaaaatttncccggctggggnggggggggggggggcccccctcggccccctggggttgtccccctgtttttggntaacccaacaatgtttgttttcagccctggnccccgggccctttntaaaacgggnaancnaantccctggtttggnccccccccctgntttttttttccccagcccccnaggggtgataatttaaggaaaattttttttttccnccccca

SEQ ID NO: 693774 - DNA, 696 bp, Homo sapiens
tggaaacggaggttgggagtttggctcttgtggctcaggctggagtgcaagggcgtgctctcggctcaccgaaacctctacctcctgtgttcaagcgattctcctgtctcacctcccgaattactgaaatacaggcttgccgccaccacgccgggctaatttggtattttgggtagagacggggttccctccatgttgggccaggctagtcttgaacttcccgacctcaggtgactccgcccgcctcggccctcccaaagtgctgggatatacaggcgtgagccaccgcgcccggcccacaggtagcttctcacacccaagcccctccagtgtccttgacagctcacggggcctcaggcatatgcgggccacatttttggagctgacatttttttacctgcctgggggcccagacaattagggactgaggacataagctgtgccctctagtctcgtggggggagggagcagggtccattaggcctctgaaaccttgggcttgggacctcggggggtcagccacccaagatggcatccaacagcctcgggaagaggggcatcagttggggcactcacctgtcagccatctgggggatgatgtaatgcccattctgtgatctgaccaaatataaaattgccaagttcaattcacaatgctggggtggccacaagaagtgggaaccccactctattgca

SEQ ID NO: 693775 - DNA, 91 bp, Homo sapiens
  misc_feature (37)..(37): n is a, c, g, or t
  misc_feature (60)..(60): n is a, c, g, or t
aaggactgcggcctcttctgaggggcagcggggcctngcgggatgggcaccgcgaacttngtaccccccaacccctgaggaagattggggc

SEQ ID NO: 693776 - DNA, 350 bp, Homo sapiens
aggtttttgagtcgggttgttttcttcattggagatattcgagtcatggaactttttcaaagaactgaagggggattcccggtgatttttccaccccatacagatgaagacatcaaagggccccgccgcagtgacgaagactaaagcttgaacagatctgggtccaaagaggctcggcaggtgccgtgggcactagggagcgacccccgggtggccgagggactgagggatgcgcgtccagccccggagggcggagtacacctgtccctgtagcctgagccgccaggcgccgactgccaacacggtctgcgctgtcccctggcggtggggccaggagccattcgagccta

SEQ ID NO: 693777 - DNA, 933 bp, Homo sapiens
  misc_feature (30)..(30): n is a, c, g, or t
  misc_feature (266)..(266): n is a, c, g, or t
ctgccttcaatagctagccgtgtgctcgcnccgattatctcgttgggagagccggtgttctttatgagggacgtggtctctccggtaaaggcgttccgttgggatctcctttcgttgagcacacggaatgtactctttcttgtggtagtatggtcctgtagcgctcctccagaccagaggaaacacccctcgccgcgccgcgcttcttatatagatggcgcaagacatatatatcatgtatgtggggagacccaacgccacatggntaaagtgttgtacgcctcccgtataattgaagctcacacagcttgtccggtttgcatttatgatatagcgggcacttgggtacactcgctctcgtcacgtagctgtgtgtgtatttctcagaatacttgttcctgtttgtctgtcagatacagtggacacacaatgtgggcacacaccaccgttagatgtaaatcttgttgtcataaaagagagttatcctagtcacgctcacattgcctctctcacgagggggcacgcacatagagcttccctattagttggtttctcattgtgggggcgcccccgcaggactgcgctcacactagtgagatacataccgggagggacactcctgcactccccagagacggagctgctttttgagtataatcaggcgccgtgggagctcgtggaccacaagcgagcgaatatcgtggcgtgagacggaaacattgtgttttctgttagttggtgcctaacccacgtcctacttgacgccccatacggtgggtgatccacgagtacgtgacacgcttatggtagccgcccgcacgtagggtcaacagaacaagaggcaacgctgctctattcatacatagctataatgcgaggagctctgtataaaaaacaataaatacgcctttattaaaaagaacaaacaagaca

SEQ ID NO: 693778 - DNA, 935 bp, Homo sapiens
cgtgcgctcactttgagtggcccgggaccccctggtattctctagccgatgtcctccctataggggcgattccctgttccctccgagggggttttctttctctgggggacccactttgtacgcgttgtgcgccacccctttgttgcgtccccctgctctgtgacgtgctcccaccccccgccaccctggggcgtcctcttcttatagaggggggaggaacaccacgaatttttttcggtgtgagaccccgtcggccttggtttagagcgcccgtcactcctctgaaggttggggcctcaggtggcacccccttttggtgaatctccacggcccacagagttctccacaacaccatgggaggggcacttctccctctctgtgctcacctcccgaggcgaggttagtttttttgtctgggaagaacacacagctgggtgaccgagttgtgaccggcccccccctgtcgtgtgatttccaccactcccgccgaagggagatgcccccacccctgcaactcctcggtggcctccccttttttcaagtagagtgggaatatcaacaattttttcgtgagagaacccctccgaactgcgttaaggagaccctaccgcccctccgcaggtgggagacccccgctgcaccacccctctgcagcaatatctatcaaggccccaagcattcccccaatataaggaaagggcaattccctccctcgtatacagcccacgcgacgagtttattctttttctggggaaccaacctgggagaatgggcacccccccttttgggtcacacacaaaacccaaaaaagatcccctttgccccctggtgccctcgctttaggggggggttttaaatttccccctttaagggttccccaaccacatttctcttgccctttcctttccaaaaaaatttttgccattccccccaca

SEQ ID NO: 693779 - DNA, 311 bp, Homo sapiens
  misc_feature (25)..(25): n is a, c, g, or t
gatttggtgcatgttgacaagctgnacttgaagtcccggcttctagtgatacacctgccctcagctcccaaagtggttggaatataggcgtgagcatgcgcccagttaatctgtctttgtacagggtctgttgatacagtgagttctagatttctcttagaggactcagcatgtatgttcaggttcttttattctccatttaactcgtgcatagtttcagtaaacaagcttttccacgcagttttaatcaatagttcacatcttgttccccgtggtcaacttctcctgtcatgaatcatcctggtacctgt

SEQ ID NO: 693780 - DNA, 936 bp, Homo sapiens
ggaactcgcgtcggttggcgactcccggagcgtaggtagtttgtgggccgggttctgaggccttgcgtcctctgtacttcccactctaggccacgatgccgcaggatcagagctgggaggagttcagacggctgcctgaaaagtttatctcgactgacacctgatgtagaggcacgtgtggttttcacatataggtggttgtgatgggaacttgtgtgtgaagtagcagatgattgagatttggtttggtgtataagaaagaccatgataaatgatgtcaagatgattgagagatgctagagtcaatttattgcgactgatgggtagtcaaggaagcccgatatgtcatgagtgggaacttgagtgaatggttcgaaatgaagagtttgttcgtgtacttatggaagtagtatatctctattgaagttaggggaaagtgttgggacagaggagtacttgatgtagctaacgggggttgttcagaagcgtgaagaggtcatgttctgtaatatccatattaacttacttgaggagagctatgtgatgcacatggtttggcatgttaggaaatggcctttatttactgtttggtgatttgcacgacgcaagggcatctgtctttagaaactccgtacgtagttattttgatggttacgggtaacatcgatgtaactggtgttgcctctgggcaagcgtttggatcagtgaatttggcaaactggtgcgtattaggtgataaacccacttcttctttcctttcaggtgcacactctctcttaaagaaccattacctggtaaccttgtggccgcacaagtcctttgcgcgcgtacaggggtccgggtggccccgaattacagtgggggggtagaccccccacattgtcgcgtcacatcggcgccacaatattgcggcggcacaattgacgaggggcgacc

SEQ ID NO: 693781 - DNA, 992 bp, Homo sapiens
gtcaccttccagtagcccatgcctctcagtgtggaggcgcagcaggcaccgcagggcgggctggtaccacactgaccatccacgggacccaccctggacacagggctcctcagcgaggaaagtgcgggtgaccctcaacggtgtcccgttgtaaagtgacgaagttgggagcgcagactcccacgtgttgtcaatcttggcgcccacaaggctgatcacgaggggcacaagattcgctttcatcggacgttctcctacgaggtggtggtctctcaccagttgtccaagccccatggaatcgtatcgttcagcgcatacgcagcgtgaaccaagcccccggtagctgtgatgcctttcagacgccagctcaccggatatggcttttttcgcccaaggtagggttgggcactgctagacaatctacacctgtctactggggtgctcaagagggcgtttcacggctcgtgattcccacgaagagtttttgccccagtgaggtgtgtcgactcaggcgggaggtccccttcttgacaagtttctcttggtcatggccggccgggctgaggaagtgctttgacattctcccttggtagaagacgcctatgtaccgggttggattgagggctactaggactagacaggtcgttttcccaaacgaagagttgatcacccaagatggatcaggtcctgtccgtggtacccgcccgtgtcgtgctgccttgatggaacgcctaggaatgtgcgctaacacacctcttcagcggggatgtcgtggaagtccggaaagattttgacctgtggtaggccgtggggcccctggattccatggaaacatagaggtgccctgtgtggcgccctttccggagcggttaccgtttgccttggaacccaccaaagcttgttgaagcaagcgtttgcaacacgggttgggcggttctaagggaatgacccgtgctccaaatacccagctcagtccaccggtcctgggggtg

SEQ ID NO: 693782 - DNA, 134 bp, Homo sapiens
tctctctacttgacggtcctggtccccacctgacaccgttgcgtgggacctggcacggcctgcagtgacgcttcccgttcacgctccgggctacccttgccaccacgccttgtgacgcgccggtcgacggccgg

SEQ ID NO: 693783 - DNA, 140 bp, Homo sapiens
tctctttataaataaacccatccatgtgtgtccttttccttggctacacgcgtgggatcccagtagcgatgctgtcccctggcctttttcaattaatttatcttgggtgctttccctcattaccccacaccttctagtag

SEQ ID NO: 693784 - DNA, 761 bp, Homo sapiens
ctttcagttcaacaagatggaccactcctgccgaggtagccacagcttcgcctggggttctgtgcccagtcctgggactctgcctggtgctctgtttctctttcttgctctctctctgtctttgcttaggcgtgaccattctaaactgagggtaactggttcttgttattttgctcgtggcaggattgaatacattatctccttggaataatagcattatctttgactggtgcattgctggtctggccaattaaattcacaaggaagacagaatggaatgcctgtggtagcagtgccttttcttttttttccatttaaaggaagttagaaaaattattgttttaattcccaaagctttatctgttgtctgctaatcttttaaagtggaagtacaagcgtggggtcaggcttatatctttcagaggcagctgaggccagagtcagagcccgacatctgcctcactgatcatgtatcaccttgggcaagtcactttgtttctctgagcctcggtttcctctcctgagaaatgggtatggtgatcctctattggatatttattctcaagagttcaaggaaggcagtggatcatagaggccctttgtaacgctgtcagacatctgctcttgtattgggtcccaggttggaggtagaattaaatgagtctgggtcttacagggtctcatgaagtgcttgcagcagcagaagatctcattctactcaccatttaaggtgagcgttaactcattaagtatcaggaaaa

SEQ ID NO: 693785 - DNA, 225 bp, Homo sapiens
gggagttaactgttctgattctccagagtctatagagtgcgtggggacaggagatacaaggtacaactatgtaatcatgaatagaaccttccttggtcacaaaaatgggctgtgatcagtgtgacttcgacttacttaattcttttgtgattttcggagacagagttcactctggttacccaggctgaagtgcaagggtgtgatctcagctcacagcaacttcca

SEQ ID NO: 693786 - DNA, 891 bp, Homo sapiens
gtgtacatgtctttcttctttcctttaagtcaagagacttaaaggatattatctagaatatgcacctatttggatgcagtactcatggtaaaagtaaaacagctttcaggaggcagttacaaatcggagatttggtgtgactccttcgttgtgacgaatatctgtgtgattggtctttctggtgctcaaaacttttgtgactaaatttgcaaactctgtaagctctctaataggtagcccacattgtaagctacttttaactttggaatcttgtggtgataggtgtccacaatatggcatatctctagagaccttgtgtataccgtgcacagacaatttgtccttgtgattaaaatctgtgttctcttccgttgccatgtgcccctggccaagtggctcacaggggtcaccccaagggcttcttcattcccgtgtcaaccttgtaccgccacaccttcccttctttctatagtacctgggtgactttgaacacttcctaaatcctgtagaaaaagttttagacacgaatctatacatggcccatttcaagatgcgtcaaatgctgtatattcaatcgagcccttccctatttaagggctacctttctggggagctgcccaagtttgccaagaaagccagcgtggccatctgacgtgctgtggtgtcgtggcgccgtcagattcatatcgcgatacatagtggaatacggggcgttttgtgcacatcaaacccttgggcttccaaatttgctccttggcctgataagagggggcaaacagttggttcgttaaaaaaccttcgcgccagggtcatcacaccttcaggcccgggaaaataacccaaaggccgtagggcacagtgtttcgcacatacatggggtcccagtagggg

SEQ ID NO: 693787 - DNA, 271 bp, Homo sapiens
acgcgctcatctatcaagcatctctatggcaacctacagaatcttctcgactgtaaggacattggcgagccaggtatcatacgcgtcaacagggatctcaagcgttacgccgcagtgcttggtgatcttggtatcaatgtggagactaaccttggacaagccacgtaagccgcatcaagaccgagaaaaagaaatcttgctggctgcggccgccatcgagaagggccgatccaagattggtgaaactaaggtcagcatctcggccgtagct

SEQ ID NO: 693788 - DNA, 641 bp, Homo sapiens
cttaagaaaccgtgctagccgaaaaagactatttggataacttataggaaagcctagaacctcccagtagagtggggatttttttcttcttccctttctcttttggccactagttaaattagcagtcttagctctgagtctcggttgccgtgttcttatttttttggcgtgttggcaactccacatgctgctgtttttaccagggctcctctttcctctccctgctggccactttctaccagtcccttttctgtgtcctctggggggcttgagctcccactcaacgctcagtgggccttctgcgcgggcctctctggttggcggcccctgccttcccttccctgccttgggccccctcccccctttttcctcctccttcccttttcccctcgctccttttccccccccgcctcctccgtctctgtcttttctgtgtttcatcccctttcctctctagctggggcgcgcctccttcttccccctctttgctcccctctgctcctctcccccttttttcttctcctcccgcctctcgcccctcttgggctcccttttttgcgcctggcccccctcgggcgcccttcgcgccctcgcctcgctccggcccctctcgtttccctgtcttcttataaaaaaacaat

SEQ ID NO: 693789 - DNA, 335 bp, Homo sapiens
  misc_feature (193)..(193): n is a, c, g, or t
  misc_feature (251)..(251): n is a, c, g, or t
  misc_feature (330)..(330): n is a, c, g, or t
ctgcaagtgattctcctgtctcagcttcccaagtagctgggcttacaggcacataccaccatgcccagctaattttttgtgtatttttagtagacatggggtttcaccatgttggccagagtggctctccaacgttctagacctcagagtgatctaccacaccttcggcctcccaagtgtgcgtgggattacnaggaatagacgccattacgcccctggccgccgtcagctgttcttgaaacgcttcctgnggcttccttgacgggtcggagacgggccactgacgtacactgtgtgccaggagtccccccggggcagcacacatttcgngggat

SEQ ID NO: 693790 - DNA, 286 bp, Homo sapiens
acatcgtgaatgttcttactgccactgaactgtgcacttaaaaatggttcaaatggtaaatatagccaggctcaatggctcacacctgtaatcctgacacttcgggaagctgtgtgggagaatcgcttgaggcctggagttctagaacagcctgagcaacacagagaccccatctctactagaaatcttaaaaaaaaaaaattaacggggtacaggggggcatgtctatagtcctagctacttgggaggctgaggcaggaggatcacctaagcccagaagctggag

SEQ ID NO: 693791 - DNA, 1948 bp, Homo sapiens
gtccaattccctaatgtgacgggcgcccgcggaaggcgacatgggctccgctccctgggccccggtcctgctgctggcgctcgggctgcgcggcctccaggcggggggtgagtggcggcgccccccggcccattccccggtcccggccccgcctctgaggttcgcgtccccccacagcccgcagggccccggaccccggcttccaggagcgcttcttccagcagcgtctggaccacttcaacttcgagcgcttcggcaacaagaccttccctcagcgcttcctggtgtcggacaggttctgggtccggggcgaggggcccatcttcttctacactgggaacgagggcgacgtgtgggccttcgccaacaactcgggcttcgtcgcggagctggcggccgagcggggggctctactggtcttcgcggagcaccgctactacgggaagtcgctgccgttcggtgcgcagtccacgcagcgcgggcacacggagctgctgacggtggagcaggccctggccgacttcgcagagctgctccgcgcgctacgacgcgacctcggggcccaggatgcccccgccatcgccttcggtggaaggactttgagggccagagtcccaaatgcacccagggtgtgcgggaagcgttccgacagatcaaggacttgttcctacagggagcctacgacacggtccgctgggagttcggcacctgccagccgctgtcagacgagaaggacctgacccagctcttcatgttcgcccggaatgccttcaccgtgctggccatgatggactacccctaccccactgacttcctgggtcccctccctgccaaccccgtcaaggtgggctgtgatcggctgctgagtgaggcccagaggatcacggggctgcgagcactggcagggctggtctacaacgcctcgggctccgagcactgctacgacatctaccggctctaccacagctgtgctgaccccactggctgcggcaccggccccgacgccagggcctgggactaccaggcctgcaccgagatcaacctgaccttcgccagcaacaatgtgaccgatatgttccccgacctgcccttcactgacgagctccgccagcggtactgcctggacacctggggcgtgtggccccggcccgactggctgctgaccagcttctgggggggtgatctcagagccgccagcaacatcatcttctccaacgggaacctggacccctgggcagggggcgggattcggaggaacctgagtgcctcagtcatcgccgtcaccatccaggggggagcgcaccacctcgacctcagagcctcccacccagaagatcctgcttccgtggttgaggcgcggaagctggaggccaccatcatcggcgagtgggtaaaggcagccaggcgtgagcagcagccagctctgcgtggggggcccagactcagcctctgagcacaggactggaggggtctcaaggctcctcatggagtgggggcttcactcaagcagctggcggcagagggaaggggctgaataaacgcctggaggcctggcaaaaaaaaaaaaaaaaaaaaaagaagaaaaacaaacacaaccacaagaaaaaaaggggggggcgacgaaagaaaaatccccgggggggggcccaaattagagcgacacccagatcgtctgtcaaaaaggggggcccacaaagagagaaggacaaaataaaaaaacgcaaagcacgcggcgcccgacgctataacaacagattagagagcgcgtgacacacacacgcgccagcacggggggcgacaatgtgagaggagagggacaacccacacaaccacgcggggggggggacaaaccacaataggggacaaaaccaacaccccaaacacgacaagttacaacgcgccccggacgggggcaaccaaaaaaacaccgaagagggacaccagggga

SEQ ID NO: 693792 - DNA, 392 bp, Homo sapiens
tattacctcgttgccctgctgaaagcacaatgggtccccagcagctgcactggacccacccgaaaaattcggccagggttccccgctcttgtcgggtcgcgtcacaaaccggccggcctgatccggaaatcatggcctcaatatgtgccggccagtgttctccgtcaggtacgcagaagcgatatcggtctatcattcaaccgtggggactaaatgctctcccttcagccaggattatccgggggcttctatctcaactgaaaacccatagataacttccttcgtatataaaataacctttggcaaaacccagaaaaaacaacaacaaaaactcccacgtttcttatcattattcataccacgacgccccacgatagccttgctcccccaaa

SEQ ID NO: 693793 - DNA, 1933 bp, Homo sapiens
gtccaattccctaatgtgacgggcgcccgcggaaggcgacatgggctccgctccctgggccccggtcctgctgctggcgctcgggctgcgcggcctccaggcgggggcccgcagggccccggaccccggcttccaggagcgcttcttccagcagcgtctggaccacttcaacttcgagcgcttcggcaacaagaccttccctcagcgcttcctggtgtcggacaggttctgggtccggggcgaggggcccatcttcttctacactgggaacgagggcgacgtgtgggccttcgccaacaactcgggcttcgtcgcggagctggcggccgagcggggggctctactggtcttcgcggagcaccgctactacgggaagtcgctgccgttcggtgcgcagtccacgcagcgcgggcacacggagctgctgacggtggagcaggccctggccgacttcgcagagctgctccgcgcgctacgacgcgacctcggggcccaggatgcccccgccatcgccttcggtggaagttatggggggatgctcagtgcctacctgaggatgaagtatccccacctggtggcgggggcgctggcggccagcgcgcccgttctagctgtggcaggcctcggcgactccaaccagttcttccgggacgtcacggcagcctacgacacggtccgctgggagttcggcacctgccagccgctgtcagacgagaaggacctgacccagctcttcatgttcgcccggaatgccttcaccgtgctggccatgatggactacccctaccccactgacttcctgggtcccctccctgccaaccccgtcaaggtgggctgtgatcggctgctgagtgaggcccagaggatcacggggctgcgagcactggcagggctggtctacaacgcctcgggctccgagcactgctacgacatctaccggctctaccacagctgtgctgaccccactggctgcggcaccggccccgacgccagggcctgggactaccaggcctgcaccgagatcaacctgaccttcgccagcaacaatgtgaccgatatgttccccgacctgcccttcactgacgagctccgccagcggtactgcctggacacctggggcgtgtggccccggcccgactggctgctgaccagcttctgggggggtgatctcagagccgccagcaacatcatcttctccaacgggaacctggacccctgggcagggggcgggattcggaggaacctgagtgcctcagtcatcgccgtcaccatccaggggggagcgcaccacctcgacctcagagcctcccacccagaagatcctgcttccgtggttgaggcgcggaagctggaggccaccatcatcggcgagtgggtaaaggcagccaggcgtgagcagcagccagctctgcgtggggggcccagactcagcctctgagcacaggactggaggggtctcaaggctcctcatggagtgggggcttcactcaagcagctggcggcagagggaaggggctgaataaacgcctggaggcctggcaaaaaaaaaaaaaaaaaaaaaagaagaaaaacaaacacaaccacaagaaaaaaaggggggggcgacgaaagaaaaatccccgggggggggcccaaattagagcgacacccagatcgtctgtcaaaaaggggggcccacaaagagagaaggacaaaataaaaaaacgcaaagcacgcggcgcccgacgctataacaacagattagagagcgcgtgacacacacacgcgccagcacggggggcgacaatgtgagaggagagggacaacccacacaaccacgcggggggggggacaaaccacaataggggacaaaaccaacaccccaaacacgacaagttacaacgcgccccggacgggggcaaccaaaaaaacaccgaagagggacaccagggga

SEQ ID NO: 693794 - DNA, 1222 bp, Homo sapiens
cgagggactgcacctccactgtgtgcacactcagtctacgggacacatttcaggtatccaaggcagcagaggtgagtgggtcccccgtagactctgtgaccttatgctccacactaactctggcagagcctccgtttcctcatagaacaaagaacagccgaccatgcaagctctttcctctcgtcttgtgcctggttgcttcgtcagacccatcaggggggcctcccgttcaccggccacggcacacccgcagggacgatgaagaaagagagtctgaggaccgtcctatgtagtgtgcctacggatggcctccctagcgagcagaagggactttatccattcgaaccttcgtactagggtgtttcattgggcattcgcagcatgcgccctcgagtcgcatgaatgatctatcgtgtacgtcccactgttgtaggctagtcatcacaattgcatgactcttggcgacactagtgcttacttctcgcatgggggaggctagggggtccgcatggcactaaaagaatgctatggatgcctaggtagggggccctgtgggccgctccttaagaaccctacgcatgcacaaagaagctccgagaagggatgggacggcttgcgactaggagggacttttcaggcaagactactctttacagagaaatcgtcaactcatggccgccagaagaattggcgttccacaagctggagcgccttcggggacaataatgcgcccgttttgtctacactggacctctagtgttgggtaagaacccatgggcagagcgtagcaaccttgtacgctagattgtggccccaactgcaaaggaaacggcctgtttacccttggcgccaggaacactttttacctcccatcccaaaactttgtagtggtgaccttcctgccaacggggggcccaatggaaagcacgagccaagtgcatttactcgttgcggcgaaacgcaaaaccggaaagggggcaaacgcattgtgctggaccttggcttttaaggaaccctcggataagcaaatgccgggtcgtgatccatcggtggaacttaacatctttctttaaaaggctaaagtggggaggaccaaggctttcaagccacaaagggcaccgcaaagaagccaaagactttctaacgtgaaaccttttggcagaacctgtggggttgcgggggttaccccatttggtggagacccgggagggatccagattcc

SEQ ID NO: 693795 - DNA, 1383 bp, Homo sapiens
cttggagtcagcacggtctctttcccccaggactttgagggccagagtcccaaatgcacccagggtgtgcgggaagcgttccgacagatcaaggacttgttcctacagggagcctacgacacggtccgctgggagttcggcacctgccagccgctgtcagacgagaaggacctgacccagctcttcatgttcgcccggaatgccttcaccgtgctggccatgatggactacccctaccccactgacttcctgggtcccctccctgccaaccccgtcaaggtgggctgtgatcggctgctgagtgaggcccagaggatcacggggctgcgagcactggcagggctggtctacaacgcctcgggctccgagcactgctacgacatctaccggctctaccacagctgtgctgaccccactggctgcggcaccggccccgacgccagggcctgggactaccaggcctgcaccgagatcaacctgaccttcgccagcaacaatgtgaccgatatgttccccgacctgcccttcactgacgagctccgccagcggtactgcctggacacctggggcgtgtggccccggcccgactggctgctgaccagcttctgggggggtgatctcagagccgccagcaacatcatcttctccaacgggaacctggacccctgggcagggggcgggattcggaggaacctgagtgcctcagtcatcgccgtcaccatccaggggggagcgcaccacctcgacctcagagcctcccacccagaagatcctgcttccgtggttgaggcgcggaagctggaggccaccatcatcggcgagtgggtaaaggcagccaggcgtgagcagcagccagctctgcgtggggggcccagactcagcctctgagcacaggactggaggggtctcaaggctcctcatggagtgggggcttcactcaagcagctggcggcagagggaaggggctgaataaacgcctggaggcctggcaaaaaaaaaaaaaaaaaaaaaagaagaaaaacaaacacaaccacaagaaaaaaaggggggggcgacgaaagaaaaatccccgggggggggcccaaattagagcgacacccagatcgtctgtcaaaaaggggggcccacaaagagagaaggacaaaataaaaaaacgcaaagcacgcggcgcccgacgctataacaacagattagagagcgcgtgacacacacacgcgccagcacggggggcgacaatgtgagaggagagggacaacccacacaaccacgcggggggggggacaaaccacaataggggacaaaaccaacaccccaaacacgacaagttacaacgcgccccggacgggggcaaccaaaaaaacaccgaagagggacaccagggga

SEQ ID NO: 693796 - DNA, 815 bp, Homo sapiens
agcggagtggggatagccgcggccgtggaggtggcgtcggggactgtgtgtcctctcggaggccaggagcgagaggccgcgtctgactgaggcgaggcgagcaaggcgggcactcgcgcgacgcatgcggatcccctgcggctgtgctcccgaagccctccggcgcaggccggccgactcgaagagcggcgggagagcggcgcgaaacccagccgcgtgcacgtgcggagcagtgatgctcgtggcggctctcgggaggggcccgtgaggctgatgggcgcggacgtttcccgggaaaagtgctaggcctggagtagaacgaagcaaggggcacgtgggctcgcgtgggctcgtgctggcctggtgtgcccccaagtggcttgtacgtcttctcccagtgccatccagggcttagaagcccgttgataggccccagtggggaccaaccaaaggttggcctggtccgggcctgaacagattgggagatcgatcgccggacgtgcaaagggaagttgtccgggattgcgttacctccatggacttggcgtaaccgtgatgcggatgggcatgccgaaagaagtgttcgacggtccggttacagtggaagcgagacagttatgagcacgaggggacccaaactcccgacttgggggagcatccgagattgcgcgacgtgggttacacaggaggtgcccaaattgcgggaccaggtaccgccaaaagtgtcggagtggggatatatgagggttaccagggccaggtccatttaaccccccttgttccacacctttttaatggacacaagcccgagccac

SEQ ID NO: 693797 - DNA, 113 bp, Homo sapiens
tgattcccacaactcagttggggtataggcagtatatgaatgtatgttgcattacggtgggtggggggggtccctgagccttctcttggggccccaggcttcagtgcctgacc

SEQ ID NO: 693798 - DNA, 295 bp, Homo sapiens
aggcccatagcattcagaatgaataaaaatccacaaactgtctcatctgggcttgtggcccccacccaggagctgactaagctcaagaggacagcttctacttctatgatttcatctccgacccgaccaatcagcactcccaactcactggccccctacccaccaaattacccttaaaaattcccatcctgagttatcagaaagactgattttagcagtaataaaactttgatctcccctacagccggttttgaatgaattactctttctctatgcaattccccatcttggacaa

SEQ ID NO: 693799 - DNA, 341 bp, Homo sapiens
atggaggtataagaaccgtgggtctaagttttgtccaagaccctcacgtgtttcgtgacactccctgccaaacattgtctgatagtagaatggtcagccttcaacacaaaggagtatggtaggtaccccgtacttctatcctcccctgtcaggttaattttccccctccccatcctcccaccggatggggtgtcagtgggtcagcaggtaaaaagtcatcccggggcagattcctcttattctcataccgaaagtatttgtgatcaccggtcacgtttagtctgtcaggtcccttctttgaaaaatttgttactgcattccatggccgctataaaaatttt

SEQ ID NO: 693800 - DNA, 886 bp, Homo sapiens
gtccaattccctaatgtgacgggcgcccgcggaaggcgacatgggctccgctccctgggccccggtcctgctgctggcgctcgggctgcgcggcctccaggcgggggcccgcagggccccggaccccggcttccaggagcgcttcttccagcagcgtctggaccacttcaacttcgagcgcttcggcaacaagaccttccctcagcgcttcctggtgtcggacaggttctgggtccggggcgaggggcccatcttcttctacactgggaacgagggcgacgtgtgggccttcgccaacaactcgggcttcgtcgcggagctggcggccgagcggggggctctactggtcttcgcggagcaccgctactacgggaagtcgctgccgttcggtgcgcagtccacgcagcgcgggcacacggagctgctgacggtggagcaggccctggccgacttcgcagagctgctccgcgcgctacgacgcgacctcggggcccaggatgcccccgccatcgccttcggtggaagttatggggggatgctcagtgcctacctgaggatgaagtatccccacctggtggcgggggcgctggcggccagcgcgcccgttctagctgtggcaggcctcggcgactccaaccagttcttccgggacgtcacggcggactttgagggccagagtcccaaatgcacccagggtgtgcgggaagcgttccgacagatcaaggacttgttcctacagggagctacgacacggcgtcgtgggagtcggcactgcagcgtgtcagagagaaggcctgaccagtcttcatgttcgccgcatgcttacgtgctgcatgagggcttccctaccatgattctggtcctccggaaccgcagggcttgacgg

SEQ ID NO: 693801 - DNA, 1336 bp, Homo sapiens
gtccaattccctaatgtgacgggcgcccgcggaaggcgacatgggctccgctccctgggccccggtcctgctgctggcgctcgggctgcgcggcctccaggcgggggcccgcagggccccggaccccggcttccaggagcgcttcttccagcagcgtctggaccacttcaacttcgagcgcttcggcaacaagaccttccctcagcgcttcctggtgtcggacaggttctgggtccggggcgaggggcccatcttcttctacactgggaacgagggcgacgtgtgggccttcgccaacaactcgggcttcgtcgcggagctggcggccgagcggggggctctactggtcttcgcggagcaccgctactacgggaagtcgctgccgttcggtgcgcagtccacgcagcgcgggcacacggagctgctgacggtggagcaggccctggccgacttcgcagagctgctccgcgcgctacgacgcgacctcggggcccaggatgcccccgccatcgccttcggtggaaagcctacgacacggtccgctgggagttcggcacctgccagccgctgtcagacgagaaggacctgacccagctcttcatgttcgcccggaatgccttcaccgtgctggccatgatggactacccctaccccactgacttcctgggtcccctccctgccaaccccgtcaaggtgggctgtgatcggctgctgagtgaggcccagaggatcacggggctgcgagcactggcagggctggtctacaacgcctcgggctccgagcactgctacgacatctaccggctctaccacagctgtgctgaccccactggctgcggcaccggccccgacgccagggcctgggactaccaggcctgcaccgagatcaacctgaccttcgccagcaacaatgtgaccgatatgttccccgacctgcccttcactgacgagctccgccagcgatctcagagccgccagcaacatcatcttctccaacgggaacctggacccctgggcagggggcgggattcggaggaacctgagtgcctcagtcatcgccgtcaccatccaggggggagcgcaccacctcgacctcagagcctcccacccagaagatcctgcttccgtggttgaggcgcggaagctggaggccaccatcatcggcgagtgggtaaaggcagccaggcgtgagcagcagccagctctgcgtggggggcccagactcagcctctgagcacaggactggaggggtctcaaggctcctcatggagtgggggcttcactcaagcagctggcggcagagggaaggggctgaataaacgcctggaggcctggc

SEQ ID NO: 693802 - DNA, 235 bp, Homo sapiens
gcaccccggctctaacgtgctgggattacaggcttgaaccaccatgcgtgggcccagatctttcttgaccccttctctctgtgtattctataccattgagcaacagaacacacacggagaaacagggcactcgagtcattctggagttaagaggaggtaataactagccatataggaaatggaattccattctttaatccttcctttttgggctttttctaagaggctagagcag

SEQ ID NO: 693803 - DNA, 1176 bp, Homo sapiens
gtccaattccctaatgtgacgggcgcccgcggaaggcgacatgggctccgctccctgggccccggtcctgctgctggcgctcgggctgcgcggcctccaggcgggggcccgcagggccccggaccccggcttccaggagcgcttcttccagcagcgtctggaccacttcaacttcgagcgcttcggcaacaagaccttccctcagcgcttcctggtgtcggacaggttctgggtccggggcgaggggcccatcttcttctacactgggaacgagggcgacgtgtgggccttcgccaacaactcgggcttcgtcgcggagctggcggccgagcggggggctctactggtcttcgcggagcaccgctactacgggaagtcgctgccgttcggtgcgcagtccacgcagcgcgggcacacggagctgctgacggtggagcaggccctggccgacttcgcagagctgctccgcgcgctacgacgcgacctcggggcccaggatgcccccgccatcgccttcggtggaaagcctacgacacggtccgctgggagttcggcacctgccagccgctgtcagacgagaaggacctgacccagctcttcatgttcgcccggaatgccttcaccgtgctggccatgatggactacccctaccccactgacttcctgggtcccctccctgccaaccccgtcaaggtgggctgtgatcggctgctgagtgaggcccagaggatcacggggctgcgagcactggcagggctggtctacaacgcctcgggctccgagcactgctacgacatctaccggctctaccacagctgtgctgaccccactggctgcggcaccggccccgacgccagggcctgggactaccaggcctgcaccgagatcaacctgaccttcgccagcaacaatgtgaccgatatgttccccgacctgcccttcactgacgagctccgccagcgatctcagagccgccagcaacatcatcttctccaacgggaacctggacccctgggcagggggcgggattcggaggaacctgagtgcctcagtcatcgccgtcaccatccaggggggagcgcaccacctcgacctcagagctccaccaaaaaatctgtccgggatgaggcgaaattgaggcccatatcgcatgggtaagagcacgttgccacagtt

SEQ ID NO: 693804 - DNA, 167 bp, Homo sapiens
ctgctgcctaaccagaatcatctgagaactgattgagcgagtgcattataccccagagactagtgcactcttaggataaaaggagtcattcagtcccttacttttggttggatgcagagtgtagttacaataagatgtcactcaacagatttctgtgcccatttcaa

SEQ ID NO: 693805 - DNA, 763 bp, Homo sapiens
gtccaattccctaatgtgacgggcgcccgcggaaggcgacatgggctccgctccctgggccccggtcctgctgctggcgctcgggctgcgcggcctccaggcgggggcccgcagggccccggaccccggcttccaggagcgcttcttccagcagcgtctggaccacttcaacttcgagcgcttcggcaacaagaccttccctcagcgcttcctggtgtcggagtggagacccccggccctggcccgggcgcggccgtcgcaagacgcgaaccgagcacactcggtcaatccgacacccgtcatgcagaagctcaacaacgagaaaaggataaatgggtacacagccgagaagcggaccaacaatatctgcgataacagacgaagtaacgtagaagcaaaagtggtggaacaccattcaacagaaagaaatcagaacttcgatcaacaagtgactaggaggccaccgaaaaaaccacacgacacatctcgcaggacgaccacgcaccacccacggcaaagctagacagaccgcacggcaccccaccaaaaaccacacccggcaccaaaagcgatgcctgcatgcacggcataggagcaacgccccggcaacgacgacaccgagacgcatgacacacacgccgatcacgaaaagagaccacacacgccccaagggaagcgccccgcccaaacgaaccccgcactcaaacataaagggagggatcgcccagggcgcaaacacagcagaccgacagcaaatacacac

SEQ ID NO: 693806 - DNA, 372 bp, Homo sapiens
  misc_feature (15)..(16): n is a, c, g, or t
  misc_feature (19)..(19): n is a, c, g, or t
  misc_feature (30)..(30): n is a, c, g, or t
  misc_feature (57)..(58): n is a, c, g, or t
tagagatatcgaatnntanttatttatttnttttgaggcagagtttcactcttgttnnccaggctggagtgcaatggtgcaatctcagttcactacgacctctgtctcccaggttcaagcgattctcctgcctcagcctcccaagtagttgggattacaggcacatgccaccatgcctggctgatttttgtatttttagtagagacggggtttcaccatgttggtcaggctggtctcgaactcctgctctcaagtgatccacccgccttggcctcccaaagtactgagattacaggcgtgagccactgcgcccagcccagaatggattttctgattcttgctgtgatatttctgacatggttacatattacg

SEQ ID NO: 693807 - DNA, 359 bp, Homo sapiens
ctcccccacatattcgatcgcggagaacggcggagcaaagaactcatcgttactagcaagttcgtagaatggacgcaggctggacaatgatggcatgaatgaggaggctgcaagtgtccctcccgcggtttaaactagcagagacagctactacatggatagtgtcctgcgcgacctgggcattactgatgccttcgagctgggcaaggcagacttctctgcgaatgtcccagacagacctgctctctgtccaaggtcgctgcactagtctatcgctgtgaggtcaatgaggaaggcacggaggctgcagccgccacagctgccatcatgatgatgcggtgtgccagattcgtcccccg

SEQ ID NO: 693808 - DNA, 106 bp, Homo sapiens
cgaagcgtgatagccgcacatactggtggaacttcacatcctccagctccacggatttgctttatgccgcggcccgtgtttgtcaaacgaggaccttgtccgttga

SEQ ID NO: 693809 - DNA, 348 bp, Homo sapiens
  misc_feature (25)..(25): n is a, c, g, or t
  misc_feature (27)..(27): n is a, c, g, or t
  misc_feature (34)..(34): n is a, c, g, or t
  misc_feature (269)..(269): n is a, c, g, or t
  misc_feature (290)..(290): n is a, c, g, or t
  misc_feature (334)..(334): n is a, c, g, or t
  misc_feature (346)..(346): n is a, c, g, or t
gtcgatgggtttgtgggcgcaggcnangagcgangagcggtactggggctagtcctgttccctggcgtctgggcctttctgctctccgcaagagcttgggtcgcgacctgtcactgccagccgtgcgctcgccctctgcgccccgtctcgtggtcactgccgccctccctcccgccacacctgtgatgatcgctatggagccgcgcctcaggtggcattactataaacctaagaggagaggcgcccgttcgaataagggcaaattattnagtattttgtcttcaatgttnctgggcagcttaaagtaccaactgggacacttgtcactagtttngagaagtgcagnca

SEQ ID NO: 693810 - DNA, 284 bp, Homo sapiens
gatctgacgctttctcctccaggatctgtaagtcccaaaaacgcttaagtttcacagctgcgagttgtgtcactgaagccgtggctgaaatctagatccctgagtgtgacggcgggcccaaagggccccaagcaggtagatcccatgctgatgctcttgtatcctggccctctcagcgtgtagatggagagtaattgccggtgctaagactgatacaagtttcaccccaaacaactgtagcctacgtctgcacggacttgcaagtcgcaggctggggagcgcca

SEQ ID NO: 693811 - DNA, 461 bp, Homo sapiens
agtactcagcttacggaatcttgcatctggattaatgttaattactagaaaatcagaaatgtcatctccaaaaaatgtgaagagggttgtaaaaactaatcactttatttgatattatagttgtagatatggaatatcttttcatgacacacactcacaaagcaaacatgccactcaacatcattggtcatagcaataggccagaaggaaaacaaattctgtgatcacacttgtctctattaataccaagacgaaattctagtccaagcttcaatacgcttcctgtttattcactcagatcatttcttttactgctgctctctcattcatttccacatttcatattagaggattggtcacagccttaacaactatcattagacaggagcaaatccagtatccactgattacttctcaaaggcactctaacccatcaaataagaccgaaaattacatttctc

SEQ ID NO: 693812 - DNA, 208 bp, Homo sapiens
  misc_feature (179)..(179): n is a, c, g, or t
  misc_feature (189)..(189): n is a, c, g, or t
tcaggttcacacaggtcaaactgacgctcagactcttggcacataatgtctggtagactgctgtgtgggtggcagtggctgtcactgtgctcggaatcatgattttgggactggtctgcctcctcaggtggaggagaaggaaaggtcagcagcggactaaagccacaaccccagccagngaacccttcnaaaacacagaagagctgtg

SEQ ID NO: 693813 - DNA, 149 bp, Homo sapiens
  misc_feature (104)..(104): n is a, c, g, or t
atgggtgctcatcccccaatgatgaggtgattacggaagtccaggagttttacaaggaccactacaaaaatgctgaaaaccaaggattgagccccaagggaaanacgctgaaaggcattcaattatgcgtttgaacttgcttgtggttt

SEQ ID NO: 693814 - DNA, 876 bp, Homo sapiens
ggacttaagatggcggcgtttgcacggagtgaaatcactgcgtccttacgggggttgcaaggcgtccgaagtatgagtccactaacaaaagtccagaaactcgccagtaatagtatgtgtgtctcttcaaaatatcgggagaataatttcttcctcgcggatcgccataatttcatacggacgaagctgggaagttgcagaagatggagttcgctctgtgtggcccagcgtgcaatgcaatggtatgaccttttggtttcatgaacctctgcctccccgagttcaagtggttctcctgcctcagcctcccgagtagctgagattacaggtatgcgctaccaggccgggtaattggtattaagtagagaggggtttctccatgtgtgggtcagactggtctgtaggagaaatagattcactaaaatattacagccaattagtaaaaataagacagtaaatagtaacacctgtgtcctggagtgatagtagccagtatggtaccatatatcctgacaatgtttaatttcaacaaacaaaaataatgtggagataaagagaagtaagaacactgtgaccttatggggaagaagaactgcaaacatctcaattgaggcatagatgggtaactaagcagacaaattattcaatggcatataaatatttaaaagaatagagggaccaatcctagggggagatatattccacatattggccgtgagattactacgggagcattttgaagaccttggactgggtgtagctaacagcatactcctgagtgacacaagttggggaacactggttgggaagttgataccttaacaaaaggagtcgtcaggacggactatgtgtgtgtgagacaaaaaagcctgctgg

SEQ ID NO: 693815 - DNA, 128 bp, Homo sapiens
cggcacagtaaaaccacatatgcctttctatcaaactgcccagatcctgcatgggcctgctgctttagtgggatctgttggtaaacacaggcaactgcatttttcataacctatgatgtattatccag

SEQ ID NO: 693816 - DNA, 345 bp, Homo sapiens
cagtccaaggtcacacggcagtgcactccgttggacaatgtccaacagaaggaggggcctcgaggttcatgctggcaggtccagcaagtcaccgacgtaatgacgattgctcgacgacaagcacccatgcaaccaacccgtggaagacaagcgcagccgcgaacaggtacggcagaacggcacgctctcgttagcgatcaccccgaagtagcctttgcccggcacttcgtagcgcaccgccgtcgcgtccacaggagcgttggcttgcaggtattcgtgatgctcgccgatcaggctgagtagctgctgcagactgacaaattgctgcagaaacgcgttggagtc

SEQ ID NO: 693817 - DNA, 814 bp, Homo sapiens
  misc_feature (814)..(814): n is a, c, g, or t
ggcagtctgtctgagggcggccgaagtggtggctcatttaagatgaggcttctgggtggttctcctaatgtgcggcggtctttggcagagtgtctctctgcgacgcatgatggcgtctgccggccaaacttcgtggtgcgggtgtcgccccacgaccaacgactgatttacagactgattgcaagtactgccagctgtgggcccttgttttgcatcaaaggtttcgcacgaattttgttggtttccttggaggggtttaatacgggccggggggtggtatggagggacggtaaccattgctgcgcgtttcaattaacgccatgctgtgtaccccatggaacattcctgcattttgacaatggcgacgatgaacactttacctcctccccttcaaagcagaataatattaacgaacaaccagttaaggcagtactttttcacgttgtccagctcttttacaaaatcttaaggtaatttacacttaacggggccttttaaacattaacaggtttagggcttgtggggacaaaacagtgggggaaagttttcgccactttttatattattgggccattatatagcttattatgtgggacgacaattttggcacaaaatgtggttttcccattaaagagccaatttcttgggagacaatggttggggtgggggccaaaatggggaaggaaaagtaagaggcggttataattgggcattgtttattgagtatgcgtgattcagttaattatggaaggccaaacacatttgcatttggaggaaatccaaggttggtattgttcagacatggtttgcaatn

SEQ ID NO: 693818 - DNA, 637 bp, Homo sapiens
tgcattggctcacgcctgttatctcagcattttgggaggccaaggcaggtggatcacaaggtcaggagtttgagaccagcctggccaacatagtgaaaccctgtctctactaaaaatacaaaaattagccaggcgtggtggcgcacacctctagtcccagctactcgggaggctgaagcaggagaatcacttgaacctgggaggcagaggttgtggtgagctgagattgcaccactgcacttcagcctgggcaacacagcgagactccatctcaaacaaacaaacaaaaatacataggccgggtgcattggctcacgcctgttatctcagcattttgggaggccaaggcaggtggatcacaaggtcaggagtttgagaccagcctggccaacatagtgaaaccctgtctctactaaaaatacattagccaggcgtggtggcgcacgcctgtaatcccaactgctcaggaggctgaggcaggagaatcgctagaacccagtaggcggaggctgctggtgtgctgagatcgtgccattgcactccagcctgtgtaacaagagtgcccataaccaggagaatgtttaacctggaagtgaaggtgcagtgagcccgagcccaccattaaccccttggcagc

SEQ ID NO: 693819 - DNA, 181 bp, Homo sapiens
tgtcagaggatcccggaaacgacatagaggcggacatgtctatgtctgattacgagtcctaaatggtctctacctcttctcatatcccactttatgtcttggtctggagacagattccttcatctgttttgggggttctgtgacccagtacagatttgtaacatggtttttctttacagtt

SEQ ID NO: 693820 - DNA, 145 bp, Homo sapiens
  misc_feature (131)..(131): n is a, c, g, or t
ggtacttatggcagtgtcccccccgtgaagttcattttaacaagcatttcataagtagcttctgagtcaggagaactgccacgtttgtgaaatccctgcggttcccgcttttcctgacatgaggagaccanccttgtgacttgtc

SEQ ID NO: 693821 - DNA, 118 bp, Homo sapiens
  misc_feature (55)..(55): n is a, c, g, or t
  misc_feature (73)..(73): n is a, c, g, or t
caactacctgactggtccattccaccccagacaaacctgacatgactgaactacntcatgtgttactttcccnaaaataaagtttaaaaaaaaaaggaactcatgataaatgcagatc

SEQ ID NO: 693822 - DNA, 218 bp, Homo sapiens
ccacgtttaatcacaagatcccaagcccggtccattcaactaacaaccagctctttgcaccctggagggcgaatgagctggggcaagggcagcagcggagggtcacgagccacgccctcagacgcagcatcagaagctgctcgcccagctaatagtactttgaatcgcatctcagcccttcaacaagcgggacccacagaaagcacaagataatagaa

SEQ ID NO: 693823 - DNA, 1028 bp, Homo sapiens
cgtgacttcgttgggcaggagtaccgtcctctgtcaagacacaccaacatttctttaatttatggaccctctatccaagaggatagccagctgaccgtgctagacatctgactggtctactgtcgaagacatcaacgtgttgtgggatggatcgtattcattcttcagaggacagacacaggccaatggggacagagtggcgaccggttgtgtgtccaggtccaatggcccctaggtatcagatgcctgtggatattattagatcatttgcccataagaaggatgtgaacatggctctatgatctctgagtgtgacctttgagcaggtcccgatggatagaaagaccagtcctggctctcggagtctacaactcgcaaagcgttcaaacaagtaaggaacccagcaaccccattctaaagctcatagcaccgctgacggggacgtcgacgaatgcgacctctatccacgggaccagtgtcgctcgaacactcctgcatacgaacacggacacatggcaatctctatagcgaaactaacacgacaatagaggacaggacgcgaccacgcgaccaaggcagaatcgacaacggacaatatcaggcaaagtcccaatcttggactatcgaggcacatttcctagcccaacgaggcatagactgcgagtgccaagcagcctttcacaagcactgcggaggtccctggaaaacagttcgcgcagtaatcccagtgcacgtcgccgatggcagcgttcacgacctgtgcgcattttggctttcgagagatctacttcagagaacaacggggctaccgcaatggaatttaattacgacgcggcagaccggaaacctgcagcgggcctgtcagtgttcaccgaagcagccaaggtaacgccacgcggtttcacgggcagatctattctgtgaaagtcgtcgccacgcgcgacaactggcggggaacacggacacgatgcgacaaacgggggacaacctgacacgcactgcttcgcctgctgcggtgaatatggtcc

SEQ ID NO: 693824 - DNA, 128 bp, Homo sapiens
cactccaccgccgccgccgccgccgccgctgccgctgccgctgccgcacctccgtagctgactcggtactctctgaagatggcagaagctcaccaagctgtggcctttcagttcacggtcactccgga

SEQ ID NO: 693825 - DNA, 645 bp, Homo sapiens
tcctgagttccacattattctttttttttagatggagtcttgctctgtcacccaggctggagttgcagtggcgcgatctcggctcactgataagctccgccacactagggttacacagccatgtctcctgactcagactcccgagtagctgggactacaggtgctgggctttctgccacttgaatacctgtttcttatcgacccgtgtgtggtctgtgtcttatagagtacttgggcgtcactaaaatggtcatctgagtgccagtactcgcgattggattatctgacgaagtaaagaacctatgagaagaccttgtgcgcgaattatcgcccccatcgacgtgaaaaatggctggggttgaagagcttggattagaattatgcgcttgccaccccactgttatcggtccttacaattgcgtccaccaacacacacgaaggaaggcgaggatcgacaccaggggaagaggataattggccaacatgggttgcacgcagcgttccgtggcagaagacccgctccaatacgcggacgggacaggactcaatatcacgctgccaaaggatttgggagggtatggcgaaacgcgtgcgccagacggcctggcacaagaaaggcacagccttgagccggaagtagtagag

SEQ ID NO: 693826 - DNA, 256 bp, Homo sapiens
  misc_feature (183)..(183): n is a, c, g, or t
  misc_feature (220)..(220): n is a, c, g, or t
  misc_feature (241)..(241): n is a, c, g, or t
gacatgatgggctaggctgccgctactttaatactgttagaggccctcaaaatcacaaactatgctcaactcactctctacatttctcataacttccaaaatctattttcttcctcatacctgacgcatatactttctgctccccggctccttcagctgtactctcactttcttaagtcccanaattaccattgttcctggcctggacttcaatctggcntcccacattattcctgatacnacacctgagctccac

SEQ ID NO: 693827 - DNA, 1021 bp, Homo sapiens
ggcagaggtttcactgagccaatattgcgccactgcactccagcctgggtggcagagccagactccctctccaaaaaaaaaaaaaaaaaaaagacttaattacgggcagcagtcagtttcacccagccgggtttggttgaggattaaaccccaaggggctcccctgtgggcattcttgggcccccttcacgcctttcagtgctctctcctcaactacttgaacgccttgggcttaattgcaggacccaattgagatcctcccggaagggggattgccacaaccattggggcccccttgtgtgacccgtggagaggtgtcaccctcttctcaggaattgccacaaccattggggccccccttgttgaccccttggagagttgttccccttcttgttcggggaaatgtgccacaatccttccttcgtgccgggagaccaggtcgtggaagcccaaagtgcctagtggggcttattggcagcttgcctgcgggtgcctcagtgcaggccgtggttcaccggccaacccttcctcctttggtccgtggctccgaagccccgaggagcgccttccgcccactgggggttcctggtggccattgagaggagtccctgctgcgtgtcaggaacagaagaccttcgttgcccgtgaggaccaagcacttttgccaccaaccggtcaacttcagcccgtgggcgttagccgggacaggaggagaagcagttgatgcggaatgggttaccgcggggaacaacaaggcccttcagaagacttgagcttcttctgggcccactgtggaaacctcgaaaccacgaagctccttgcgagaagtggggccctggaaattgaggggtccctgggaactccctaatgggagaatccggggagcatgggatgcggaaccttgcgaaagcgaaacttgaggggctgtgccaaggcagctccagggggtacacggcctgggcttaagaccctccttgtcccgtctaaagggcgataagagtgtcaaatctcagaacagaag

SEQ ID NO: 693828 - DNA, 936 bp, Homo sapiens
agcgggcttccgctcgcgccagcgcgccgccgccggcacagccgccagccgcttcgcgttcggcgggggaggagttggaggcggagcaagcaaggcggtggtggcagggtggaggttcgagcgctgttctcgcatccggagccgcctgcaacattctcggacatcttactagcggcattgtcccatgagtgctgacattacacctcacctgaccatgcacaatctcaatacattcctagctggagagcctcggctccaccacgatggaccgcctggcgccagtactactggtcgaccacgataacgaccgtgggacacctacggacgccccaagccgagcccacatttgggacaccgacacgacattccttcggctccccggtgcctaggtccctggggtccacgaaaaaaccctaagactaagagcacgcggcgataattccaccgcacgcaccactcttaccctaggggcccacgggcaaccgcactaagttcggggcacagggcaacgggaaccactttgccgttctactttggtcccacggtactgtctcaatagaatcccaacgtggcttcatttgcaccccccacggaacccgattggtcacccccgggcaaagggccctcttagtgcttccgacgggccctgtcgggtcgcctttggcacccttaagttgcacatacggcctgggttcgtggcgcaaaacccctacctccaaccttggcacgttggggttttgcccccatccataatggtgcaacgatgacgagagtctgccggcagttgccgaagcgggcttttgccccaacgcatccccccctcatctagggggaacgttctcgaaacggggtgtttgcgcacctttgtcccgttgctcccatctgttttaaacagcctcccaacgctcctatgtcagcaaccccccatttaacctt

SEQ ID NO: 693829 - DNA, 156 bp, Homo sapiens
acctccctgcagcttaatccttggacttggcttgaaaatatggggtgagaatcgtaataaaaggatattgaagacttatcccgtgctcactatgctcattacccattcatggattaatggtttaatggattagggggttatcatgggagaggagga

SEQ ID NO: 693830 - DNA, 293 bp, Homo sapiens
acttgggttttttttttggggggttttaaagggccttatttgcaaacaactttttttttccctccgggactgtgaaggggtaaaaaaaggggccccgttaactaaaaggcccggggggcttggttttttggtttataaaaaatttgaaagcccccctgcccttccttttttttacccccccctccggtgaaagattttttttttgaaagggccagcccggggactgaaaaaagggttggcccttttggggggcccgattttttagataaaataaatattttttcttttggcca

SEQ ID NO: 693831 - DNA, 279 bp, Homo sapiens
ctcgtggactcgtacagcgctaagctcgatgattttactgagtagctaaataaatgctagctttatacagtctacgaaaaaataaccttgtcacagagctgcatcagtattctcacgcagcacggatcataatcttctaatagctatctctcaaaatatctctcggacatgaacatagcaatactaccaatcatactcatcattataatcataatggtatagcaataaactaggaatagccccctttcacttctgagtcccagaggttacccaaggcaa

SEQ ID NO: 693832 - DNA, 824 bp, Homo sapiens
  misc_feature (1)..(1): n is a, c, g, or t
  misc_feature (61)..(61): n is a, c, g, or t
  misc_feature (69)..(69): n is a, c, g, or t
  misc_feature (82)..(82): n is a, c, g, or t
  misc_feature (120)..(120): n is a, c, g, or t
  misc_feature (137)..(137): n is a, c, g, or t
  misc_feature (152)..(152): n is a, c, g, or t
  misc_feature (159)..(159): n is a, c, g, or t
  misc_feature (183)..(183): n is a, c, g, or t
  misc_feature (189)..(189): n is a, c, g, or t
  misc_feature (195)..(195): n is a, c, g, or t
  misc_feature (221)..(221): n is a, c, g, or t
  misc_feature (224)..(226): n is a, c, g, or t
  misc_feature (228)..(229): n is a, c, g, or t
  misc_feature (232)..(233): n is a, c, g, or t
  misc_feature (266)..(266): n is a, c, g, or t
  misc_feature (269)..(269): n is a, c, g, or t
  misc_feature (276)..(277): n is a, c, g, or t
  misc_feature (280)..(282): n is a, c, g, or t
  misc_feature (285)..(286): n is a, c, g, or t
  misc_feature (290)..(290): n is a, c, g, or t
  misc_feature (339)..(339): n is a, c, g, or t
  misc_feature (369)..(369): n is a, c, g, or t
  misc_feature (379)..(379): n is a, c, g, or t
  misc_feature (385)..(385): n is a, c, g, or t
  misc_feature (394)..(395): n is a, c, g, or t
  misc_feature (427)..(427): n is a, c, g, or t
  misc_feature (445)..(445): n is a, c, g, or t
  misc_feature (448)..(448): n is a, c, g, or t
  misc_feature (453)..(453): n is a, c, g, or t
  misc_feature (472)..(472): n is a, c, g, or t
  misc_feature (474)..(477): n is a, c, g, or t
  misc_feature (685)..(685): n is a, c, g, or t
  misc_feature (688)..(688): n is a, c, g, or t
  misc_feature (745)..(745): n is a, c, g, or t
  misc_feature (815)..(815): n is a, c, g, or t
ntggcatatgcattacacacccatcaactctcagctgtgtcttaataatgttgtacgagangccaaaanaagaaggatttgnaacaatgctcctggagtacctccaccaatatctttaancacagtgactttcaggnggcttctcgccaggngcatgcnggggggtgtcaatgcctccctttnctgggngggtcnggagggggtcggggggggggggggcnggnnngnnggnnttggggcgcctggtcactgtgcgctcactcagnggngggtccnnatnnnttnngggngagagtgggaatggctgggaagggattctgtgttcacgggttgtgaganaatattgttaagatggcaataccatctgangtgatctacnggttcngtgcgatanngtcggggtcccagaggggtttttgcggagacngagggactcattctgagntcntacgngggttcggagggtctggcngnnnnaacggtcttgggagagagcattggggagctcacatttttcagtttcacagcctactacaaatctacagtcatcaagagagtgtggtactggcataagaccaacagacttttagaccaatacaatagaacagatttgagatcctacaaattagtcctcacatatatggtcaatgactgttcaacaaggtggccaagtctagtcaagggnggnaagaacagtctcttcaacagctggatgtcagtgcacaggagagaaattagacccctnccttgcagtatatacaaaaattaattctaaattaataaaagacttaaatgtaagggctaaaatatgtaantcttaggag

SEQ ID NO: 693833 - DNA, 880 bp, Homo sapiens
cactaaagattctagtagtcactcgcagtgcccaagaattatcaaagtacctgagactaggcaactttaatatgactagcttgacacacagtagctttgatagtgaaagatagcctcgtttaggtgagctccacgtgtatgatcatctcgcataaagcctgatgtctgaaagccccgatcgctgggtcaagtagtacttgcctgacagatactcttgaaacgtaggcggctatggtataatacgcctcacactcattctaaacccccgtgatcaagagcacatagtcgtaccatttccttggactatcccctatgaggcatatttataacctaggctccgatcgtgcctacggatagacaggagctaaagatgagctcatggcatatctcttacatagtcagccagtatagctcctcggtatggaaccagcgatgctgatccaaacttccgctgaagcttggaccgggcgcagtcgattcttcatgaatcgcccacggacttacctactcctcgatgtattaattctgcctagaaagtcgaatctaggaatcgcatgcacagtcagcattcatggatcgtctctcaagggagttccagaacttctagctcccagtagataagcttttcgattgaacttgctagcaaggccttggggttagagcgtcgtccattgaccccgccattgattaaacctacgtgggacgaaagttctgcgtgtaggctacgtagcccacaggttcgccctggttcaaaatatccattcctcctgacttgcgggattcaacataatgagtcacaggccttttaatcccttctacttgtttccacagaccatggggtccatcaacccccgttagaataaagcgcatacaggggaaa

SEQ ID NO: 693834 - DNA, 176 bp, Homo sapiens
tggttagagctcatgcaactgcctgatgatgtcccgtgaagaccccaatggattccagtggctgctcttcttgagccagacaaggtgctgaaggcatttgtcctgccttatcttgagtgtatagatgtagcagaggtagacctcagtctgaggatcttcatccagactctagaggc

SEQ ID NO: 693835 - DNA, 883 bp, Homo sapiens
gaggctccgcttcgcgctatcgcttgcgatggttgaattcccctcctcacgccagcctaggagaagaagttcgtagtcccagtaggtacgaggagttgttccgcattgtcaagtagtaggttgcacggtcatgtcttcaattccgtctagtttgtggatgatggaattgagcttaaatcgaactactattggaatgtgaactctgtcctgtcacagaagtcatatgtcccaatctgatgagcaaatatgcttgccatcttggttgccagaatcagctgccatgtcgctgaactgtagacaagaacaacttatgtccctgatgccaatattgcacctactctttcctctaactctggtgaggtcattcttggagtgacatgatggactccgtgacagagcttcataacctctgtcatggacttttgatcttcaagtccgatgactggaaaaactagttgatattccagtctaagccggacatccagtacgcaccacatttggagcaggagcctacatattctgagagaatcttctctaagcataatgtcctagtctgcagatgatgagcattcacgagcgcacgggacatttcttgaagcatggagaacgtgatggcgtttttaaagatgcctctctcttgactctgggtggatttttgactacgactctttgtccatctcggatgatcggctataggctgttggatttgtagtgcaactgtttgctaccagctcgtgggagccagtatgttcccctctgagaagctgagtatctatggtgaccttgaagttcattgacatgagcaaaggctaaaagatatccagttctccctggagcgtaagtctaactgaaatcatgacaggcggcctctactacaagtatc

SEQ ID NO: 693836 - DNA, 455 bp, Homo sapiens
cagtgctaatctcagcataacattttgtatttgtcaggccgagcgaggtggctgatgcctgtatcccagcacattgggaagttgagggaagcagatcacttgaggtcaggagttcaagaccagcctggccaagatggtaaaaccctacctctactaaaaatacaaaaattagccaggcatgggggtgcacacctgttatcccagctacttgggaggccaaggcaggagactcgcttgaacctgggaggcagaggtcgcagtcagctgagcctgggcaacacagactccatctcaaaaaataaaaaaaaagtttgaaaaaattttttttgtatctgttcaactggcttttttttttgggggggggggtactgggtattcaggttataaatacaagtgaacaccggaaacactttacaaccagtattcaaatgacaggccctgtttggactctgggg

SEQ ID NO: 693837 - DNA, 184 bp, Homo sapiens
tgattgcattgtctaaccatacaggcatggaatataataaaactctaaaaagaaatgatacatccagccatgaaaatgaaatagatggaaataaaaatagcatatatgctaatgtagaaatgaatgccaatcttagaaaatgctacctaacagtatagatatacatataatatagacacatgtg

SEQ ID NO: 693838 - DNA, 350 bp, Homo sapiens
gcgagtatgtctgtaccgaatacatgaaaggtgataaagccatctggtgtagagggaaggggacaagtgtacgcccctaactcatttggctcatcttcttccaataagtggcatcaacatacaatgaggcattaattgatccactttggtggacttcaggggctcctagactcaggtacagagatacgtgctactagggccctgttttttactgttgttctccactaaatgtgctccagttagagcaacaggatgttgggggaatgaagggaaagagttggtatcaatggagtgggagaggtgaggagatcacaagaggaatttggagcccagggtcagccctctcatcc

SEQ ID NO: 693839 - DNA, 878 bp, Homo sapiens
aaaagtgtaattccaggtaaagagaacaaaaacaaaacttaaacggaaacagggaccacagtatggggtgctaccagactgctccaccttcctgggcatcttcgtggccatgatcctcttcccctttgggttcatttgctgatctgacttgaggaagcgacgcatgccccaacgtgcggagccaccttcgctaagagggaacaccaggcccggctgtcctacacccagctgtcttttcctaatgtaaatgttcgtgtacaataattatatttttttaagcttgaggacgtgtatagcaaagccaggagcgaccgatgtggaccacgccagctgcgggtacccggagcgtggagaggcagtgctgctgctcccgcccaaagctcatgacacctcaataaagcactgcttatattgtcgggcaaacctaaatctgagaaacgctgaaaataagcgttccaacaaatgagagtcataccatgggtaaaaataatccaaaggctggcctcggtgggcctcacgcggtggaactatgacgccgcttcactcaagcgagggtaaattctggatactgcgctcaataactccaatggccacgtatgagcggtgcctccaagcggcccacgcccactcaagggcagcaatacctgtatccctcaaaatcaggggatgacccaacgaaaaaacatgtaccaaaaccgcaagaaacgcccagaaacccgaatagggccccgtccttggccgaccttacatgggcccggccccctgccgagcatcacgaaattggagctcaaagcaacggtgtcaaatcccacgggacttcttaataccaggcggtcccccgtgaaacccctctgtcgcccacaacaccaaccagcctt

SEQ ID NO: 693840 - DNA, 464 bp, Homo sapiens
cctagaggaccccgactagtccaaccataccattctggctaacttaagctcgtgaaattcacactaagccactgagcgtcatcttgtaaaaagttgcattagaagattttcagctgttccaaatgggacttgtaagtggaatgtgttgtacaggatcatatcagatgaatgaaaggtatatggtccttcgtttccttaataataaaatgatggttggggcagaataggctagagtctaaacacagagctattatgaggctttattgttacacacgaggtctaagcctaagtatgtcaatacaacacatacttactgtttcattactagtaatgaaaagaaagagcaggtcttagtggcataaggatgatttaaatctggttattgggcaacattgtggcctgataaatttacatctactaagaacatttctataggtatggtagggacctagacggagaaccga

SEQ ID NO: 693841 - DNA, 472 bp, Homo sapiens
ccagagctcttgagcgcactttcgccatctcagtcacagatccagacctccggagcccactttcccgatctcatcaccagtgatgacttgggatgagatgtcggaaggagggatgagatgttggaaggagctatgagatgttggaaggtgccatgagatgttggaaggggcaatgagatgttggaagggggcatgagatgttggaaggcggtatgagatgttggaaggagagatgagatgttggaaggagagatgagatgttggaaggaggcatgagatgttggaaggagtgatgagatgttggaaggagagatgagatgttggaaggagcaatgagatgttggaagggggcatgagatgttggaaggagcgatgagatgtgggaagggggcatgagatgtaggaaggagcgatgagatgttggaaggagggatgagatgttggaaggggagatgagatgttggaaagaggc

SEQ ID NO: 693842 - DNA, 469 bp, Homo sapiens
gacaccagttggcgctccgaggcaacctttcagttcactgtggagcgcttcagcagactgagtgagtcggtccttagccctccgtgttttgtgcgaaatctgccatggaagattatggtgatgccacgcttttatccagacagaccacaccaaaaaagcgtaggattctttctccagtgcaatgctgaatctgattccacgtaagacagtttaaatgatgcaactacaaacccccacatcgttgtatttcattactggaagccaaatttgatcagcctagtgcaattttatcttaagttatttgctgcctctacatagccttttgattttaaattagattaaatacgtgtttctctttaaaacccactggtatatgtataatatccaagctagaaaagtatatttttatcttgtaagtgaaaaaactaaaaatagtttgttagaatctccagcatcccccctcaaacct

SEQ ID NO: 693843 - DNA, 110 bp, Homo sapiens
aggcacacaccatcagccgcagggcgtctttgcattgtagtagtcaagggtggccaggtgcattttcatcggcacatgggcaggtgcatacctcagggggcttgttcgca

SEQ ID NO: 693844 - DNA, 699 bp, Homo sapiens
gaaccatggcgcttgtcccctgcacaggtgctgcggatggcaatcctgctgtcctactgctctatcctgtgtaactacaaggccatcgaaatgccctcacaccagagctacggagttagctggccaattcctgacgtacacttgatctggtatatccaggctgtctttccagggcatctgtgtagctgactgatcttatccagtcttctgcactcgaggaagtgggaaccaaggagcaagagcaggcagctcacgaagctcatctcctcatccgaggacctggcactgctacgcatgtgtgcggccatctcccttgtcggggcggtaccccacgttgtaagccacgctgtccatggatcactcaatgtctactcgacagaggaccacctgatataccccgaaagccttcgctggcacctacaattatcactcccacgcgcccgccctgacaaatccaccgcacattgcacactgacggcggctactgcccatatatagtacaaatcccgagcatgcacgcgacactgccaaccactcagccaatccccccagcacacgtccctcagccgcacactttaccgtgcacaacgtcacctctccgtctgatgggcaactactactaatcggcctggatcatgcgaggccctaaatggtacactggcacctgctcgctggcaccccatttaccagggaacaaca

SEQ ID NO: 693845 - DNA, 147 bp, Homo sapiens
tgatatgtgaaacttgagattactggatccatcatgatagactgaagctgaaacccattgataagtctccagaacccaaaccccatcatgactgatactccaattcctcgcaactctcaagatatcacaccagattgacaactccat

SEQ ID NO: 693846 - DNA, 1331 bp, Homo sapiens
  misc_feature (446)..(446): n is a, c, g, or t
  misc_feature (525)..(525): n is a, c, g, or t
  misc_feature (528)..(528): n is a, c, g, or t
agcgggatctcaggtagcattcagattaccctgcctgctctgtgcttgtgctgtcagtaccgatttcgaccaggaacgtgtgcagcgtcagcccagaccacagagactggaacttcttgtcatcgacgacacggggagaggcagtggcagtctgagacgtttgctgagcaaagctgaccgtgaacgctcagagcttgctcgcttaggagagagcatcatggagtgcgcaagacataagggggcaattgcgacttggtgcagccaaagcacgcgtcgggcgtcaccaaggtgtacttgtcgcgtggccgatctagcgactatcatttatcctagaacacgcaattcgaataggcgacgaatgcctgttgtcatgattggggtctccattagttgcgattggaagcttgcgaagtccgacggaaccattcgagactggtctcatgagngagaacgcgttgactcgagacgcagtggggatggggtacatggtgatactatcgagtacatcgtgacaggatacaatgnttntactccaccatcctcgcagtgtaaaggtcccgtgatcctttgggaagagttccagtcgtgcttgcattgcatggtaggacaaggagtacttttcagtcttaaaaatgccaagtgtgggcatgactccaatgagtttgtaagggtggggggttgtggtagctaggactacgcacttttgggcaatcaccattcacaaactttgtttctttgaaatttgggtaatagatggattacgagggcagggacgaaggagtagagagaaatttggtttgttaggaagtttgtaagtggttcttaggacaaaggaaaacggggatgctctcagcgctttgctccccagatcccacttgaggtgaacggttggatattccttttgggcaggatccacggcaacatgatccccattatagataagggcggtgaggtattatgtgaggcgaacagtggttaaaaatccctaaggttctagaggcggaaaaacatctttttgtgataatcatcactaacgcacctaccgaacacttcccacatttttcacatcggcgggcgggacaccactttctcgtttttatccctgaggcgtaggaaaaaccaagtacacaaggggaaactaggtaacacctactgggacagcattccgtaaattgcgttttaggaatgccaaaggataggtgtatttcctttccaatacacattggcgtgcagagttcccacccagcggggaacgttgtgcgaaaaagaccaaatttccaagggccaattggagcgcctttggggtgccctttgggggagacacaattggg

SEQ ID NO: 693847 - DNA, 1044 bp, Homo sapiens
gattgccaagggcaaacagccctcttgacaatctctcagcggccatgacgaatgctgggagcagcttatctacagtccctcgccaagcactcttcatggccgctgagagattgccaagggcaaacagccctcttgacataaaacctgtggatcagccgacactatgtccctttactgacaggagggactctaattccaaggacaagctggctaggctctgcgggggcccaggagtcagccagcatccctgaagtgaggcgggcccgtctgtgcgagcctggtccttcccaggcctgcctgttttatgatgcaggtgttaggaccagatcagatctcgtgcctcagtcacagcctggaatcacaatggaggcttggtgacagtgtggggcgcctggagctgctacagggcagggatccaggtggagagtgggatccagacctaaggtagccaagccttcaaggacctgggccgtgggtctgcgtgtgtcaatcacagggacccgggacagagtgaggactcagctcggtctttccacagagagccaacaacatctctactgtggaatgccaggctgctcctggtaaggggccctatagccacggccatctgcatgagctgccccagagaagggaccgtcccttgagctgggctccagtccctcttctgagatgagggaaacgttggtttgaaaactggggtggggcggaaggcctcgcgaagggacgatgtaacccgcttgttccctttcccatggggtcctttattggccggaaacccgtaaaccaaacattgttgccctccaggggcaggctgatgacaaagggcccccgctttggtaccccaatatggaaacccgcccagggtttgaaagccacgtttaacaagccggagttccctgacaggggggaacggcacacaagggggcacggttctagcaaatcagcaacgatagacagaaacacacacaagcggccgccatcccgacaaaagcgttcaaagcgcgacctcacacacgacacgacttgcagtaccacgggaaagac

SEQ ID NO: 693848 - DNA, 358 bp, Homo sapiens
gcacattggcttaggcatttgaggcagagccacagacccaggaatggaaaccaggagtcctgactcccaggccactagccttcactcagtgggtgcaaggcagagagccaggcctggtggtttatggaggccatgggctagagaagcctcaagggaatagaaaaaaccctgtgctatctgaggttgtgcagctcaccccatagaaaagggacatttttaggttttaaaaggatgacctcattttatccttatatacatagccctgtttgtttatatagccctttaaaaaatagcaagtgtgtgctaagcttaatgctcactgcctaagagagacataggactataatggctgctgaga

SEQ ID NO: 693849 - DNA, 238 bp, Homo sapiens
attctgagagatttccttcccccatcccccctttttttgaacaaaaaaaaaaaaaaaaacaaaaacccttttatacaaaactttcacacacaaaaacaaaatagtgtaataaacccaattttctctaaaacccattttaaacagctacacaaaatgttcaccctttctggtttaattccattctcccctctctttgtgtttggaaagtgctcagagattacgggaatccctcttaaag

SEQ ID NO: 693850 - DNA, 960 bp, Homo sapiens
  misc_feature (941)..(941): n is a, c, g, or t
gtgccagatgattgagggcgtcggtgtgtattgacatcatcaagcactgagatggtcatggagccatcgttccataatgcccaggggttccatagctgaatgcgcaactgtatgggagagccctcaggacagccctggagatgttgaccgcatggagacaactgaacatgaatgcgatgtctggataactgcacaacacgtgttgctccgtgcttcttgattgccggtatcatgatcttttcgtgatgataataaaagctggttggttccgagagaagttcctttgtcttggttcatattaagccgggcgtgtacccgaaactttcgaggtcgattgtgaggtaattatctcttccttaaattaacttatatagagcctagtgagactgtctaaattgctgttccagttctatgcaaaagtctcttattttatctgtctggaatatttggatcgagggcaaagtgatactcctgtgcttaagaaatatggggcagtactttaatttctgaattgattcagtgctggaacagatgggttgacctggtatactctctggcggctaaactttgggattgtcattgtaactgtggttggcacaccatttggatgggaattaattaaggggatagtaattaatggacgaaaattcttgtcggttttaatgggttctataagcgatggtgccatgtccattttccgtattgaacaataaaaggaaatttcacattttttgaagtgggtttacacccctagatttgttttggggtccttagattccctaggtgggatatttttggggagacgacgccattttcaccatattccggttatgttcgcatgaataggttggatcccaaatttaattcctttttgaaccagttatgtgacggataggattgggaaccatttatagggttccataattgcggatttacgatanttgccaattttagtccatt

SEQ ID NO: 693851 - DNA, 1373 bp, Homo sapiens
agtactcaaacaactttatttcactagccaggagcaaaaaggtggaccggcttccaggggatttttccactcctgggccctcttcccggtcgtggtgtggcctcccagtgagttgggaaataacctcagtgtttccactgtggcaggtgccgtggctttgggtgcacccacagtggtttgggcctgtgggtctcccaggtgaaaatgtgggtccttcacctgtgggcgtggggaacatgtgggttcgtgaagaggccccttggactctgtgccctgggggaccatgtggtggtggccagtggcttaggggcccgtgcccacctttcacaggtgggagtgtgggccaaccttcgtgcccagagggtgtgcgagggaagcgtccttagccgtagtgggagaaaatctctttcaagggaagaggtgaagctttctcccacccaacctctccaaatacccaacaattctcctcagaaaaacagaggaggttaacgagggggaacacccaaagaagtctctaagaaaagaccacgagggggctgtgggtaaagcggtggcctataacgaggccaaaattcgtgggggaaccattatacgcggagaaaggagggcgaggggaacacagcaaaagagttaactcccaggaaagaggggagacaagaaactggtgggggccgcggcacagtggaacaatagggcaccacagcacgaaagaacccggaaataaaggggggcggggaaaaactccagagaaaaccacccagaaaggagccccaccaggttagcgccattcacaggggagcaccacccaaacacctggggggctcctgggccaccaccaggggcgaaggttcataaaggggtgcccccgtgaaattccccgtggaaccctaaaaccctggaagggagatggagaaatcccggagggtaaaaaacccgaagggcacacggcatggcgcacaaagggggcccgaaccaggggccaacaaaaggtcggagaaagggcaaaaggaccacggaagggcgagacgtgagaaggggggttcggcacacagaaaactcgggagaggggagggaggggcgcccaaaacgggtgttatgcccccacattgttctccagcctacgcgaagtgggcgctccaaaagggcccccgggggaaaacacaatatcggggggggttgccccaccctcctttgatagaaagccacgagaaaggcctccctaacagagggagcaagaaaccgggcgttactgggtaagacgaggccacaaaaaaaggggaaggcccacccgacgaggtggaaacgagcggcagagcaactgtagccgacctgagacaaaaggcgggtagcaaacacaatcacaccagaggagg

SEQ ID NO: 693852 - DNA, 643 bp, Homo sapiens
aggatgagaggtctgcagtgagctatgatggcgccactgtagctctggcctgggcaagtagcataagacctcctctctaaaagagaaatgataaaaggccaggtacagtggctcatggctgtagtcccagcactttcggaggccggggtggttggattgcttgaggccaggagttcaagaccagcctgaccaacatggcgaaacctgtctctactaaatatacaaaaattatatttgtttaattacataccacggatgtggtggcccgtgcagacgtcccaactaaatggtagtctgagggcaaggggagcaaggcctgggtacagaaaagccttgaaaagcataaaaagaggccgggcgcggtggctcacgcctgtggtcccggcactttgggaggccgaggcgggcagatcatgaggtcgggagattgagaccatcctggctaacacggtgaaaccccgtctccgctaaaggtacaaaaaattggccgggcgtggtggcgggtgcctgtggccccagctactcgggatgctgaggcgggagaatagcgtgaacctggaaggcgagcttgcagtgagccgagatcgcgcactggactccagctgggtgacagagcggactcgtctcaaggaaaacaaaaaac

SEQ ID NO: 693853 - DNA, 416 bp, Homo sapiens
tccatgaataggttatacctctagtctccgactgccacagcatgggcatgttcagcacaattgatccgccacctgcaactagaatcaatagtatagatattagtttcagacggcttgtgcaactaggctcagtaatatgtatccacatcgccaatgatgactctttagaacgtttaagaggcatgtttagagggctccacttcctcaaagttcgcagaaccgtcacttacagcttgtccccaaaaatcttcttcccccacagatttctctcccacaatttcggtctcttggtacaccctgcgggcgaggttcagtcaggtgctctctctggagttgagcttatgattctcctaaactgtggagacatctcggtcagcgtacaagagcttgaacatcgctactcggcaagacatatg

SEQ ID NO: 693854 - DNA, 400 bp, Homo sapiens
gaccttggtcgacccagtgtgggtcgtgaagtgaaaccacccgggcgtccatcattgtcagtcacaaagttgagcacacagaagaatcaaccaactacatccagacatcaatcagtaaaaggcagagcttggatctcaatcaggcgacatggctcagatatcagttttagttactacactctactgtcaaagatgtgtaaccactttgacaattgcatgccacatttcaagctatgaagaatcaaagacaagtctttcacaagatctctcatatctaatgggtcctcactatcacgattaaattccaggctgatgacactgtaaggccacatggccagctgtgctggaggcctggtcaaggtcagagcctgggtttgcagagaagcagacaaacaggcaa

SEQ ID NO: 693855 - DNA, 530 bp, Homo sapiens
acctgctgtactaatgctgtctctaacacttcacgttatctaacatctatgcggatctactagaatttgtgtatgcattgatcagtattgttgatgattcatcaaaaacttcatcatagcatgggattgtatctatgaaagggaagttggtgtcctgcgtacctcaaaaaataatccaaaggataaaatgaaaagtatgtgagaaacctgctttaattataatgtgctatgtataagcattattgttttactctatgacaagcaacagctctgtcctaggtccaaattagaaaaacacatattgatatttcattcagaatctcattaattggaagctagatctgattagctagagagaatgtgacagatttactccttatctcccagtctgcatatagtgaagctcactaatagattaatggatgatattaatagcagtgatctcagatgacaatgctaaaactgactcctgggcatcccctcacatcctgctgtcatacattcactaatgagcaacgccagctgaagtg

SEQ ID NO: 693856 - DNA, 565 bp, Homo sapiens
cacaagtcaaggcacaggttcaatcatcacgcaggctagtgaccttcagtatacctgcctgcttctagctgtgtcttgaatgactgtgtagtggttccaagggaattaagggaggaaggggtgacagatgaaagccatctatgacctctatggcaaaacaactcataacctatagagcacaggtcagtagtggcgccttttaaggaaaatcagcacatggagcttatgccaccaggaagagtcatgtgcttataaactggatcatggtaaattttcattgaaagtatgcattggtactaatgctaagaatggatgcaaagccagtcaacgaagcagcagaaaaggtgacagtctcatgttggccatggggtactctctgcgtcatgctagaaagagtttatggtcccacctgcatccatgagaaagagaaaacaaagcttcaattttaagtccttggaaattccatgccattaagaaactgctactgccagctttctggcgttattcaaaggggtaaaaagttcattacactagtgttcttataagtgtggattatttcatatta

SEQ ID NO: 693857 - DNA, 1593 bp, Homo sapiens
  misc_feature (9)..(9): n is a, c, g, or t
  misc_feature (170)..(170): n is a, c, g, or t
  misc_feature (201)..(201): n is a, c, g, or t
  misc_feature (219)..(219): n is a, c, g, or t
  misc_feature (229)..(229): n is a, c, g, or t
  misc_feature (279)..(279): n is a, c, g, or t
  misc_feature (292)..(292): n is a, c, g, or t
  misc_feature (295)..(295): n is a, c, g, or t
  misc_feature (544)..(544): n is a, c, g, or t
  misc_feature (552)..(552): n is a, c, g, or t
  misc_feature (1015)..(1015): n is a, c, g, or t
  misc_feature (1020)..(1020): n is a, c, g, or t
  misc_feature (1023)..(1023): n is a, c, g, or t
  misc_feature (1046)..(1046): n is a, c, g, or t
  misc_feature (1153)..(1153): n is a, c, g, or t
cagacaaantctaccacagtttgagccaaggcgacactcggggctctggccatccccaatttgtcccccatcaataaccaaggacaactgaggccagagatcctgaactcctcgacattcagagaactggcctgggagctgaggttggcactagtgagagcaagcgaccntcaaacatctgagccaagtcttgcataaaanatgatcagaatccgaatnctacaagagngtaaaaggtttagtccttgttgatctcctccgagcgttccatcaccaggntcactgttccttncantagttctttcaggagcccctcaggtactctcacacggcagtatctgtagacgtcggccacgcggccgaggcatacggccagaggcttggcctcgctgtgacccttgaggcggtacacagcgcgcagatccgccgagcagttctccgcccaggccaggccgtacagcgtatcggtggggacggccaccacggcgccggcgcgcagctcggccacggcggccctcagcgcctcggtccagccggcgcgctncgggctcncggcctgcacggccccgctccccgggagccgcaacagccgggcgccgggggccgccggagcgggactcggcgggcggaagaggcgaccgctccgggagccagcaggcccctcgctcaaccccacgctggcagccaccgcggccctcatccccctgcaccgacgcgccggagacatccgcccaggcccgcttccgggaggaagtgacgctcccagccagcttccggtccaggagactcggccccgcctctgcgccgggcagcttaaagggaccacgacccccaggaggattgaaggagaccgggaggctgccggcgtggaccgcgggaaggcggggctggggctcggcgggaggccacccccacagccgccccgggaggagcgcgcccagcagctgctggacgcggtggagcagcggcagcggcagctcctggacaccatcgcagcctgcgaggagatgttacnggcangcntgggccgccggcgcccggagccnggctggtggcgggaacgtctcagccaaacctggagcgcccccccagccggctgtctccgccagaggcggctttccaaaggatgctggcgatggagctgcggagcccntgaccatccccgagcagaataccctgacttctctccctccccagtgaccggtggctggacttctgaacaagttcccttcagtaagaaggggccaggtcttcacttggcagtggctggtaccttggctctcagccttgagtggcagctctgcgtagcagcttgggttcactcccacttcatccttgcttgaaagcaggtgctgtgctttggaaatgcagccaattgaatacccagtctgattacccagaatttgggcagaccagcaagtgctcgccagagttggtctggcctgctatgggggatccaggtggtgttacatgtccatttcgtgtatcggggggcctttaggccccacaaagacacctttcggatagagcccttggattaccgagtgagacctgagacgtctcaagtagcgtctgtcacgtcgtaaacagggc

SEQ ID NO: 693858 - DNA, 354 bp, Homo sapiens
ggctctgcggggcggtgctagtgctcgcccgcccgaccccggcggctcgcgcccgggagcgccgtagggtcgctggagtcggccgcgtcctttgtgtggcgctcaggctgcgccgcggagcggggggacggaatgtgggcgctgcgggggcttttctctcctacccgaactgtgggaacaatggactgaccgggggaagatggattgagggggccgagcggggaagcgagctgcaccggggaatcatgacttctgcagccgttcaggagcatcccaggaggaacagaatgatcttggtctgggtgacctttccctctgatgaggaggacatcatcaacagtgctgatgaagatg

SEQ ID NO: 693859 - DNA, 440 bp, Homo sapiens
  misc_feature (17)..(17): n is a, c, g, or t
tgaacagccttcagccntagaccttccctctgacagagcctacccaaatgaacaaaccctggtaatatgacaaaacaagacgcttcaacaccccccaaaaaacatactagttcactggcaatggatccaaaccaagaagaaatacctgatttacctgaaaaagaattcaggaggttagttattaatcagggaaggaccagagaaaggtgaagcccaatgtaaggaaatccaaaaaatgatacaagaagtgaagggagaaatcactcagggaaatagatagcttaaagaaaaaacaatcaaaaattcaggaaactttggacacatttttagaaatgcaaaatgctctggaaagtctcagcaatagaattcaacaagtagaataaagaaattcagagctcgaagacaaggtcttcaaattaacccaatccaacaaagacaaa

SEQ ID NO: 693860 - DNA, 867 bp, Homo sapiens
  misc_feature (21)..(22): n is a, c, g, or t
  misc_feature (46)..(46): n is a, c, g, or t
  misc_feature (50)..(50): n is a, c, g, or t
  misc_feature (95)..(95): n is a, c, g, or t
  misc_feature (289)..(289): n is a, c, g, or t
  misc_feature (294)..(294): n is a, c, g, or t
  misc_feature (297)..(297): n is a, c, g, or t
  misc_feature (320)..(320): n is a, c, g, or t
  misc_feature (427)..(427): n is a, c, g, or t
tggggcgtgggcgcagccttnngaagccctaacgcagcgctggggngggnggcggccgaaaggggggcggtggtcgggccgcgcaagcggagatngaatggggcccgggctcagactggtcacggggggaggctgccggcgtggaccgcgggaaggcggggctggggctcggcgggaggccacccccacagccgccccgggaggagcgcgcccagcagctgctggacgcggtggagcagcggcagcggcagctcctggacaccatcgcagcctgcgaggagatgttacnggcangcntgggccgccggcgcccggagccnggctggtggcgggaacgtctcagccaaacctggagcgcccccccagccggctgtctccgccagaggcggctttccaaaggatgctggcgatggagctgcggagcccntgaccatccccgagcagaataccctgacttctctccctccccagtgaccggtggctggacttctgaacaagttcccttcagtaagaaggggccaggtcttcacttggcagtggctggtaccttggctctcagccttgagtggcagctctgcgtagcagcttgggttcactcccacttcatccttgcttgaaagcaggtgctgtgctttggaaatgcagccaattgaatacccagtctgattacccagaatttgggcagaccagcaagtgctcgccagagttggtctggcctgctatgggggatccaggtggtgttacatgtccatttcgtgtatcggggggcctttaggccccacaaagacacctttcggatagagcccttggattaccgagtgagacctgagacgtctcaagtagcgtctgtcacgtcgtaaacagggc

SEQ ID NO: 693861 - DNA, 104 bp, Homo sapiens
cacgaaggacttatgacccatgtgtactctgcaatatctttaactgggtcatggcttctttgttggatcccttcccactatattagaagactcagatgcttcag

SEQ ID NO: 693862 - DNA, 318 bp, Homo sapiens
cacaatgttgtgtttatttctatttcatctaatcttcattgttgtctctcaatgatacagtactccataaatgagtgagaaacgtttcatcaacatgtatgtacatgttcagaaacagctcggtttcaaaaagctgtcagctcaggtagcacgccttggtcttgaattcggtgctacgctgactgctctccttctgaaagcaaaggcaccagtccatgatcaagtccacgccgcataccaggagagaggagtcttctctccaaagtcatcccaagatagttgaggaaataattctatctaatttctgtgcccatttca

SEQ ID NO: 693863 - DNA, 812 bp, Homo sapiens
  misc_feature (179)..(179): n is a, c, g, or t
  misc_feature (220)..(220): n is a, c, g, or t
  misc_feature (224)..(224): n is a, c, g, or t
  misc_feature (263)..(263): n is a, c, g, or t
  misc_feature (318)..(319): n is a, c, g, or t
  misc_feature (325)..(325): n is a, c, g, or t
  misc_feature (334)..(334): n is a, c, g, or t
  misc_feature (337)..(337): n is a, c, g, or t
  misc_feature (340)..(340): n is a, c, g, or t
  misc_feature (350)..(351): n is a, c, g, or t
  misc_feature (359)..(359): n is a, c, g, or t
  misc_feature (369)..(369): n is a, c, g, or t
  misc_feature (373)..(373): n is a, c, g, or t
  misc_feature (383)..(383): n is a, c, g, or t
  misc_feature (398)..(398): n is a, c, g, or t
  misc_feature (406)..(406): n is a, c, g, or t
  misc_feature (415)..(416): n is a, c, g, or t
  misc_feature (425)..(425): n is a, c, g, or t
  misc_feature (427)..(427): n is a, c, g, or t
  misc_feature (495)..(495): n is a, c, g, or t
  misc_feature (543)..(543): n is a, c, g, or t
  misc_feature (549)..(549): n is a, c, g, or t
  misc_feature (661)..(663): n is a, c, g, or t
  misc_feature (667)..(668): n is a, c, g, or t
  misc_feature (677)..(677): n is a, c, g, or t
  misc_feature (679)..(679): n is a, c, g, or t
  misc_feature (681)..(682): n is a, c, g, or t
  misc_feature (684)..(684): n is a, c, g, or t
  misc_feature (695)..(695): n is a, c, g, or t
  misc_feature (697)..(697): n is a, c, g, or t
gctccacttaactcgcgccgccgcggcagctcgagtccaccagcagcgccgtccgcttgaccgagatgctgcgggcctgtcagttatcgggtgtgaccgccgccgcccagagttgtctctgtgggaagtttgtcctccgtccattgcgaccatgccgcagatactctacttcaggcagntctgggttgactactggcaaaattgctggagctggcctttngttngttggtggaggtattggtggcactatcctatatgccaantgggattcccatttccgggaaagtgtagagaaaaccataccttactcagacaaanntcttcngacatggtnctnggncctgcagctnnataatgtnccattgccanaganctcgattcantcgggtccactaaanatctctantgtatcagnngtactgacnanactctaaacagcctgcctcacaactccaaaaacacacagggagatactccagcttcagcaacagcacntacagaagcggctcaaattatctctgcagcaggtgataccctgtcggncccagnccctgcagttcagcctgaggaatctttcacaaactgatcaccctgaaatgggtgaccggaacacccacacctgcactttcagcaagaagcatcctcatctttctataagggnnngcgnncacctgcanancnntngcagctcgccntntgcacaaccaggacaacactacgcacccaccgtaaaatggcagtcctctagcccaatagcttcagaagcatgctctgaggcaaactggcaagtcgcccctctgcagggtatcggc

SEQ ID NO: 693864 - DNA, 132 bp, Homo sapiens
gcatttgacggatgtttgagtctggaaggtcaagcgctgagctgtgatcacaccactgcactccagtctgactgaatgagaccctgtctcaaaaaaaaagagaaagaaaaagaaagatgatgtaattttccc

SEQ ID NO: 693865 - DNA, 197 bp, Homo sapiens
aaaaattgggcccggggatttttaacgggctttccccccgggaaatttaattttccccttttttttccgggccaggcgggccccccccggccccagttttgttcgggccccttcaggtattcccctttccccttccacccccgggggcggccccaagccccaggggaaaaaaagttttataattttggggggggcca

SEQ ID NO: 693866 - DNA, 1399 bp, Homo sapiens
tagatcgcgagcggccgccctatttattttttttggtcttatttctgcccatctgtctacctacatacacactgtgacacataaaactaccgtgtatggctaccttcaaaaacaaaaaaaaaacaaaaaaacaaaaacaaaacacaacacacaaaacaaacaaacaacaaaaacaaaaaacacacaccaaacacacaaaccaacaaaaacaacagcacaggggccgggcacgacgaacacccacccgagaggagcagacaacacagataccgacacgcaccaccacgagcgagagcaaccaggcggcggccaccacacagaagagaacacaaaacaagcaacgcaccgagaagcaacggcggcacgcccacaaaccacgcgcacacgaccactcgggcggcagacacacaccgcaaccagatcgaggcatctctacagcgaagaacaaaacaaaaacagaaacacaatcaagagcgcaggaagaaaaaacaagagagacagacaacaaaaacaaacataaacaacacagaaccacaacaacaaaacataaactacaaacaaactaaaaaaataaacaataatataccaactacataaatcaaaaaaatataacaaataacaaaataaaatacataaataataaaactacaataaaaaataaacggccaccacaacacaaacacacgctttaatcctccgacaaattaggagacagtacgtcaactccaaccgacaactctgcagcaagtggacacacgcggcgcgcggcgcggagggagacacgagcgaggactcgatcggagagacacaggagagaggaaggagcgcgcgtacgcggaagcgacggcgacgaaacacagacacaagcgagaccgagcccaggcgtagccggggggtggacagaagacgaaggagatagaaagagacaagagcgagggagagaaggcagtcgaatgcgaggagagagagacagaaaaataaaagaacagagagactgacagagagaaaagacgaagcagaacgcgaagataaaaaaaagcaaaaaaaaggaagagaccgaagcaaagacaccagacgacacaaacgacacggcagcgggcgcggcagagcaaacgcaaaccaagacaaagacgaggaacgaaaaagacaagaaccaacaagcgatagaaagacacaagaacgcacgagcgagcaaaccgatgaggcggtgcacgacacagcaacccagaccaagacacagcgaaggcagacagactctcagacagaacatacgcaccgagaggcgagtgaaacgcagcgatgcggagaagaagcccagagaagaggagagagcgaagtacagataaggaaacgacaggaaacgaaagcagctcacagagcccgcgacaggaaaccgtag

SEQ ID NO: 693867 - DNA, 221 bp, Homo sapiens
cccccccccccaaaaagagaggggccgtttttggccgggggtttttttccccttttttggtaaaaaattggggggttgggtttcccccccttttgggggttggggggggagaaattttccccgggtttttaagggggcccccccccggggcttccccccccctttttttggggggttttgttaaattttttacccccccttgggggggggggtcccttcca

SEQ ID NO: 693868 - DNA, 155 bp, Homo sapiens
ggatctcccccgagtagccgacagactttgtggtccggggcgagataagggaagagggttgtatgggttcggacggaccttgctctgacctgtgagagaacgtccgtatacgcacatctgcctgtctgttgcctcgtctttcccatttcactgtg

SEQ ID NO: 693869 - DNA, 982 bp, Homo sapiens
ggtggctccttgcacagcagctgcgcgcgccggtggctccggatctcttcgtgcctttgcagcgtagcccgagtcggtcagcgcctggaggatctcgagtcgagtccatgtcgaagccgccactagtgaagaccgggactgccttcagttcagaccgcagacagactggcagcgcagtcatggctgcgacattcctgggagcacatgtgccggcctggacattgattcatcacccatcacagcccgggaacactggcatcatctgtaccattggcccagcttcccgcatccagtggcagacgttggcacggcagatggcattaagtctggacatgcaatgttggctcgtctgacacttctctcatggacactcatgagtacacatgcggtagaccaatcagaggaaactgtgctggcacagttgctagcggacacatgcgttctgccttcgtcgtagcacccgagtccttcgtacctcgggcgccagattagcttcggtggctacataggacgacttacaaggacctcttgagaatcccgtagaccctgggccctcatacacaatggtgccagcggagcacatgcacgacaggtgtgggagcctgacagggaagcgggacagcgctcatcttcgacaacagtcaccggcatgggagtacacggccctagcacatggcaccagacgtggtgaccgcagacacactcccctgcatgaccgtggggaagcttacgaacacgaaagcactccttggcaaaggggttggggtaggggacactgttggggggcacagacaaacagaattgcgtagcgggttgggaggtggcaaatggggagagcttggtatttaatacatcgcggtacccaatgggcgtggaaaattggcaaccgaagaggagggagttgtgccccgagaaactttaccccggtggagataggtaaccggtggagaggtgattgggacgagaacagaaggagtagagg

SEQ ID NO: 693870 - DNA, 377 bp, Homo sapiens
atcctagaaggataaaggacatcttggggaaagtcagtattttatatagcaaaaatatgaacctcaaactgaatcctctaacggccccatacaatgaagtagacatgggtggaaacatttacacccagtcagctatgaagagtttcaaatggaccctaccactgagaaatcaggatggcagcctactgatggggaatggaggaaaagtggataaatacaagagtcctgtgataatatgcaaccaagacagggttcttttagcatggatgccatgcagtgaatgaagacataggtatcttacccaacacaaagtggacagtggatttgcacttctaaagacttttggggtggacatttggacagtggggagaagaaag

SEQ ID NO: 693871 - DNA, 128 bp, Homo sapiens
gagggagtctcactgccacccaggctggagtgagccaagattgctccactgccctccagtcggggcaacagagcgagattctgtctcaaaacaaaagaaaaaaatgatcacccttctgtcgtcttctc

SEQ ID NO: 693872 - DNA, 191 bp, Homo sapiens
gtcgatctcttgaggatcccccatttgatgccccttgatgctgcagaggagtgaaggacaatgggggctgacaggacataacggtttcattcagtgactcggaaacaacagcagtgacttcagcagagggcaattgccaaagagaaaggtgagagaggaagctatattacgaactgctgtagaagcatatg

SEQ ID NO: 693873 - DNA, 394 bp, Homo sapiens
gggcccagcgacaaaagccaggcagccctacaaaagggtggggaggtggtccccccccccatgtaccagtttagccagtaagtgtgtcagcagacaggcctgcagataccccagctcccagcccctccaaaaattttctttcccatccgtgactcctggaatgcaggcatcatgacggtaatgtaggtttttttggtggccccctccaaggcccgcgagtactccaaggaggggtgggagtatgtgaaggggggccccaagtaacgagtcagcaggggccgcctgccccggccagaacgggcaggggtgcccctgacctgaaaactccgggctgggacccccctccgagggcagctcccggccttgccggcccaataaaggacttcaaaagtta

SEQ ID NO: 693874 - DNA, 152 bp, Homo sapiens
atcggctcgtgagaggatcccgtacatgagctaaccggcccatggactcagttagtaacaaactcctaccaacactgaccaataaaaaaaatgtgggttcttttttttttttttttttttttttatttttttttttttttttttttattttt

SEQ ID NO: 693875 - DNA, 181 bp, Homo sapiens
tatgttacagctacctcttcacagtcagcaatgctttcccgggctgttcatttttttattcctgtgtgttttatctagaaagactcaagaagaatattacagattgttcaaacaatgtcccctgtagtactaggatgtttaatggtaacacatagcagaatggtaggatacattcacaaca

SEQ ID NO: 693876 - DNA, 185 bp, Homo sapiens
aacaaattcacgttctccccaataggacggcgaactcttctgaagtaattgaagccagaaaggtcggaactgtgtgggcagcgagtgcactttggtcttgtcacctgagggttacttgtccccgtgtccagtggctgaggtagcgtgatggcagcgcagatcggcagacctgtgcggacatgcaa

SEQ ID NO: 693877 - DNA, 260 bp, Homo sapiens
tttttaaaaaaaagggggccttttttttattgggttttcccacggggtattgggaggggattttttaaaaagtggggtttttaaacaggtgtttttggaaaaaaatttttggccggggggggggggttaaaattccagtcccccccctttgggggggttaaatgggggggtccctttgggcccaaagggggggggcccagggccccaaaattgggcccccgcccccccgccggggggaaaaagggggtccccttttttta

SEQ ID NO: 693878 - DNA, 739 bp, Homo sapiens
gggagaccagcagatctggtctgtagctaagtgaattttctaagactcattgattcacacgccatcccttgtaggtggctggtgtcccgcgatggccacaggcgccctcctgtcgtgctcgcgcccgtgcccgagtgtcccggctggacttcctcaaggcctcgcacttctcgctggtggcctgaccttgcggctgcacgagtgtgcgaccgattgcgcaccgatcgctctgcaccggtgcatctttgcctatcccggtctgcctacctcgctgtggagcctgccgcatgcctgtcacgccgacctgcccgcgctgcttttcccatatggatccctgggcgctgtggaccgggaatgagcgcgtgtcggaatcgcgcaccgtggcgtttccctgggcgtccatccatcagccgccgtgtgatgctgcttgcaagcgcaggctctgggaactgcagcgctcagccatgcatggcccggtaatctgccccgtgctcgaggacgcgcacgccgggactcggcctctccaagcgtcgcactgccgcctacggctgttgcgccgagctgcctggcgcgcacctcgagagcggatccgcggcggcgcgctcatcatcttcgactcgcgaggtccctgacctcctggtcgaccgcgtactaagttgctgcgatcccgctcataccttacgctccaagctgctctttccagcccattgaggcgcgcccgtatacatcgcgcggccca

SEQ ID NO: 693879 - DNA, 301 bp, Homo sapiens
  misc_feature (103)..(103): n is a, c, g, or t
  misc_feature (105)..(105): n is a, c, g, or t
tgtttttccaggcccggggttgttggggaaaaaggcaaaggcagctggagccccgttttttcctgctgggaccccgcttgggctttggtattgaatgagtggntnacagttattttccaaccccaactggcttgggggcaggacaagggttaggtttaatggtggccaggcttgcctgctccccccctgggatgcccctgttttggccctttcattttttttcattggtttatttttcaaagcatttttaatttgtaaaaaaataaaataaattaaaatgtaaccattaccctcattttta

SEQ ID NO: 693880 - DNA, 334 bp, Homo sapiens
cttatacctgtaattttttcactttggaaggccgaggcgggtgggggagccaaggtcaggagcttgagaccagcctcgcaaacgtggcaaaaccccatctctacaaaatacaaaaattagctgagcatggtggcaggtgcctgtagtcccagctactccggaggctgaggcaggagaattgcttgaacccaggaggtggaggttgcagtgagttgagattgtcccactgcactccagcctgtgtgacagagtgagactgtctcaaaaacacaacaaaacacatgaatgtaaaacatttagtgaagtgactggtagctagtgagggttcattaag

SEQ ID NO: 693881 - DNA, 186 bp, Homo sapiens
cgtctcttagaactggaaaggttttgttaaccacaagtccaggtgctcagtatagtaatttatagtctatgcttctatgttttgctgaaaatatgactctttatcactctttaaaaattatatgtacgtgtgaccaagcatggtggctcacacctgtaatcccagcactttgagaagctgaggcgg

SEQ ID NO: 693882 - DNA, 160 bp, Homo sapiens
ttactcacacaatcacacaaggctcagaacttatcacgcactgagttactcgggaagctctagaaacgtctacatcgccggtgcttacagcactcgagcaatatagctcagggacgccagcacagctaagggttctctggggcgcttccaagcacgagac

SEQ ID NO: 693883 - DNA, 464 bp, Homo sapiens
ttcaaaacttaatggaaaaaatgcctggcaaaacttgtttggagctttattgaaccaaaacactttagaaaccgttggggaagctcagtgaacccaggctgtggtccagccccacgctttgtctagggcaggttccgttccctcaagcaggtgatgggaatcccggactggagcctgaggctgagcagccagaggccacaccgccagggccaggccacaccaccagggccaggccacaccgccagggcaggccacaccgccggggccaggccacaccgccggggccaggccacaccaccacggcaggccacaccgccggggccaggccacaccgccacggcaggccacaccgccggggcctgcctcatcgccccacagtccggaatgctctgcacacgcatcagaaggagagtcgctgagcatcacaaaggaaaatagaaagcgcagcctcactgcccaaggcc

SEQ ID NO: 693884 - DNA, 1148 bp, Homo sapiens
agcagtggcgcatgcagcctgcgctcgctcgcggtgagggcatggctgtgggtgcctgtgccgggctgccatcatggacgaggactactacgtggagcgcggccgagatggggctgacgaggcttgactggcgtgccagcaggaggatgattctggagaaggagaggatcgatgcggaggttcatgcaagaatgcctgcctaaattttccacccggggattatatcatggaaccctcctatcttcaacactctgaagaggtatttcaaggcaggagggtctccagaagaatgttaatcccagctcttaatcttgacaagagctacacctgatgtggcccaggactgtggaacccttgctggccgagtggctcattcaggacaggtgttgaggccacgtgcatggttcaggaaactgtggaaaaatcaacttgaaggaagtttggctgagttcgcagcgttgttgagcccccgggaagaggcaggattcgtacttttgagcgtgagagagcggaagagacgccccgagcggtgggctgggacagcagcgatgaattgcggcataaccaacggttgcactgggaaccattgatggatagagcctgggccttgaacggtgcccaattcccgaggaacgtggggtataggattggctttgcgaactttccaaccgggtagaaggggtcacggggaaggaggttacctaagaaggtttcaaggggcaggaaccaaggtggttgaagttggacagttggtttcaactatcgaaggaggatggtagggggcgtggtgaagcgtacggaacagggtgtcgacaacgttgtggcagttagtgtaggatccccacataaaaacggggattctctgtcacatatgggacttgagacatcactaaccagttaaaaggcccttatagccgctcgtggacagacaacaggacaacaaagtatgggttaccacgcgcatgcttggtaatatccatgactcaaatgaaggggagctcacgacggcggattggaaccatgggtcagtttaatacgtgggcattatatacagacaagggcgacatacccaagtgtaacaatacagccatatgaggggaacagtagaagagggccagcctactagcgtgacggatcggcgcagcgct

SEQ ID NO: 693885 - DNA, 313 bp, Homo sapiens
ggcttgcttggggggttggggtgcggtcctccggtggggtgggggttctgggagggtgaatgcacgggaagggagccctttgggagcacgggttctgccggggtccctctgtgcctaactctccttcccggctcctctctttctccccttcacaggggccatgtaccaggagccttctctctacagggtccccgaggcctccccttccagtcccccggcccccggaaatgtagtcccgggacgggaggttcctggcactcccagtgagccagccaccaccacaaccggtttcccagctggctcagaggggtac

SEQ ID NO: 693886 - DNA, 238 bp, Homo sapiens
  misc_feature (218)..(218): n is a, c, g, or t
ggtatcgatgggcagtgaggcggcgcatatgcatctaggcctataaatatccggagtatacgtagccggtaatgtacacccggtcctctagaatatagctagcatgcgcaaatttaaagcgctgatatcgatcgcgcgcagatctgtcatgatgatcattgcaattggctccatatatagggccggggttataattacctcaggtcgacgtcccatgnccattcgaattcgaaatcat

SEQ ID NO: 693887 - DNA, 295 bp, Homo sapiens
  misc_feature (10)..(10): n is a, c, g, or t
cccgacgtancccacctgaaggaaagatgaaatatgccttacagccaaagattactttataatgtggttcatctcgtcttgaacaatgttgcttagaagagactgaatggggttttatttgcttttgatatccaaataatgtttgtcagttttttattgcctttataagtggaactaacattacagatcttgtggagaaaaagtcactttccttctctttgcctcgtgagcccattctaaatacgaacaaatctctatgctttcttacactttgaggaaaggaatcactctcaat

SEQ ID NO: 693888 - DNA, 235 bp, Homo sapiens
ctagaggatcccagctacccagcaccagtggattcctgacatgttcaattaaaacaaagcatcgcgaaggcccgcggtagggttgttgacagcgatgtgatttctgcccggtgctctgaatgtcatagtgaagaaattcaattgaagcgcggatcaccggcgggagtatcatatcactctcttaagcgtagcccggatgccctcttatctacatttgtgacgcgcatgatatgga

SEQ ID NO: 693889 - DNA, 205 bp, Homo sapiens
caacgagtgatgtgtagtgagatgtagtatgcaaaccacatttgattcatgttgttcacacaatttcatcttacaatctaatctacaaaacatattaacacatctattattctcttgcttcatgtcacgttactcgacacttaactctctatcaatactcaagttaccattcttctacgctttaactcaaccataacaacgacca

SEQ ID NO: 693890 - DNA, 219 bp, Homo sapiens
gagtcttccgaacaccaggtggattctgagacccattgtcatgcagaaaggtgcttcctctcttggttctgcgtacgacttactgtctcctaacacaaaggtacctacggtcacctcggtacaacatcttggacgccctgtgcccacgacttgtgcagagcgagtgtaggccgagtttcctgagccatggcacaggccaacgtagaattctcacgcatc

SEQ ID NO: 693891 - DNA, 298 bp, Homo sapiens
tccgctcagggtgggcaggtgcgcctcgccacagaaccagattggccacaggtgccaagccctcgccgtggcgctcggcgaggggcacgtagtcgatggaacgggtttccagattcagccgtccgttggcggaggcagtcttgggagctgacatggggttcgcacctttattgatattgttgtgagcacagcaaagtcgtcgcttcccgcgactaggcccgtttctcttccagggcttgatgcagcagcgcttccaggtcttcgagactgcttgggcgcggtttggtctgccgcgcct

SEQ ID NO: 693892 - DNA, 879 bp, Homo sapiens
tcccattgggtcttttcccattctcttttttcccataaacccctattttccagttggcccaattcaaaaaataagggcaaaaaggggtttggggaaaatccttgtggatgtggtgtggtggcgacgggaggaggagagagattttaggaacaaggcctgtgctctccttccaacagccctatagatggggcttagggcccctctaagtggggggcctcctgagagaacgagtgtggcgcaaaagactccaagggaaagctatgaggaaattgatagggggccccttaaacccagagtgtcacccacaaatagtgcgtcttgtgacccccttacacagtgcactagtggccgaggagatcataggatcgggggacaaagcggggtgccagcgagtggttttatgaacacagagtgctactctgtgggcaagaacatgtggcaacatcaacgccaactcttcatcatcaaacaatgccgagaaagggacacagagactccatccacaacggcggcaagaaagccacagggaaatatatatcagccaaacgcgcaacatgggtctttggcacacagggtcatcgccctggcagaagggatgttatccactcgtgatggagaaccccccccgtgagcgacaaatgtactgcgtgagaacacggaagcatgcgcccaaaggtcagagagttaaacaatgataacacagctggagggaccacgagggagaacaactccagaagcaagagaacaaagacatctataatcaacaagcgggagaagaattagatttaatggcacaccgcacttctctcgaagagcttggatcccaacacagaacaagaggagtctaaggggcggacccagggcggcgcacaactacac

SEQ ID NO: 693893 - DNA, 128 bp, Homo sapiens
  misc_feature (2)..(2): n is a, c, g, or t
cnccctccctctggcgggaggaatggggctctcttcctcccccactgtgcccgtccgcggacggggacccttccccggcccaaccccctccctattttgattggtgtctgtgactatttcctgttggg

SEQ ID NO: 693894 - DNA, 545 bp, Homo sapiens
  misc_feature (507)..(507): n is a, c, g, or t
  misc_feature (525)..(525): n is a, c, g, or t
ttcctcagaataagatgagagtaactagaattactatagtaaggaaaaaaaaaaaaaccaaaactttttaaacttattttttgacatagggtcttactgtgtcacccaggctggagtacagtggcgtgatcttggctcactggagcctgacctccctaggctcaggtgatcctcccacctcagcctaccgagtagctgagacatggtggcacaggccacatggcgggctaatttttttatttcttgtagatacagggtttcactatgttgcgcagaatagtctcgaactcctgacctcaagtgatccatccgccttggctcccagagtgctgcgattacaggcatgaaccacagcgcccagcaaaataaactttatttattttcaggtctagaccatccagatagatttactcaaatattttctggggaacctttatgggtagaacattttaatactgtttagaagacttttagggatacctatagatttccaaatgcatccatttnaaataaattaaattccanttttctctctcctaaaaaaa

SEQ ID NO: 693895 - DNA, 349 bp, Homo sapiens
ggctcggtaccggctccaggctacccagaggctgtgagggtctcgggcatggtcatggagttctggtcatagctgtgcctcgtgtcttactgagaagaccaccggggtgggacgagaggtcccggctgagttataggccacaagggccacctcctgggcttctgaaggcaggtggaaggtgcagctgagctctgtggtgttgcagaggggcaggatggccccagcctggcctgagggtctccaagaaaccacataaccttggatccgtccgctgtcttcctccaggggcactggcttccagaacagctgcactgtcctggggtccagctgcctctgccgccaccatgtg

SEQ ID NO: 693896 - DNA, 144 bp, Homo sapiens
cgtacaaactaggtagctagcgagaaagttggcagaatccaaggcaaaatgtgcaggagcttatcacagagaaaaaacaaagaataagctccatgaactaagagagagtataatgacttatagctctgaaacggaaatcacaca

SEQ ID NO: 693897 - DNA, 231 bp, Homo sapiens
acacgcacagtacacgcgacaccattcacacacagcacacacacatagcacacagcacacacacaaagacacagcacacaacactcacaacacagcacacacacgcgaacaccgcaccactacgactacacagaacacaaagcacacacacaaacacagcacacacaatgcacacagcaaaagcacacacatgcacacaaatgaacaacagcacacaagcacacacatgca

SEQ ID NO: 693898 - DNA, 100 bp, Homo sapiens
tagctggacctttcaaagcggagatctgcaacgtcttgatattgccctatagttaagttttgtaagcggaccctcagagccagcatctccgctttggaaa

SEQ ID NO: 693899 - DNA, 133 bp, Homo sapiens
tcactagatcataggctcatccatctcactgcttgtgcttctctatcttttctttttcttcttttcttacatggtgtgggatacatcacggtacgagctcgatcgtatcatgtcatactgttctgtgtgaatg

SEQ ID NO: 693900 - DNA, 188 bp, Homo sapiens
ggcagacgtccagcatgttgcaacatcaaactccatggctcaagcatcctcccacctgaccttcccaaatagctgggactataggtgtgcaacacaatgcctggcttatatttgctgggctttcttaagttattctttattctttggtagaaaacgcggtctcacatatatttccataggctgaatct

SEQ ID NO: 693901 - DNA, 758 bp, Homo sapiens
  misc_feature (324)..(324): n is a, c, g, or t
  misc_feature (366)..(366): n is a, c, g, or t
  misc_feature (368)..(368): n is a, c, g, or t
  misc_feature (370)..(370): n is a, c, g, or t
  misc_feature (380)..(380): n is a, c, g, or t
  misc_feature (426)..(426): n is a, c, g, or t
cttctgtaagtattcaggagtaacacagtgtgggctgcacctaccggacggtccatcggctagcaaggcaggctcaggttgcaggctttccgcaggagccgcctttgcgtagcacaagttcgacatggacacagatgcacgtatgttcttcactgacataggggacttaaaccccaactcgtggcctcttaagcgtaagctttatgttcttccatctattcgacttgctgctccttctctctttccccctccagctacaggcctgagagtctgagaaatcatcacctgaatagacatgtgtgtgtccatcatctcgattcccanccccaacttaatattaaattaacaggcaagccggcccccacntntncctgggggtntcagggagaacctttcacggcaccctttccctaccttttccttctntaatctcctggtttaccattgatgacttcgcctctgcatctactgacttgatttttcattctgccactccatcttcaaaccccctaccgtttcccatcctactcctgccatgcattgaagggtcaatgcattttggggtgagctctgggtttaggggccccctccatccctcagctatcctggatctttgcccacctcttcctcagagccacccactgaggggcacgtagccctatctagggctagtggaaggagcagactcgcttcctaactctctccctcctcctgcccacacacatcaaaagaatcttccctacacccttctcggctta

SEQ ID NO: 693902 - DNA, 621 bp, Homo sapiens
  misc_feature (6)..(7): n is a, c, g, or t
  misc_feature (9)..(9): n is a, c, g, or t
  misc_feature (35)..(44): n is a, c, g, or t
  misc_feature (65)..(65): n is a, c, g, or t
  misc_feature (70)..(70): n is a, c, g, or t
  misc_feature (72)..(72): n is a, c, g, or t
  misc_feature (82)..(82): n is a, c, g, or t
  misc_feature (89)..(89): n is a, c, g, or t
  misc_feature (95)..(95): n is a, c, g, or t
  misc_feature (114)..(114): n is a, c, g, or t
  misc_feature (134)..(134): n is a, c, g, or t
  misc_feature (148)..(148): n is a, c, g, or t
  misc_feature (152)..(152): n is a, c, g, or t
  misc_feature (161)..(161): n is a, c, g, or t
  misc_feature (167)..(167): n is a, c, g, or t
  misc_feature (187)..(187): n is a, c, g, or t
  misc_feature (229)..(229): n is a, c, g, or t
  misc_feature (231)..(231): n is a, c, g, or t
  misc_feature (233)..(233): n is a, c, g, or t
  misc_feature (243)..(243): n is a, c, g, or t
  misc_feature (289)..(289): n is a, c, g, or t
aagcgnnangggctgggggacgaaggggggagggnnnnnnnnnntggccatccagggacctgagnattgntnttcccgaaantcccgcngttatnaatggtgagggctccgggncttcagcctttcttgtaaangatgagaggttganaaanaatcccctnaataantttttcctctcgattcccanccccaacttaatattaaattaacaggcaagccggcccccacntntncctgggggtntcagggagaacctttcacggcaccctttccctaccttttccttctntaatctcctggtttaccattgatgacttcgcctctgcatctactgacttgatttttcattctgccactccatcttcaaaccccctaccgtttcccatcctactcctgccatgcattgaagggtcaatgcattttggggtgagctctgggtttaggggccccctccatccctcagctatcctggatctttgcccacctcttcctcagagccacccactgaggggcacgtagccctatctagggctagtggaaggagcagactcgcttcctaactctctccctcctcctgcccacacacatcaaaagaatcttccctacacccttctcggctta

SEQ ID NO: 693903 - DNA, 803 bp, Homo sapiens
tatctgcggcagctgcaggtcctggattatatttctcgattcgctgtcggaggacaatgagaccctggtggacgtttgttatctggaggcctgtgcaagctgtgcccagacatgggccaagaaggagcacatcctgcacgccaggaggtgatcccatgtcgatcatcaatcttgccttagtcctagccctcaatgcatgagacggtgcttgtcatgccgatctagcgcgagcgtctcatgcacgctgagccctggcggtgccgcagcgtttcgtcccagagtctgacccgcgatgcccgtggatgcaggtgcaatgcttacgcattactcccgtctcggactcaggcgaccaggcctccgggagaacctggccacagatcttcctgcgaggtactttctggatactcgcgccacgtcgcaggttggccgagggcccgacagggcgggcaaggcgtcaactctgaccctgggtatcccatatgccgaggagcgtggcccccccggcatcgctgactccatggaagactgcgagaccgtggcaccctactgctggggaccacagtcctgatgtggacgcagggaacggggagcacatactggcccattggtgccttttcagcccattctgacacggcgggtgtctattcagcagtgcacaggcattttacacttgcatgaaaacgccactgggagctgaggaaagccagactccagaagaccacggcaggaagatcaaactgggagcttgggtccataagggctggcactcctcaaatcctacattcagggtgcaaccacaagca

SEQ ID NO: 693904 - DNA, 481 bp, Homo sapiens
caaagcaataaaaattgggggatgacatcaattcttggtgcaggacataaaagtgggaggagaggtgagggaagaaagaaagatgagaaggacctgaaaatctgacaagagatctcttctgtggctgttgttaaacatatagtaagcattcatgaaatttggcatttgttttcttttgcagcaagctgaagaaacaaagcttagtggaaattaaacaaattaacagaagcaagtgcagatgggcatcatgctaaaaagaaagaaaaaagtaaattgccttcatttctattccatgccctctaacactctggtgctttccaatcagcaacatgagttgtgttattactggcaaagatggacactatatcctagcagaagacttttacaaggaggtaaaaatatatgaacacacttaggtaaattgacttaggccattcctttaagcaaatgtttgggtccttccagatcatggtaaaaagat

SEQ ID NO: 693905 - DNA, 391 bp, Homo sapiens
cacgagggtaccggcctcggtcaccgacccggtcgagcgctccaagcaggcgtgggtcgccttcgccgcggatgcggccggcaccggccccttcaagatgagccgcttcgtcgcgcgcgagcgcctcgaggtagtgaagaacgcccagtactgggacgcgaagcgcgtgccgaagatcgacaaggtagtgatgatgccgatgccggaggccaatgcgcgcaccgcagcgctgctgtccggccaggtggactggatcgaggcgcccgcaccggacgccatcgcgcagatcaagagccgcggcttccaggtctactcgaacgcgcagccgcatatgtggccgtggcagctgtcgttcgcgccgggctcgccctggctggacaaacgcgtgcgg

SEQ ID NO: 693906 - DNA, 386 bp, Homo sapiens
tagagtctcaagaccccgtgttccccctgtgtaaaccaattgtaagcttccaagaaggttgaattaagagggaagtggaacacagcctgggcaaaaatgggtgctgggggtaacaagcttgttaagggccaatccagaccccttacccctaagtttggcaagtgtggcaagcattgcaagcttccaaaggggttaattggtctaccatttaagtaagtggccaccattttaaaattgaaaaattaagctgggtccagtggttaaggccggaagtccaagctattgggaggcttggtgtggaaggattctcttgagcccaggagttcaaacccagtctggacaacatagtgagactgtgcctcaaaaaaaaagtgtgtgtgtgtgcg

SEQ ID NO: 693907 - DNA, 395 bp, Homo sapiens
ctcaggcagtgagagaagagaagataatccctgtcagattgtatctcaggcagtgagagagggggagataatcccggtcagattgtatttcaggcggtgagagaggggaagataatcccggtcagattgtatctcaggcagtgagagagaggaagataatcccagtcagattgtatctcagtcagtgagagaggggaagataatccctgtcagattgtatctcaggcagtgagagaagagaagataatcccagtcaggttgtatgtcaggcagtgagagaggagaatataatcccagtcagattgtatctcaggcagagagagaggggaagataatcccagtcagattgtatctcaggcagtgagagaggggtagataatcccagtcagattgta

SEQ ID NO: 693908 - DNA, 429 bp, Homo sapiens
ggcacgaggaaaaataataaatcaacaaccacaaagcgggcccgaattactgggaagacaaaaaagccaaagaactcagcctcctgaatagttgggattataggcatgcaccaccacgcacggctagttttgtatttttagtagagatgaggtttccccatgttggtcaggctggtctcgaactctcgacctcaggtgatccacctgcctcatcctccgaaagtgctgggattacaggtgtgagccaccacgcctggccagtcttttgactcttaaggccctcagccataggaagtcccaccaagggacaggatggatgggggacaggcagccacgccaccctggcaatgctatgggacaaaataaagatttgatggcctttgatgttgcctctggtaaatattggccagaagggggagaatgtaaacc

SEQ ID NO: 693909 - DNA, 1172 bp, Homo sapiens
  misc_feature (355)..(355): n is a, c, g, or t
  misc_feature (357)..(357): n is a, c, g, or t
  misc_feature (931)..(931): n is a, c, g, or t
ggttccatatctatataaggagctagaagcattatagctagtgttgattcactagtgcttacaaagttgcccccatgtgtaggggacacagaaccctttgagaaaacgttagactttaagtctgtacaaagatcttagccatttgttccgtgtcttcatgtttttgtccaggtacagttaaagtttgtcaaattatcatcttatgagggaaacctgattagatgggtcgtgtttgtgttctgatggagaaaacagaagcccaaggactcaagaagatgattttaacagttcagaacagatgtgtgcaatattggtgcatgtaataatgttgagtggcagtcaaaagtcatgattntnatcttagttcttcattactgcattgaaaaggaaaacctgtctgagaaaatgcctgacagtttaatttaaaactatggtgtaagtctttgacaagaaaagaagaaaagaatcaacacgcttctttccgatcagtaacacgtgtgcaagtctgtgccttgttatacccaagctctcccttcagggatcggtactctgagaagacgaactaatgtgtcggacccgtcttgagattcgttttaagtgtaagttccataatgagcagaggtgtacgcgaaatggtgttactgacttgatagccttgagtctaacaagaaagataggattgagcgggtttagagtgtctatttggtaaatcattccattgtgagtctttctgatgaactgtgtggtatacttgagaatgctgtgattgaagtgaggctccaagaatgagcagaagtaggccggattagagtagagtgactattaaaaaagataggtttctaggagctagtaaatcgaccgttttcagaaagatgtccggctatattgtggcggtattcgcgattcatgaaaacagaaagtggcccttgcngtactacaagggactgactgatggggaacttactgccccgggctcaactccaggggtttaatgccgacgaggcttgtcaaaagactaacgggctctcctggatatatactggacgttaaggacctgatcctcctttttccacgtggctgacacacccctggtgtgggaactttaaagcggtggaagaaaaccctaatccacaggggcccgggatactggggagaaaaatcccaaaagggtt

SEQ ID NO: 693910 - DNA, 1048 bp, Homo sapiens
tagcggcgggtcggcccgggacgctgcgggagcgcgacggggagcgcgcctggccgcgggactggcggcggcccgccggagagctggggcgccccgagaggagccccacccgggtcgctccgcaggcctgacagcctccgtccacctcctgtcctcggggaccacctccctctcatgctgagcttgctgcctaaggtggcctgctgcccatctacacctcacgagggcactagtgagcacggtttcctggatcccaccaacatacaaagcagtccactcgactgacccccattgaccaggatggcaaaggatgagatgatggaccggaactgatcagccagctgtccctcttacctaaagacttaaaccaatgcccttaatgagggggcattgggcattaagcccgtgacctttgctatgctcatacttgtgactctatgagtactttcctataagtcgtttgcttgtgttcacctgctagcaaactggagtgtttccctccccaagggggtgtcagtctttgtcgactgactctgtcatcacccttatgatgtcctgaatggaaggatccctttggcaaattctcaggaggtggacctgtagccaatgggcttggccatgcatcctgctggcaactccaaggccctgtgttggcttctggaatgagcatgctactgaatcaccaaaggcacgcccaactctctgaagatctttcctaatccttttctgggggacatgggcgtcgcatgagagcaacgtccttagggtttgcatgtgaagaaattacatgcaggatacaacgaaggctccatggcaggatctgggcataaacggcatgtgatccaggcaaacttgtcgggtgagcaaaagggtttgaccagagtacagcccttttccaaaccgcagtcttggatttggttctaagtaggagctaaatatatatactcacaacgtaaatcaacgggagaccctgtgcacggtgatctccattggattcgcaacttttttgaaaggactgtttaaacatgtatggtatccatatccacct

SEQ ID NO: 693911 - DNA, 159 bp, Homo sapiens
ctaggtgaactctttgggtgtctttgcaaagatgcgatgaagagacattgcagccctctgattactcatttgggggaagtagatcaaggctatgatgttgcctgacagtgatggttgaaggcagctgagtcctgtcatggaaaatgtaaaggccctccc

SEQ ID NO: 693912 - DNA, 454 bp, Homo sapiens
agcttatttcctttccaagtatttcacagcaacactctacttgacgcaactaggtccagattgaaaagagtcctctggctgagtggacactaggcccagacccagcccagactgagtcccaacatattttccctcactgtactccaaacaatgtacacaggacttctctaattgaaaagtctccaaccatacacaaggacagaacccaccaccccaacccccaaccctcagacagacttatacacccctgagtgaggattacatgcccatcccagtgtcctaggaccttttcccaatactagccccccagtggtgaacagaacctcccaaatttgagttgcaccttccctgtggctatgagctcagcctcgctttgagtaccacgccctgtcagctctgactatgagctggcgcttataggaaaagttggagttaaggaggaatagcatcctta

SEQ ID NO: 693913 - DNA, 392 bp, Homo sapiens
ctgcgagcttggacttctgctaaggtctcatcattcctagaactgagaagagtggctccctttgcctaacctgtttgtacaagctaatttggtttatgctgaaaacctgctttccctctgggactctgggattttggcagaggacgcctgcatgaccagcccccaatagaagtctcgggttctgagtctgtaatgatcttccctggtagacatttcatatatgttgtcacagaccattgctggggggattaagcatgcacatcctacctgactctattaggagaggatccttaaagcttgtgcctgctttcctctggactttgccccaagtatattttccttttgctgattttgttttgtacctttttgttgtaataagtcatagtcatgag

SEQ ID NO: 693914 - DNA, 903 bp, Homo sapiens
aacattttaatgttaatgctacctatttagtctcaacaaaaagagtcaaactctgtaaaatatttcaagagatttattctgagccaaatgtgagtgaccagtggcctgtaacgcagccctcaggagatcctgagaacatgcgcccaaggcagctgagctacaacttggttttatacatttcagggagacataacacatcaatcaatatatgtaagatgtacattggttcagtccagaaagctgggacaattgaacaggtgggggattttccaggtcgtaggcagattcaaagatttttctgctgggtgcaatggctcatacctgtaatcccagcacttcgggaggccaaggcaggcagatcacttgaggcaaggagttcaagaccagcctggccaacatggcaaaaccccatctctactaaaaatacaaaaattagccaggcgtggtgcgtgcacatctgtaatcctagctacttggggggccgaggttgggagcaatcattttccatgcaggaggcacgaggttgtactgagccaagatagcgccacttgcactccatcctgggtgacacagtaggactccaatcctcaacaaaagcacagcgcgacagacaagacacaagagaccatttcgcggcagccccacaggaccgagaacagggctcgacaaacacatcgctcggcgccgcacgggccccgaacaggcacagggcgaagactgccggacacagcgcgggaccccctaagagaagatctggcgggagagacaaagggaacagagcacgtgcacccgagcgaagaaaaagacccggcggcacaccaggcggttttggaacaacactcagagaggggcaccttaaggacacataagcggcgaaacaatacaggggaaaacaacagaact

SEQ ID NO: 693915 - DNA, 424 bp, Homo sapiens
  misc_feature (262)..(262): n is a, c, g, or t
  misc_feature (352)..(352): n is a, c, g, or t
gcggaatagccgctccaggccaggctgtccctactgcctggtggagggggaacttgacctctgggagggcgccgctcttgcatagctgagcgagcccgggtgcgctggtctgtgtggaaggaggaaggcagggacgaggtagaacggggtggacggagtcagagaggaatatggccgcagacagccctggcaaatgatcaggataggcaggcagtgtggtgcagtggctgcagtgagggccggtgagggctaatcttcaacnttgtccatgccagtcagccccctttttttccagtaccaaggtgctgtgaaccctgtcctggggatgaggcctgcgtcttgtggaactganacttagctctgacggggcatgccgctctgtgcccacgggtggtatgtaattttcgctcggcctgggacgggg

SEQ ID NO: 693916 - DNA, 877 bp, Homo sapiens
aataatttcttacaaacacaatattgccacaacatgaacaccgctatatgaccacagctgcagatcagttcttagtcaactgactgtcgttttctttctgctttgcaaggcgctagaactcttttactttcacgttcactttccctcgaggtggagatctcgctcgtgatgcccgggctggagtgcaaatggtgagatctcaactcactgcaacctctgccctccaggttcaagtgattctcctccctcagcctcccaagtagctgggattacaggcacccacgagcatgcccggcataatcttttcgtattttcagtagagatgggttacaccatgtaggccaggctggtctcgaattccaaacctcaggtgatccatccgcctcggcctcccaaagtgctgggattacaggtgcgagccaccgtgcccggcctcatggtaagtatatgtgatatcaaacttcaaactgggggcacaaacagaaagggaaagatccctataacctctatcatataacaatgtaaccagtatactgtgcactagtctaatcacaaccctgtcaagaaagtaaaggcctacacttgccccaactaaccaagtctgcactatttcaaatccatgggaaatagctgtcacgctgcctgaactggatttgcctgacataaccctgcaactcggcatccaaagcagtacggcgctcattcctgaacacaattatcgctccacagaatacccacaacatctatgggcaagaaatacatctgcccatgtataaaaacctcatcatcctctcaatccaatccctcatcataaccaatctattcgcccttgtataatctcttactctctgtcaccacagtggcaacacgtcatgca

SEQ ID NO: 693917 - DNA, 698 bp, Homo sapiens
  misc_feature (117)..(118): n is a, c, g, or t
  misc_feature (174)..(175): n is a, c, g, or t
  misc_feature (180)..(180): n is a, c, g, or t
  misc_feature (239)..(239): n is a, c, g, or t
  misc_feature (482)..(482): n is a, c, g, or t
  misc_feature (676)..(676): n is a, c, g, or t
  misc_feature (682)..(682): n is a, c, g, or t
gatatcagctcggtcccagtgttactccacaaacagacacacacagtaacacatcccacagggacagacacacatgcacggagaacacagctggtggaacacacacacacagacacnnacacagcgtaacacatcccgacagggacacacacacacacatgcaccgtggacacnncccantggggacacacacacacacacacacagggtgaacacatcccagcaggggtgagatgcanctgagtcaggcaggaaagctgacccccacctgggcaggtgacccagggcagccgacccccacctgggcaagtgagtagcgtcttcccaactctactggaagcgggatggtcagaaacctgggaagcgcaaggatcgcatgctggaccccagcttaagagactgctggtggggtgggggtcacccaggaggaggatttggctggggcctgcaggggcaggtggggttacagccggtccaccgcntaccctgtttgttggactctataaactgccccgacctaatctttaccagtttaagtctctccaagggcccggtgtgaatctcgacacagataaagcctcaccgtcctcccgactcctactggcgtgtgctcccagctcacctgggcaatccgagaaggccgctttcccttctggccccgcaaagaccccgtacnttaagnatgttctggtttgatt

SEQ ID NO: 693918 - DNA, 330 bp, Homo sapiens
ctagaggacccgctgatccgcttaagaaatacctgaaacactgatacacctgtacatcctgcagggaatcgcttagaaaatcatttttctcgggaggcgaggcaggtggatcacctgaggtcggaagttaaagaccagcctgaccaacatggtgaaagcccatctctactaaaaatacaaaaatttggcgggcatggtggtgagtgcctgtggtcccggctacttgggaggctgaggcaggagaattgcttgagccggggaggtggaggttgcagtgagcgagatggcgccactgaactgaagcctggtgacagagggagactccatctc

SEQ ID NO: 693919 - DNA, 767 bp, Homo sapiens
attgtctcttgtatgcagtaacgtttatttttgaccgtcactctgtgtcagcttcaaagtcagatagatttttcttcccagcatgttctacattcctgagtgcttgttgtgcctgtatgtggttctgctggttatcctattcaccaatgcagcaatttcctgtatggacactggttagagcaagttgacagctgcgagaatggccccctgggaactcccgcaaactattcgcaactggtgactaggtcacttttggtcggcaatgggaccatttgcctggcgaccttgatgcggcaacgccaacctgcgctgcccggcttccggcgctggccggcctcctctgggaccttcctggctcccatacaaccttcaccctgctgttgcgcaccaaccggaactacgggcttcaagcaattgatcccatggttatcacttcgcgtttccccctatcgtgggcatggggccaattccgggtaaacaggcggaacccaattattcacactggacgcgcgaaacgatacgagaatggcctttgtgacctctgggccccatgcctgtttccctccggcaacttccttgaatgcaccccaagcctccctggacttgataaccaattaactacaccacggttaattcaaaaccccctggcgtttaacagtggcacacccaagcgcttgctcgattgggcaggggtcacttgtgaacaagcccttccacacaatttggcactacgcgcaacaacttcctaataacaaactaggaatcga

SEQ ID NO: 693920 - DNA, 256 bp, Homo sapiens
ggctacgaggtctgtaagagcaatttctatatattgtcttcgaattaaaagatatttcccggccgggtgcggtggctcacgcctgtatcccagcactgtgggaggccgaggcaggcggatcatgaggtcaggagatggagaccatcctggctaacacggtgaaaccctttctctactaacaatactaaacattagccgggtgtggtggtgtacgcctgtagtcccagctactctggaggctgaggcaggagaatgg

SEQ ID NO: 693921 - DNA, 1007 bp, Homo sapiens
ctcaccagggtgtgaatacttgtgggcccctaatctcctcctctttaaggggggggtgtctcctccccccccgtgtgttcccccgcccctctttgggagacatctgctggcccttggggggcttaacaccggggtgtgagtatgtacaacacaccgcgggcttgttcggaacacccccttctgagcgtcgcctcgtgcaaatgctgatggacaacccgcaacagggcgttccaacgccccccaatgtcgccaccgaaattgccggcggtctatataaaaggaggatgcccatgggaggactcgtctcccttgtgcgcccgtccactccaaaaaggactcgtcgagcgtagggcgatgtcaaaaaaagacgccacctggcgctaggaagatttctgtgaaaggctccccttaaaaggcagtttgtttaaaaaacgctccccatgaaacaccccgatgtgagtagtaattcttgctccacctcttccaaaggaagggcactacttattatgtgcggtgattctttattgacaacaggcggctgacacagtatgggtgtgttttattatgagcatccccccttgcggaaccattaacacgagaccattaataaccctcggctcttcttcgcccgcaagtctatgatggggtgtatcttggaccctggaaccactacttgactgagctatgttctgtcctgattagttttccatgcccattatactctcccgtgcgacacccaaacatacatatcctgcgagatagtataatagtccacaacgtactggtcttatcacaagtgggccttgtaacataactaaatagttgcgttccgcctttacctatcctctctgtattgccacagtccacatttccccttattttctgttaagaattgttttacttcgccctacataaaatagtcatggacacccaactagaaatatttctttataggaatatgcttactttgaaacccacctaacaaattctacgtcccaacaaaacaa

SEQ ID NO: 693922 - DNA, 327 bp, Homo sapiens
  misc_feature (23)..(23): n is a, c, g, or t
  misc_feature (44)..(45): n is a, c, g, or t
caggcagacacagctgcaggtanctcaccgacagtccgcagganncaaagtgaaatgatggggctgctcgatggggctgcttaccttacccacttgggaagagtaagagagacaggtgcctagcactttccatggtggagggaaagatgcatgtttagacctagctcctgcaggtgggaaggtcagctggcgcaggtgctccaacagcaatttagcaggagtgcccaaggccgtaaacacctttgctcagacaaatctacattttggaattgatctgaaggacataattaaggatgtgcagaaagacagagatccaacaatgttaca

SEQ ID NO: 693923 - DNA, 122 bp, Homo sapiens
gggggggttttttaaacccttttttttaaaaaaaaggttctttttgaaaaaaccaaatggggtttgtaaagtttggggccttccctctgtacccttgtgaaaataacctttgtttaagttga

SEQ ID NO: 693924 - DNA, 113 bp, Homo sapiens
gaacgtctgaaggttatcaataagctcctagtcccagaacgccatggggtcatttcacagaggagggacaggctgactatgcacagctgtggggcaggtgattgtggagatgt

SEQ ID NO: 693925 - DNA, 838 bp, Homo sapiens
  misc_feature (1)..(1): n is a, c, g, or t
  misc_feature (309)..(309): n is a, c, g, or t
  misc_feature (317)..(317): n is a, c, g, or t
  misc_feature (330)..(330): n is a, c, g, or t
  misc_feature (394)..(394): n is a, c, g, or t
  misc_feature (754)..(755): n is a, c, g, or t
  misc_feature (759)..(759): n is a, c, g, or t
  misc_feature (786)..(786): n is a, c, g, or t
natccagcttgacctccatgaatttggggaacatcctggaaaatctgggacacatggtttggtcaccattattatactatgtgctttttctcaatccaatagggatttcttaaaatagccttgcattccaacaggatataaaaccctgttgaagatgccccaatctggaatcaaagagtcagactggctagaaacagatctggttcatttcaccctccaactaaaataggatgcaaaactaaacagctgtcgttagagagacagaacttcatttcccccaaacagtccttttaacctagaaagcaagangccctggnccattggcaagcngaacaatttcttgctattttgcatttccttcctcagaactatctttaatagtttgagccatggnggagaaagagaacaaactaaaattaatttttaattgaataaaacaacaaaataaagcacaggcagaagctccctaagccccagaattctacgtgctgtgagtccagggctcagttcatacagacaaaaggaatgaggagattcgagctctgttctgcctgattaatccaacattgttcagcaaaggtctgtcccaatggttagaacaatgactagatgataatccaaagccctccgtgagcagttaaaaatgaatttgtctgaaacgttctcagtgtctactgagcaacatcaaaggagctcagggcacagccgactttatggagtaacaggtttaaaaacgaacatttttcagcttgcnnactnctaaaagcccaatttgtgtctcagaancaggagaataatcaccaagcaaagaaataatataatgatgcaatatgatgaa

SEQ ID NO: 693926 - DNA, 220 bp, Homo sapiens
aaggtcaggagattgagactatcctggccaacatggtgaaaccccatctctactaaaaatacaaaaatcagctggggtgtggtggcacgtgcctctaatcccagcctcctgaggaaactacaggtgtgcaccaccacacccggctaattttgttcattttttgtagacgtaggtctcaatatgtggcccagactaatttttttatcagtgtatttttcag

SEQ ID NO: 693927 - DNA, 272 bp, Homo sapiens
ccgagatcacgaccactgcactgcatcctggccacagagtgagacgtctgtcacacaaacgaaaaaccaaaaaaaccaatgaaatagcaaaagaaaaagaaagacacccgcaaaaactagattgcccaaggtgaagacatcatttttttcctatactcccagtacccactgactccctctttatcctacacgtctaatgaaatggaccacgtctgtcttcctcagtcccatttctccacctcttcctcctcccctccacaacctctacaagt

SEQ ID NO: 693928 - DNA, 1300 bp, Homo sapiens
ttttatgtggttgctgtggcgtctgctcgttgctctgttcgctcgctgttcttttctttctcgtttccgttctccaagttttcttgtgttgtgttttcttctctggttctatttggtttctcatgctctttgttgttgtgtccatggttgctgtggttgttctactttaccctttttcttcggggtcgtttgtcgcctgcttgtgtggtattcttgtttccttttgggtgttccccttgtgttcttttttgtattttatggttcctgctttggtttttctttgcatcttgtggtctacttttgtccccctttcccattttcggggtcttgtccccttcgttggttcacgtccgtggttttgtctcccttacttgtcattgtatctaggtcctccgtcttttcaccgtgtcttgatttttcctggtgatggtcctccatgtgtcttctccatgtgtgtgaccctcttgcttttgggttccttgacccttaattgtgttccccttccccttgtcccgcatgtctgcatttttcggggtcgttatcctgtttctgttggcatcgttattttgtactaggtcggactgctaccttatttttgctggtcatttcccgtaattggatgttctatgttatatatgtgtggtgtctcattagtgtcttggctgtacttggcccctgaattctgacgggtcccttggtatgtctcaatttgtattctatgtaattccctaagctttgcactccatttgtgtacgcgcgcaccggtgtacaggtgtctttaatcatgattacatttttatatacagtgtcccccctgtcaacgttctcctgaactagtggactggtgttgtgtgaccctccattgttccactgttttcaaggttgtttgcatcaatctgatgtggtataagataacggctttggcttgtccagcattgtaacttgtttgttgaccgttcttaaaagtgtcttcttatgtctatgcatctgatagtctggcactgtatctggtgtgcttaacgcatctgtgttgccagatccgtgtctgatctctacgtgtaatcctaggatgattcttatacgctctttaatgttgtaagtgaaaaccctgagttgacgcacatgcagtgcgggagatacagcgtcttttacctgtcaccgaagctcaggaagccccgtttgtaagcgctgtgattgtggtgcgtttattgtacatccgacagtggtcagttcatttttactctaatgttcttttgggtttcccccctcagatagaatcatgaataagcaacagacctaa

SEQ ID NO: 693929 - DNA, 165 bp, Homo sapiens
tttgatggcatataattagactgttacaaatttaacagcgatacaaagagatcttattattaaaagcagctgatggtttggaaatgagagaactacagaggtgaagagaccaggaggcagctctcagatgaaaccaaagattgcggcatgccctatcgtgagacc

SEQ ID NO: 693930 - DNA, 422 bp, Homo sapiens
cccttgcgtctgaccctccgctccctcttataaggacacttgttatgacactgggccatctggatgatccgggatcctctctccatctcaagatcctaaacttcatcgcatctcgagagttccctttcccaggtaagtcaacacatcacaggtcctgggggtcaggatgtggacatccttgtggggcacattattctgcctagctcagttggcagacgagtttaagttgagaaataacgtatggagcgaaatgacaggtaatatggaatctgctttaaaatccctccctttgtctcttctaaaaaatgggcaaatggggaaaagaaggtagataaaatatgtgacaattgttgaaactggagggtcatgatggtttgccatatccctctaggtaagttttaagaatccctaaatggctgagt

SEQ ID NO: 693931 - DNA, 1061 bp, Homo sapiens
gtgacgagaattcccagacgcaacctggtgccctatccccgcattcacttccgctctggccacatatgcccctgctcatctctgctgagtaaagccataccatgaacagctttctgtgcagcagagaatcgacgcaatgcttgcttgcgagccagataaccagatggtgcaaatgtgaccctcgccactggtcaacatactttggcttgctcgctgttgtaccgtcggtgacgtaggattcccatagatgtcaatgctgccatagtcaggacgatcaatgaccaatgcgtaccatccgatgtgttgtgggatgggtgccccagcgtaggctttcacatggcttgggcaatcagccgtacacaatcgtcgcacatctgttgggatggcctgcgtcggatgatccgtgcgccaatggtaaccatggagacgctgctggtagcattgcgtgtagcgaagaaccactaggccactagactgagtgcgctgggcttccgtccatggatcgcacaaagtgttggacctgcatgtgatgccaaacagttgcctgtagtcgcactggtcacgtaggcgagaggaggcatgagagcgacaggtagacgttccttgcaagagacggccccggggcagcgacacttgcgcttggcacgcaggagagcacaaggcactcgcatacagaagcccggcaaaggagccgagaatcaactcggtaacggccatggcgcacctggccggacgtcactaggacgcggcagcagggacagcaacataccaaggtcacagcacagcccggacaaaaccagcattggctcccatccgagtaccgcaagggcgaacgggcccacgagaacagacactgacgaacggaacacaaccaaagtcagaccacaacgccacgggggacgccgccaagccgagcaaacggcgcaaccgagccccacattccccaaacaccacgcgacgaaacagacccgccgcactaaaaccgacaaccacacgatggaacccaccaatgacaccataaccaccactccgaagcgcacagcaagccaagcaaaaacgca

SEQ ID NO: 693932 - DNA, 1192 bp, Homo sapiens
gctgtcctcccgcgggtcgagggcgctggaatacccagcggcggcgaagcggagagtgatccccgctgcgtctccgcccgcactggtccatgtctgggtgtctgctgctggagccgcgcggtgcataggccgtctctgcagacagccgctgcccagctcccggaccgattcggagtcctgctgcgcatggcctggtccgacaagccatgggctactggcctcggggtctcggtttggctcctgtgggcatgtcgccggcggcggtttgctgcgttgcttgcttgctgcgtgatctcgtgcttgcgagttggcccagtggcctcgagagcgcatgagcatccgtctaatttggcagcgggctgttctgccgcattatcagatgaggatccatccggagccctgtagactcaacctgtgtcatgactccatgtacacatcatccatttttcagaggttgtccagtgtctcagagctgtgctgaaagtgtgggattgacagtaaactcaggatcatttggagagcaaatctgttgggttcaaaagcgcaagatcatgtgaatgaggtatgaaggcttgaaggaatgggcaccccgcgtccttggacatagtggttaaggagcgagaggttgcatgacgttgtcccctggcagaggaaagatcttggaaagacccagggacaattggtagcgtaggtatacgccaaatggttgttagcggcggatttccgagggttggaacggaacgaaggaccaaaagggcattttaactacaaggataacacatggtgggagggtgacctttggaatagccttaccggacgcaatccttttaaagcaggcttgcgtggttcacacaaatccgaaacgggttgaacgcgttagctttttccccaggtatctggaatttaaccccaaaggacgtggtaaagccaactgaaaaaggttaacgggggtaccctggggtttccttaaccgcagtaacacggcccgaaacacattccgagcctaggggtcccatgggaatccgggggtagtttcaccagttgacgacgcccttcgaactggagcactacatttcgggcggaagaggaccagggcgaagttgggagccaattcatagcgaaaacgacgcccacgggtgtacgacacgagcgagacacgtcacaggtaccaacgttggttgccacggaacac

SEQ ID NO: 693933 - DNA, 1016 bp, Homo sapiens
ggtctcgtcgatcggcacagccttgccgcagccccggagaaaatgcttcggttaaccaacagtctatcgccagatgagaccgttgtcctttggtactggcatcctcatctcactcggatcttatgcccaaagatgtcaaatttggtgcatatgcccgagccttaatgcttcacggttgtatgacctttggagcctgatgctagtgtgctcgctgacgagaactggcgggaccctagatatggtgaaatcaatcagtgaattatatgagtcaggatggttgggggtaagtccgccaatcgttaatcaaacagagacttgggtgtcgacatgctatgcaaacacgtgccgaagtatgacttagccatccgtagcatccctcagaacgttgggcccggctacacgctgggttcagatgcatggttgccacatatgaccatatcgactaagctggggagaggcgagcataccaacgtgtgtacttgctagctggacagcgcatctattaagtccaacggaagggcttatcgcatgaagaattatgtcagaaggattgctattaccaagatgggaatcaagagactgacgcgtgtgacagtcaggcttgcctgaagcaggtaagttgctgacagcgtttaccaagccttcctttgctagatggcctgggggattcacccgccctgagacaacagtgtggccgggtcggcattcgactatctgcctagaacgggagaaccagaggaagggtatggtgccaaatacttcaaagctactgggactcgccggtgcccgccacctgtgtggaaatgcaaaatgtgcgttgttcatcggctgtcaaccgcgatgtgaataaccgtgtgtactggtttgtatttggacccccttctttgaagggcactcaacctatggctcgggggctatatttgggccagactcaaaaacgtctcaacagggccacgttctaccttccgcctgcactgtctttcggctgacggaattctgcgtcatcatggtcgctt

SEQ ID NO: 693934 - DNA, 113 bp, Homo sapiens
ccagtcacacagctctggtatcatcagcagtaggggtcatcttcatcaatacccagaccaagttcgatcatcgcgtctagatcctgtaagcatgtgtctggggatctatccag

SEQ ID NO: 693935 - DNA, 485 bp, Homo sapiens
aaaaaccacattggagaagggccctatgaatgtaaggagtgtggcaaaggtttgagttccaacacagccttgactcaacatcagaggatccacactggagagaaaccctatgaatgtaaagagtgtggaaaggctttcgtagagtgcggcatacctgcagcatcagagattacacacgggagagaaactctataaatgtaaggaatgttggaaagctttcggttgtaggtcactttttattgtccatcagagaattcatactggggagaaacttatcaatgtaaggagtgtggcaaagcttcacccagaaaatagcctccattcagcatcagagagttcacactggggagaagccttatgaatgtaaggtgtgtgggaaagccttcaaatggtatggaagttttgttcagcatcagaaattgcaccctgtgggagaagaagccagtcaaggtccttgggccatccctggtcagtccccagtgtga

SEQ ID NO: 693936 - DNA, 149 bp, Homo sapiens
  misc_feature (110)..(110): n is a, c, g, or t
  misc_feature (127)..(127): n is a, c, g, or t
  misc_feature (141)..(141): n is a, c, g, or t
tggctcgctttcagttctgaatatagcattttcaaacaaggggtttctacaatccaggaaccaaagcgaggcttcatttcctttatcttcttcttctacttcatcctcanttcctaacaacattggngggctattaatganggaatgat

SEQ ID NO: 693937 - DNA, 130 bp, Homo sapiens
atggggctactaaaaaatttaaatcattaaatttaacattacatttaaggccttagcacaaaaaaagaatcaaaatatctcaataatttttatattgattacatgttgaaagatttttagatatattggg

SEQ ID NO: 693938 - DNA, 128 bp, Homo sapiens
gccagcttttccagataaggttgtattgcgaagcgcaggtaacaaaaaagatgtggcagggctgggcacggtggctcacgcctgtaatcccagcactttgggaggccgaggcgggcagatcacgaggt

SEQ ID NO: 693939 - DNA, 182 bp, Homo sapiens
acatcttcttttcagcagcttcctccaaccctggcgcaatatcccctggcctcaccgtcacaaaatctattacactagccactcagcctgagctatattttttgttttttgtttaacatttcagttgctgttcccacactgtcagtagctgaatgtcatcacttgacctccatcctaacaat

SEQ ID NO: 693940 - DNA, 1086 bp, Homo sapiens
accaagtaagacgtgactttgctcctcattcaccttccaccgagattgtgaggcctccttaaccatgtggaactgtctctcattccacctaacgagaaacgcccacaggtgtggaggggcaacccaccccttcaatcaggaacctcagaatgtgacatttggaaattgggtggttgcagatgtaacgaattaacttggcgacatactggagtaaggtgggcccttcacaccatatgactggtatccttataagaagacaagaagagactcagagggaagacagctgtgtgcagctggaatgatgcatctgaagccaaggaaagccgtgcattgccggccaccatccaaaactagaaaaagtcaggaaggattcttccctagaaccttcaaaggcagtacagccctgccaacacctgcattcagcctctggcctccagaactgtgagcaggatgaatttctgttgttttcagccacccaagcttaggaaatgggttgcagcagactgggaataagacaggcagccagtcagcctccgtggaattcccaggcagcttgcaggagccagagtgggccctgggctctgagaaggtctgaggcccagcaggcgcaggcgcctaaaactatttctccggcaaggagggaaggagggttcatccagaacgtagatccccttctccttctgacactcacgaggtcacagcgagtggctgggaggagagccaggaagtttcacttgagcgtgtgggagaccgttggcagcctggcacccgaagggaggacgcggtcgtaacgagggaacatcagaaactccacagtctgttggacgacgggtgggaaggcatccccgatagggtcaagcactccaggaacatatctcagaaaccggggcccagtagcagccgagaatccagtacatgatgcagagggggagacaccgccaggggttagacctgtacacgacaagactatcccggtagagacacaaaggaggcgctagtagatacccaacaggggtgcacagatactcaaaagacaggagcacagtacagcaacacagcggacagcatagaccagaaataagacga

SEQ ID NO: 693941 - DNA, 354 bp, Homo sapiens
aatctacatgggcctggactttttttctttaggaaaaaaaatcaccattatctggccaggcgcgatggctggtgcctgcagtcccaacactttgggaggccgaggcgggcagatcgcttgagctcagaagttcaagaccagtctggacaatatggcaaaacccggtatctacaaaaataaaaataaataaaaataaaaattagccaagcatagtggcactgtgcctgtagttccaactacttggggggctgaggtgggaggatcgcctgagcttgggaggttgaggtggtggtgaacagtgattgtgccactgtactccatccaggcgacagagtaagaccctgtctgaaatta

SEQ ID NO: 693942 - DNA, 618 bp, Homo sapiens
gaaaaagtcttcccaaggtatattatcacttgaggagcatttcagcttataactgttgaaagccagacaaaaaaagaattctaaaatcaataagagaaaagtgtcaaatcacatataagggaactcccatcagactaatagattcctcagcagaaaccttacaggccaggagagaatgtgataatacattaaaagtgctaaaggaaaaagaaaactgtcacgcaagaacactatactcggcaaagttgtccttcaagaattaagagagtaataaagtctttcccagccaagcaaaaactgagggcattcatcaccactataccagccctacgagaaatgcttaacatgttctacatctgaaagcaaaaggctgatatttgcatcatgaaaacatgaaactcactggtggagcagatacaaatgagaaaaagaaaggaatcaaatgttaccactacagaaaaccaccaaaccacaatgataaccaataagagaggaagaaatgaacaaaggatgcacaaaacaagtagaaaacaattaacaaaatggcaagaataagtcctcacctatcagtaataaccttgaatgggaaccgatacatttcccacttgcaagatatag

SEQ ID NO: 693943 - DNA, 112 bp, Homo sapiens
ttgctgcttctgcttctgcgcttcctgcttctgctgcttcctgcttctgccctacaagaccctgctccaaaaatccatttaatatattgtcctcggatggcagaagcaggaa

SEQ ID NO: 693944 - DNA, 355 bp, Homo sapiens
tccaacgtaatacccaatatgtgtagaaataatgttctgaacaatgtttacatgtttatttattgtaacaagatggtgtacttcttgcttcctccgtgtgatttccgaagcaaagcaatgggaccctacgctatcagagtcttaatggggctggggcagtgtccattgaggtgtcctgtcgggaatgacaagtccctggcagattatgaggcaggcatcctttggagttcttctctcaggtatattttaactaaaagctatcatttaagttgaagaaatcaagtcttgtgaattgatacgattgtacttctagagtctttgatgataagttgtctttgggtactacgctttggca

SEQ ID NO: 693945 - DNA, 324 bp, Homo sapiens
aaatatttaaaactaaatctaagccacttttaaaatgcatgctggccgggcgcagtggttcacgcctataatctagcactttgggaggctgaggcaggtggatcacgtgaggtcagaagttcgacaagcctggacaacatggtgaaaccctgtctctactaacaatacaaatattagccagctgtggtgcgcacgcctgtaatccaagctacttggaaggttggtgaggcacgagaatcgcttgaacctgggaagcagaggttgcagtgagtggagatcacaccactgcactccagcctgggtgacaaagcaagactccatctc

SEQ ID NO: 693946 - DNA, 969 bp, Homo sapiens
aaagtaagaagttgcatctttacatagagtgatcaaggtataatggaaagaatatacctaattctttgaagtagtgttaattatagtttttcaaagtctgatttataccattattagatgctgatgtggtctgcgtataacaaatatgtaatatgatcgaatgattgtaggaacatagatattgctagaatggtgggtaagtatatactttcaaataatttgtcttgaagtaaattaacgcatgttcgcgtagtctgcaacatgggtgaccacgagtaacttgttaaacacttgtgaaaaactctgcttgatgtcctcatctttcctacacttatgtccctgcacgatgtacctccactgatatactaggattccttgattgcccattatagtgagcaatcagcgcggaggcggtacctgtgaagcattcagacgagtggcgtgaagctgtaagattaagactccggtgaggatggaaaatccttaagtacagtaagaaaatacagagcattgagaagactaaatgcaagcgtgctagcctcacctagtcatttccacctagtaggaagcacttattctcgtcagatgctctaaaatgtacttgttctcacctgtgagatctgaataaagcaagtctctatttactggtggacccataacaaccaggacaaagaagatgattacaatacccagtaagcaggggctacttctgcacttggaagagttttagctgaagacatgtgatcagtggggaaaggaatagcaccaagcgttaacgtctgggtaaagtagtaaatgcttgtgtaaacattccagttgtactctcacatttaaactatctgtattcccacatctggattgtgcagatacttaacaatatttccaccttaacattgcctgtaccacatttggtgttcacttacggcatggtatgccacataccattgggtgaaactgtttctgtggaac

SEQ ID NO: 693947 - DNA, 153 bp, Homo sapiens
gttatgcagaaaaatgagctgcactgggaaacaacagagtggactggatggggagagaactgaccaaggctggcaggaggaggagagcagcctgcagctctggacacggggtccacaccgccagaaccgaggggaaggacggggcgtgggccc

SEQ ID NO: 693948 - DNA, 1235 bp, Homo sapiens
ttagaagacacgattaggtgcatgaagcttccaggctgtagaggccctgtttcccttctctgacctcacaaagataaacatccttcacctgagttcgtggccagtccagcgtctgcgtctcccagacccagatgcctgtgacgttatgagtagttagttctaaatgtggtgacaaacaagtcatatctgtaagcacatgggtcttcactttcatgtccatttttagtcaacagaacttgcaggcacagcatgcaagcacaatgtgagtcaatcccaagccaagttgctcaactgtgcgttactcccttcattagaactgaccactgtctcccaccaacaatctggctggacacccagactatcactctgttgactacccatatcaaggaacaactgttatcttcttggatactacggtattccacttgcatgacacagttagacaacacaaagaatcacattttcaagatgtgagagcatgtacactatcatggcaatatgaactatactacatctgtaaaaatggtaaaacatggattaatacatacatggatcggtataatattctataattaaaacataaggggagtcaacaagggtcacattgcccttttgtgtaccatgactccattacttcatacccctgtgattggacaatactacatagatcacatcttccattaccatggcagcttgggcacaaataatatgcaatacaacgtggacaacatcactcacgagggacgaatccattaccggatcaaaacactgggcgcaaaaacttggagcactccacagagaaaaaagaggcccacagacagcgcagagcgcacacaaacagtgcgaaaagacaaacacaaacaccagaaacactgacaacacactcacgacagacacagatgtcgacaggaccacacctccagagtccccaagcaccacaagcacaacaaaacgctggcgaacaagataacgggataacacagcctacggggccacttaacaaacgcaccacacgaacactacccaagggaaacacacacaacaacacacaaagggaacaacacgtgaaaaaacaaacacaacaaaaacaaagaggcgcgcagaataaaaacatccgacaggacggcaccacacacacagcgcaacgcccaacacctggcacaaactagccacacaacaagaggccaaaaagaagaaggaagcaaattaaacaatcatagggatcaagaccaaaa

SEQ ID NO: 693949 - DNA, 136 bp, Homo sapiens
cagcaatatcccctccggtacccctatctatcactttcatgtaacattggacttagtgtccattaaactgcctgagcaagtggttgtgtagcctgacatattcttcctgtagctaataaaaggaaaatgtacctac

SEQ ID NO: 693950 - DNA, 661 bp, Homo sapiens
  misc_feature (8)..(8): n is a, c, g, or t
  misc_feature (33)..(33): n is a, c, g, or t
  misc_feature (41)..(41): n is a, c, g, or t
  misc_feature (50)..(50): n is a, c, g, or t
  misc_feature (52)..(52): n is a, c, g, or t
  misc_feature (62)..(62): n is a, c, g, or t
  misc_feature (82)..(82): n is a, c, g, or t
  misc_feature (104)..(104): n is a, c, g, or t
  misc_feature (106)..(107): n is a, c, g, or t
  misc_feature (111)..(111): n is a, c, g, or t
  misc_feature (114)..(114): n is a, c, g, or t
  misc_feature (141)..(141): n is a, c, g, or t
  misc_feature (150)..(150): n is a, c, g, or t
  misc_feature (158)..(158): n is a, c, g, or t
  misc_feature (165)..(165): n is a, c, g, or t
  misc_feature (170)..(170): n is a, c, g, or t
  misc_feature (179)..(179): n is a, c, g, or t
  misc_feature (190)..(190): n is a, c, g, or t
  misc_feature (206)..(206): n is a, c, g, or t
  misc_feature (209)..(209): n is a, c, g, or t
  misc_feature (214)..(214): n is a, c, g, or t
  misc_feature (219)..(219): n is a, c, g, or t
  misc_feature (223)..(223): n is a, c, g, or t
  misc_feature (226)..(226): n is a, c, g, or t
  misc_feature (229)..(229): n is a, c, g, or t
  misc_feature (242)..(242): n is a, c, g, or t
  misc_feature (255)..(255): n is a, c, g, or t
  misc_feature (268)..(268): n is a, c, g, or t
  misc_feature (276)..(276): n is a, c, g, or t
  misc_feature (282)..(282): n is a, c, g, or t
  misc_feature (284)..(284): n is a, c, g, or t
  misc_feature (295)..(295): n is a, c, g, or t
  misc_feature (320)..(320): n is a, c, g, or t
  misc_feature (324)..(324): n is a, c, g, or t
  misc_feature (326)..(326): n is a, c, g, or t
  misc_feature (330)..(330): n is a, c, g, or t
  misc_feature (332)..(332): n is a, c, g, or t
  misc_feature (344)..(344): n is a, c, g, or t
  misc_feature (352)..(352): n is a, c, g, or t
  misc_feature (374)..(374): n is a, c, g, or t
  misc_feature (396)..(396): n is a, c, g, or t
  misc_feature (402)..(402): n is a, c, g, or t
  misc_feature (406)..(406): n is a, c, g, or t
  misc_feature (409)..(409): n is a, c, g, or t
  misc_feature (448)..(448): n is a, c, g, or t
  misc_feature (460)..(460): n is a, c, g, or t
  misc_feature (462)..(462): n is a, c, g, or t
  misc_feature (583)..(583): n is a, c, g, or t
  misc_feature (618)..(618): n is a, c, g, or t
tagttcanagaaccccaattctttattaatcanagcttgcncacaatgananaaaggaaaanagcactaatgaagagtaaanatgcagggagcaaccttcaggngnngggngtnggggggaaacgacttcaaaactgcganagggacttntggggggnatctggngattnttagttggnacaaatgcccngcctagcccccttaantgngttanttcanaganggngtnttttgttgttggngttgttagtaggnaggattgccttanactggggnagaaanancagcttgagtnaaagtccgcagtgtttttgattttntttntntgtntnttttaatgcaanaaccagcncacagtttccaagtggaaaaanattcagtagcatcatgtacttntactanaggnaanagcttaaaatgaacatcatcaatcatggcatccacaaanaagccacctgananattaattaattcattccatcaaaagaacttaaactagagaattaagcccactttatgaagagcgatttcacggctgcttgaaccattcgaatttggatttgtgttcagcactttaaaaggntcaactttttgcttctacccagattggtctcaggnctgttttctcatccatccctttctaaagccaaagcacatttgt

SEQ ID NO: 693951 - DNA, 1334 bp, Homo sapiens
  misc_feature (234)..(234): n is a, c, g, or t
  misc_feature (320)..(320): n is a, c, g, or t
gtatggttggtgactctacaatgggtcggagttccgggctgactcagacgttcatgagttggtccttgcggcctcgggagatcatatactctacctatctaatgctctgtgtatacttgtctgcgtcttctcacgaatgctgctaagctagtaatggtaagcataacacaagagaactaacctgtctgaattcctatagcatgtgaaagattcgtgtaggttatgtgatcgctnacacttacgctgatgagtcgacttcgccaatggaattactcccctcgttacctcacatctcattcctagaaacgctacatacgttnacgtacctcatgtgaatgcttcatcaatgatacttttttgtgcaacgaaacaagtcttttagccatttccacatggtttgaacatacacctagataggaacagttcaagcaccagtttcaaaaccgatgccggcattacaatagggcaactgctcgaaactacgacgctataatcaactgccgcctagaaatgcatagtctctatttcagtagcacaaccccgagaaatcaattgtagtcacggaaactgccttcgtctgtctccattatagcacacggttacccaaggagaaactacaatggttttacgacacacgcaccaagtatactgggtagagagttatttggacgacggcaaattcggaactatggtgtgcataacgcatctatttgcaacataccagggggttagtttgcgtgaggttgagcttttaggccacactgaaataacttagtcactaggagttacaaagatgtaaactacaaagagatgagttgtggtctcaaatcggtggaagaaggaagaatacggttaggtacaacaaggtttgtgaaaaggggatctagagggctcagggggatactcttggtctataaggaatcgaaatggggatgccaaagtatccccagtggaagtaagacaactgtgtggggaaacaaggagtttggctcgaagggatcagtttgggccgaagataaagacggggtaagcactaaaaagcagtaggacggggtgacttttgtgacacttttttgcattattacacaagccgttgttgcacaaagggggtagagacaaagaccaaaatatctagatggagttgaacctggtcgaaaacaatacggaatgcgggagtccttgaggaacagctgggggatatggggaacatggagggtagtatatcaaggaagacgagcggaacatttgaggtggcgacataggggatatggcagtgatcagacgcaacataaggttgggaagtgtaggacatgatcaacggaagagaggaattg

SEQ ID NO: 693952 - DNA, 235 bp, Homo sapiens
caatatcttagctagtatctccagtgactgggtgagctgttgcaggcgtcactggttcctaaacttggtggctgtgataatgtcccaggggactcaggaggaatatggtgagttctgtagtttcgagagttggctggtagagccgtctagaggttcagaatattagcttcaggatcagctgggggtatgggattggctgaggatcacacgtatgtaggtgaaaggataccaggat

SEQ ID NO: 693953 - DNA, 131 bp, Homo sapiens
cattgagcccgcggggggagaaaagaaggggatgaagatacaaccctaccattgccccaggctctactagcgtgctgatggatgtggtagagcctgatgtcttacaggactcactgttatatatttagttc

SEQ ID NO: 693954 - DNA, 348 bp, Homo sapiens
tgtcagagctccgttatgactagaggcggtggtcactgagtaggagtcgaacagcccgtcacatggcgaaacgccgtctctaccaaaaatacaaaaattagccaggcgtggtggcggatgctgcaatcccagccactcgggaggctgaggcaggagaatcgcctgaacccgggaggcagaggctctagtgagctgagatcgtgccactgcactccagcctgggcgacagagtgagactccgtcccaaaaaaaataaagacacaaagaaagaaaccttaaattcggggggggtttttttattcccccactttgtgcccgggtatattcattttcaccacattttccctt

SEQ ID NO: 693955 - DNA, 203 bp, Homo sapiens
gggttaaatcattcaaccttttaggcccaacccaaagcctttcccccctgggaattttccttgaaaactcccccagctccccagagtgatgcagaaaagcccagtttgcagtggttcctgttcctgggcccagtaccgctcaccccttttttgcaaaaggtaagggaaaaaaggcagggagtgaaaagagggagtcagcttca

SEQ ID NO: 693956 - DNA, 183 bp, Homo sapiens
  misc_feature (135)..(135): n is a, c, g, or t
tgggacatgtgattgagtgtatagcaggagaatgggtaagtaggaaatgggatgtacaaggaagaagagatggagagaaaagtggatgagggttacggattgggtgtacgaggctagagggctcaggagtcctgngcagggatctgcccgagttctttcggatcaatgaagttgatcttgcga

SEQ ID NO: 693957 - DNA, 118 bp, Homo sapiens
ggggacggaggtcgaacccacctccgtgaatgtcatcgaagccctaggagggtgctgccatgggcgagcactagatatgccagcccggacgaccctttccccaagggcacggccagga

SEQ ID NO: 693958 - DNA, 532 bp, Homo sapiens
  misc_feature (436)..(436): n is a, c, g, or t
aaccctacaggaggaggagcacagagacaggcaggggcaggagcgggggcaagctcttttaggctctggccccacggtggcatctaggggtgggtgcctgcagctcccgaagccccatggggcatgctacagtgctcttttagctggccatatgcagatgggttaagtgttaaccagctcagtaccttctgggtattggggttctggtccagcatccaggaagaatggggtcacacatggacttgaaggatggtgtattcgggattttatgggatgatggaggtggctctcagtgggatggatggggagctggaaaggggatggagggggaagatgatcttccccgggagttcggcggtccggtggccgatctctctgaccatccccagctgaagggctcttgacattcagatgctccttctcttctctccttggncacgctgctcttatgctcctctgcacattctggttgtctgctcgtctgcctgtggaacctggggtttggggtcatatgtgtaccggatagcctggt

SEQ ID NO: 693959 - DNA, 473 bp, Homo sapiens
  misc_feature (447)..(447): n is a, c, g, or t
aaaaaaaaaaaaggtttttttcccccggggtgtgggtgtcccccgccacaaaataaaaaatggccgccccccccccccccccaaaaaagaagaggtgtttcccccccccccctcggggtggaaagcgcctcttttttaaaacaaaagactttttttttttttttttttctccccaaaaaaaaagaaaaaaaaagggtggggttttttttttgaagggggcccccaaagggggtgggaaagacccccccacattatttgggtgttttaaaaaaaaggaattttttttttttttcttccaaaagaggtgggggcccccccccccccctcctttgggggccccaaaaaggcccttttttccccaaattttgtccccctgtgggaaagatgccccttcggggtttccaaacttaaaaggggggggtaaaaccttttttaagttatcccagnccagtttaatttgcaagaaagccagg

SEQ ID NO: 693960 - DNA, 165 bp, Homo sapiens
tcattataaggtatttgtactaccaaaaagttgtatagtatcatttgaaagtggacttggattagttattaaatatgttttcccaactctagggcaaccactaaaaaaagtaaaaataggagttaaactgatatgataggaaaggtaggaaataggataatataa

SEQ ID NO: 693961 - DNA, 312 bp, Homo sapiens
taaaatagaaggcattatctacaagaacagaccaaaacacaatttattaataaacaagcccttcatgaatatttgtctcaagaatctaatctgaaaatagtgtctttgattagatgaatatatggagaccttcggattatcatcactatagaaagttgagcaactgcacaaaccatatagatttaaaccactgggttaagcagacgaagtaacagacagacatgtttcgggggatcatatctcagattcccaagctaaagctattgctcaaggtgcatggaaatatgtagggggcattaaaccatttagtca

SEQ ID NO: 693962 - DNA, 121 bp, Homo sapiens
aggtctgacagtgaggccatgatggagccaccgatcacaccgagtacttgcgctctgtgggtgctgatgatcttgatcttcatgtgtgctgggcgccaggtcggtgatctccttctgcatc

SEQ ID NO: 693963 - DNA, 662 bp, Homo sapiens
  misc_feature (1)..(1): n is a, c, g, or t
  misc_feature (553)..(554): n is a, c, g, or t
ngtaacctactgggctccctcagccctatacctgtggggctccccagcctgtacctgggtcttccctgacctgtgtggtttgaccttataaagaagcatcctgagaagccctgaagacacagtgtgcctgacttgaggtcagatagcttccgatgcaggcgcccttggtctgaccagaagtgagggaggaagacaagtggtatagggactttctcttgaccctgattttattaaatattttttcattctggaaatatatcaagcctcatttttatttgagccttggcatttctccattctttttgttttatctgagctctgtcaccattattacatctgctactaatggctaggaacctcatggggagggcaggaaaagcacatcgccacatgcaagccttttcctgaaggccttccacaccccacaccccatactccctggcttttcatcaaatgatcttttaaaagtgaatctttggagggctggagagatggctcagcggttacgagcactgactgctcttctcaaggtcgtgagttcaattcccaagcnngacatggtggctcacaaccatctgtaacaagatctggggccctcttctggtgtgtctgaagacagctacagtgtacttacatataataaataaataaatcttttaaaa

SEQ ID NO: 693964 - DNA, 252 bp, Homo sapiens
  misc_feature (17)..(17): n is a, c, g, or t
agcgaccaacctcatgnaattccgaaggaccctgactgaccgctaccacccgactgaccactgcaccttgattggccacttcccactgactggccactaccacctgactggatccccgctgattgaccaattccacctgactggcagaacctgcgcccctcacctaacctgtgctcttcttccaacttgcgtgcctcacagaacccgggtgccgcacaaccccaaaacgcacacctattcggacgggtgggt

SEQ ID NO: 693965 - DNA, 511 bp, Homo sapiens
acatcattctagaaaggaggtaagtaatctatggtgaccgaaagtagatcagtggatgtaaaaaacagaacaaacgcagatcatgggttatctagtgaccacgggatagcggtaatcacagtgccgactgacaaaagagcctgaccaaacttccagagatgatgaatatgtccactatcttatttatacctcccaaaactaggggtgaccgttggaccagtatccaccatatgtcaaaatgggccaaagtgatatcctgcacaattgtgcacgttactggtactgtgacttactctcaggttatttaaccaaaattatccttataatggctcctacgctcggcacctctgatcatggatttagggccaattatatgacatcacaccacaaatctcattcctctgcagacatcttggctttggatttttaaaaactatatacacttacaacggggtgatcccttagtaaggccagcccgcatgtctcattcagggaggggatcctctaagac

SEQ ID NO: 693966 - DNA, 184 bp, Homo sapiens
gttcggccgagatgtctcgctcgtgccttagctgtctcgcgtactctctattctggcctggaggctatccagcgtactccaaagattcaggtttaataacgtcatccagcagtagattggcaagtcaaatttcctgcattgctatgtgtctgggttccatccatccgacattgaggttgactta

SEQ ID NO: 693967 - DNA, 212 bp, Homo sapiens
aattatcgggcagagagtgaaagtttagactcttcctaggccgcttcttatgcagtgtctcccgtccagtgtgcctttctaaatcccaggcgcatgcagggtgcttgacagtgctccaggtcaccacattagccttggtgcctagctcttcttcccaggcatccagctgtgtatcgtttaccgtggtacctgcagctctgaattcgtacatc

SEQ ID NO: 693968 - DNA, 300 bp, Homo sapiens
  misc_feature (18)..(18): n is a, c, g, or t
aggtcgttcactagtggntccaaagattctggcacgagccaaaggggataagataggaaagaaaaaagaccccaatgctccgaagagaccaccgtctgccttcttcctgttttgctctgaaaatcgcccaaagatcaaaattgaacacccaggcctgtctattggagatactgcgaagaaactgggtgagatgtggtctgagcaatctgccaaagataaacaaccgtatgagcagaaagcagctaaactaaggtggagtttgaaagggtattctgcattccctgccaaggaaagttaagc

SEQ ID NO: 693969 - DNA, 802 bp, Homo sapiens
catgtggctcccgcctgtaatcccagcacttggggaagcccaagtgggtgaatcacctgaggtcaggagttcaagaccagcctgaccaacatggggataccccgtctctactaaaaatacaagccgggcgtgggtggcgcatgcctgtaatcccagctactcaggaggctgaggcaaggaaaatcacttgaactcgggaggcagaggttgcagtgagctgagatcgcgccattgcactccagccggtggtgacagagcaagagtctgtctcataaataaatacaaagcccattcttccagagtcttgtgccttaaataaaatcacagctctctgctgtgggaggactgtgcaatggcacatgcgctaagagctggtggggaggttgaagatgctctggggagaagttcgtagatcatcctcagaaaagcttgccttgtgtgctaccagaaaaactgtctcccaatcacccgaggaaagctgtcacagtagtccccccttatccacggtgttccctttccaggggttcaggttatctgcggtgcaaccaaggcctggcaactatcaactggaaagtctttcaaacagtaaataaaccatatccatatgaataattttgttggggggacggcctcagaaaaagttttgataaaccattggtggggggggcccgaaagaaagggtgaatggtaaattggtgccaaagaaagcagcgagaaagggggtggttctctacagtagaaggcggggagggaggttggagaacaaaggattgggtagggttacaggggcaggattatagga

SEQ ID NO: 693970 - DNA, 731 bp, Homo sapiens
gagtgcagtgggcgacctcggtcactgcaagctctgtctcctgggttcatgccattctcctgcttcagcctcccgagtagtcccaggagtagctgggactacagtgtgcccactcaccacacccagctaatttttctgtatttcctacgtagagatggggtttcaccatgttatccaggatggttgttgatctcctgacctcgtgatccgcccgccttgtggctcccaaaagtgctgggattataggcgtgagccatcgcccgggcaaatttttgtatctagtagagatggggttctcaccgtgttggccaggatggtctcaatctgaccttgtgatctgcccacctcggcctcccaaagtgctaggattactggcgtgagccaccatcctagccttaaatgcatattcttaaattatcaacaggtagatggttatgaaaatgctttggggctctaataacctaccttttacagaatgagaaactgctgggcttaagggagtgcagtatgaatccacgatttgaccccattcacatgtggcttgtgatttcgtgcatatatcatagatgggatccttctgcagaatacgtggaataggggcattaaggacacccaagccaattcagttgtgaaccttattcttggactttcttttcttgcgggaatttcagggagcaggctaggaaggctgccgggtaggatgaactgtttcccctactgttgcaccctgg

SEQ ID NO: 693971 - DNA, 337 bp, Homo sapiens
atctggagaggtgggcgctgaatgatcatggacttgactgtctgccatggggcagctgtactagagttacggtgggagcagatgacttgcatgagctgctggcatagatacctgggctaatgtggcaatctggtggctgggcttgaacggtcattggtgggttttcagcttctgttacagctgcatctccactctgctggttctcggctccagattccatggtcatttagttaccggtggtacaagctcctccgtcactgctttcgttcacggcccggatctcgctggagttttattctctcccccacgtaacacaccgcgtcaaactacacctccg

SEQ ID NO: 693972 - DNA, 189 bp, Homo sapiens
accgaggtctgggaggaaaggcgtgctgctgaaactgtaaccacaggaggcatcatgcttccagacacatctcaaggaaaagtatagcaagcaacagtcgtcgcatgttggatcgggtcctaaaggaaagggtggagagactccaagccacgttagcgtgaaggtcggacgactagggtactcctccca

SEQ ID NO: 693973 - DNA, 170 bp, Homo sapiens
  misc_feature (2)..(2): n is a, c, g, or t
  misc_feature (50)..(50): n is a, c, g, or t
tncgaggattcgatcacgtgcatgtggaagtgggtggcgattcctcaggnatctagagctagaaataccatttgacccagccatcccattactgggtatatacccaaaggattataaatcatgctgctataaagacatatgtttattgtggcactagtcacaagggcacg

SEQ ID NO: 693974 - DNA, 278 bp, Homo sapiens
cgccagagaatccgtaattttggtccttgctgccccctgtacgtgaaaccgaaggacaatttataacgacagcggggaattttcagaacagtgttgcaaaaccccctcctaagacctggcaaacatgggcataagtgggtttagctccactctgaaggccattcacgatgaccaggtctttttgccctttttggggagggctcgaacagctcaagcccaaaaagatgcccgttttggagaagcagagcccaaaagagacagtggttccaagttgcggg

SEQ ID NO: 693975 - DNA, 211 bp, Homo sapiens
ttagatgaggaagaagaaacagagaaccaaaggggcaagaggttggtccctatactttcactctcctgggaggagagatgggtacaccacacagttggatggtgcatctttgcctgtctgcacctgcagctccactggcaccatggcacccatgtgtacaatctttcagatgctatctgggtggcgcgcctagatgctcttgacctctctg

SEQ ID NO: 693976 - DNA, 288 bp, Homo sapiens
  misc_feature (50)..(50): n is a, c, g, or t
  misc_feature (161)..(161): n is a, c, g, or t
gtgcaaaagtgcctcttctatatctacttaatctaatttatataattacnatgttatttgtaagagctacaaaggaaaagtaaatgaatttattgaaaggagactttagaaagagtgacttaatttacaccagggaaaggttttagagaatgttgcccccnttttgggaaagttggttttgggcttggaggcctgtagtgaaaagcaaattacccagagcctctagaagaaacagacatgttgctttggccaaggaaaccccccctggttcaaggtcaaagaaagttt

SEQ ID NO: 693977 - DNA, 1432 bp, Homo sapiens
gctgtgggtagtagtagggagtgtctcgtcggtgtgctgctgttgtagttgtttgtctgtattgatttgtgatcctttgtgcttttgtggttgtttgctttctcgtggtggccttctcttgtgcgtcttctccttctgctgcttcgcgtggtttttcatccacttttgcccctcttatccggggcgcccctcccgctgttttgccccgccttgagagcaccgggggtcgcgtgttcctgcttccgggtgttttttcccttagcccccggggctctgtgtatcaccaattgtttcccaccgaggtacctagctgttttgtgcccccttctagtcccttattttttatgggtgccaccacttaatgtgggcacacagggtgtggtggcccgcacaaagataagacgcatggtccggtgggttcccgtggtccccagataatttccccccggggattacttcgttctgggcactacaccggctgggtccttctctccccaacgaacgtccttttacttttccccctttttcgatatggaaagagcctttattccacccccttttcatgggttctaccctccccttctagataaagtccactgttctccccctagttcttggctgttcccttaggttcccctcggtatacgcccgccttttgtcctaaaccaccgtctatcactacccataacgtttacctatagtatcgtaaccatttctccaaacgctcttcacggaatattattgtgaaccccttcttgaaacatattccttggcccccccacatcacatcctatgtccctcatttctgcccccgtcccccaatctcctatacgcacatccctgttaacacatataccacgacacgaaggttcacaacgattccctctccctgtatccacaccaaataccaattggccccaccccataggttactggaacactttacggagttaccaccggacttacggccgggacttaatattgtccaacatccttacaataacattcccccccatattatattccttaggaaccccgagcggacactgccggacatccctgtggacaggttggaccacatcggagattagtacatccccggattggaagccccccatatctgttataaataaatataccatccaccaagaacagttttgcgcacatccatggagactgtctccccaccatataggcgttataaaaccagaagccaattctcccggacagtcttataacccaaacccactttctacccgctacaacagacccgggggtatacataccggtccaatgcttcttgaaatcttgtggagccaaacaccaccagtttctatgccccatctcgtcctagaattaattccccttaaaatttttgtaaatagggcccgtatttaccctatagcaccccctctaccccctttagagccca

SEQ ID NO: 693978 - DNA, 151 bp, Homo sapiens
ttcagggtttcagaattttaaaaggcccaaattttttagggtcttttgcatgtggtaagcccgaaaatattcaaagggattttggaaccccattggttttaccccgccccaaattgggcccccctgagggataataaagaatttggaccca

SEQ ID NO: 693979 - DNA, 934 bp, Homo sapiens
cttgtttcccgcggcgtggtgggccacgttttttccggacaccgttgtttccggggcctgaagtgggcgcaattttggtcccttggaccacgggggtgaacttcaagtcgcgaactttggggcctctcgcaaggaggagatttggtctttatgggaaccgcggagccacgcaacacctgctgtgggaccccggcagtttcgtggcccccctggagaggttttctgcgcggcacccctgtgtgtccaccgccgcagcgtcgtttgagactcttgttgggggagcctcggggtggttgtcttgctgttttacgaggaatatcctgtgcttggcgaagtaccccccactcttccccccgggagttatttaaggaaggagaggttctttctcgacacacgccagtttgttttccaaccggccagagtgtttttctcctacacccgccgcgctttccctctttccggccgggaagcctcacttcgggcactcctcactaggataggggcttgctcttcgtcgcgagggggacccccccgcggacccggagggagcttggggatgctactcgcacggagagaattccgcagaagatgtggagaggacacacgcgccctttttgcacggatatcctggggtcggggaacccctccttgggccccgcgcctctgcccccgcccttttgtgcgccccccacttgtcgtcggccggccacacgagcgtcgtgcacaactttcgacgcagcgagttttcaccccggggggccccccctcctgagcccgccccctcgaaggcggcgcccttacaaccccggggcagagcaaccttcctggaatttgaatttttggcccgggggttttaaccccctccccttcccctgcccctgcccctgcccgaggaagtttttatttttaaaaaggcccttggggttttcccgga

SEQ ID NO: 693980 - DNA, 142 bp, Homo sapiens
tctatcagtgtgccactcatgtgcttctcactcatccccaacttccactgtgtagtgagtaaattctcagtgtggccatggctacagaccctctctgctctggtcccatctaatactgtgaccagagcagcagggaaagaca

SEQ ID NO: 693981 - DNA, 283 bp, Homo sapiens
aagagtgctaccaaagaaaacatggacaagagcaatgaggagctgagaaatctaatcaagccaatcagaaactttttgacccaggatagtgctgctttggacagcattgaagcagttgctaatgaagtattgaaaatggagatgcctagcaccccacacgcacgttacacgacaccttgacagaccgactactaccgtgacaccgagttgaaacgcctttctcaagtagaggttattcttcacgcactagtgcttgctgacattgccagagcctgagactgtt

SEQ ID NO: 693982 - DNA, 946 bp, Homo sapiens
gccggagttcaccggggccgattaggcgttccctgtggcgcagtgcacctgaaagcctacgtatcgtgtaggtggtggtggctcctgcatcgatcagtggatgattgtgggatactcttgctcatgtgtctccatcattgaagctcaagaatatcgcggagatgggtactggagatcgatcattgtgaggtagcctgaagatcagacagagactgtctctgaattgaagcaccgagtttccctgatgccaggcttctaccatcgggtccatatggaccttcgatcgggtgtgttgactaacgaagcatgcctgctgtgtgcgtctacaagtcgtatcccctggggacaactgtgtggatacactggactgtaacagaatgggctcgagaatgagtatcccactagaaaggtgacgggtgtcttcatatgagtataaaagttcgaacgggtgtatcttaagaatgaggattgactacgtttgagtgtggaaaaaggtccggtaaggtggactaacgatattaaattcgggaggggagagtcttagtggggagagagagtcagggttcgagaggtgctcagagaggaggattgaggtctatgtagggcagtgaaagtgagagtcattgtgtggcttagtgtagcgcttttactaaatctagggacgactactggaatcgaattggattgcgccgtggtggggaatggagaacaggttctggagacaacgcattagaggatttagaccggtggaagaacttggggaggcttgaaagtacgacggaatgggagtcgagaccagaatttgggaacgcattggggccctgggaaattcatgaccacataatttttgaaggaggcctgattggtttagacctgaaaatagaaagcaaaaaaaaagtttttgttgggagataggaaaaaaaaaatttaaaaattttttggccga

SEQ ID NO: 693983 - DNA, 100 bp, Homo sapiens
tagctacttctctcgggatgtagcaagaaaggtgacgggggaagtgacagatccatcaggaaaagtccactttgctcttctggggacgtgggatgagaaa

SEQ ID NO: 693984 - DNA, 1562 bp, Homo sapiens
gccacgcgtccgcccggccctgccacagagagggaccccagcccagtcaggggacactcggcagggctgggcgacttccaccttcccgctagaagccgtagcgagctgtggatgcagtggacatactgagcccagcattcctggcatccctcacgcatggctcctcaccaacctcacttcgacacaacatgggttgtcggggacagtatgggtatccacctttacatcgtgccaccaagcgaggcataaagcactgtcacatctcgccccgtactctgggacacttatcaatcatgagctaaactacttcggcgtaactctggactaacctgacacaccatagcgactcgctgatctgacacgctgatggcccactgtgcagcatgcaccctctcgtagagcacgggctaagcacacactcgtgattcacgtggtaggacagcagcacgtagagggtcactatgtcacactacaccttggagcatgagacactcgcctcgacgctggttccatatctgcaatcgtcactcgctcatcctagagagaggctcacaggccattacacacagtctcaggatcatagacaagccgtcccgcgattcaatgcatcacatctcgacaccagggcactaacttcgcagaccccatagggcactgactgggtggtttcgccactaaaccacaacaagagacacacgacaacccaaccacaaggcgggacgacgaagcagcagcagcgacagcaagccaaaaagaagacgccggtacagacagcacacgcaaactacgaagagaaggatgacgtcgggtgcccaccacacacacgtgccgaacgcctcgacacgcgcgcacgacgactgaacgccacccacgaacgacgcgacgatcagcaaacacacgaagcgggggaacccacacaccacaaacagcgcttgacgcagcggacacccccaccgactcgaagtcacgaacaccacacgcaggcacgacgccacgtcgcagcgcccaccactcctacacaaactaaaagacacggcccccacaagcgcgaggcaccaccacagacgtgggaagcacccgcgcacgacgcaagcgtagtcaccatcacagcaacacaccgcccgaaacacccggagcgagcgaacacacgtagggaggacaaacagcgacgaccacccacccgggcgcgaccatccgacccatcacaggggacggacacgacaacatcccaccgaccgcacggcggcgcgaccaccagcgtaggagcgaccgaccccagcgctaagacacaaaccacatcgccacaggccggaccaccgcagacgaggcagaggaccacccgccacgcacacccaccgcacggggggcccccaccgacaaagccagacccaccacacgcttcacaccgcactgcgaaggcaccaactaacgcactccgagcagtagctactacaccaaacacgctcgcgcggccaaacgagcaaacacatgctcgacaacgcaagagactgcgcggccacagccacgcccgagtagtagccacaccaccaccccactggatg

SEQ ID NO: 693985 - DNA, 134 bp, Homo sapiens
taggtagcctcagcagttcagggcaggagacgaggccaggtctccagctaggggtaggacgtagcccaccagctagccgaaggccaagacgccaggtccggtaggacgtgacaaagcaggacatgacatggtcc

SEQ ID NO: 693986 - DNA, 479 bp, Homo sapiens
ctcaccaggccctggaagttgcaggctgcaggtgggcaagggaggctgccaccactgcttgggatccggtctcctggtggctgcctgcagagaccgcccagataaggggacgaggagttggtgtcctgtgagacaaacttcagtcaatggcagacaagagtcagtggatgaagtctgccttccttcgtggactgttttatgatactgtttatagtttagtcagcctctccggagacatcctgtaaggcagaaaaatcacggttttgtgaggagctcagcaatgcacttgtgtttgctctccctccttccctccttgctccttccttccttccctgcttcctccttcccctttcttccttttctgcttcctcttttcccccttcccccttttttctttcctcttttctccttcctccttccctccttccttcactgatactttttgggattgctctccctagtaaagcataagcacaaaa

SEQ ID NO: 693987 - DNA, 384 bp, Homo sapiens
  misc_feature (328)..(328): n is a, c, g, or t
  misc_feature (337)..(337): n is a, c, g, or t
aacgggtgatgcggttgacaggtggaggtagggtccttggagagggtcactcaggacgctctcaaaggagcaccccacaaggttagggccacaaggaggcaggcactgctctgacacagccgcgtctagtgagcagatgaacgagaaggattaactgctcatccctgaagacagcacggcatgcaagcggcccaccggaagggagcccaccggaaggcggcccacttgaggcgacggccgagctccttccgatcgcttcacacgattcaaagattgaggccaaaccggggatgccctgggtggtcatctgctgagcccaggagactgngagggctgnggagaccagaagcagaggggaagggatggggaagggagtgaggatgg

SEQ ID NO: 693988 - DNA, 1691 bp, Homo sapiens
ggcgccatttttttgtgacacctctgcgccatgagagccaacgtggagtgaagaagcgaatgcgcaggctgaagcgcaacaacgacgaaacgatgagtgcagacggtccaatgtacaacccgctacgcttgatttgcaccgtggacgtgccacacggacgcacgacacacatggacactgccagaccgcatggggactgcttggtacacacgttgatgggacctgtcaattgctacctcgtcgtagacgacttgatctcaaattggaatcgtagacacttcactcgacccgtctgactcgaccgaatcacacatactgaggacaccacacattgacgtcatacgagaagaatgcccaatgtatgagtcctactgacccatggaacctgatgaccatacatggacctacttactagatgatataaatacagatagagcacgacgtgttaacacaccaatcattaactacaattcacacatcatatccggccatgatacttcaagccgtgcacacgcacatttcaagacaaacgcacaacaaagccaacgcgagaacacacagaggacaaacaaaagggcagaacgatacaccacaaacaggacagagaaagagacaacaggccgaagagacgaagccaaaggaaacggaaaagaaaacaaaacacaaaggagaacacaaccacagacagcaaaagaacccagaagaaacaaagacctcaacaaaacgaagagaaaaatacaagaaacaacactaacacaaaaagagacggaaacaaagaacaaggaaacacaaaacaaagagaaggagcgacgaaagaacaaagagcagagcacacagcggagagatgcagaaaaagacagcatgcaagcagcgagtgagtgagacgaacacaaagacgactacgggagaacaaccacgcacagaacccagacagcaaagagaacacgacacaaaaacagccacgaccgaacaagaaagaaacaaacaaacaaacaaaaacgagcaagcaggacagacagacacgaccagagacgacagaacaggggaaagatgcaaagaaagaacgagagaacaggcatgagcgctcagaaggcgcaaagcgacaaggtaggagacaagacaaccgaagaccagtggcaggagagcagcgaacgggcagaaggcgcagagagagagaaacagagaacgagcacccggagcagagggacgaggaagagtagagagacagaagagatgagacgaagagcagaagtgaagagagaagggtcgagagaagaggaacaggaggaagcggaacgcagagacagagaagcagagagacacagatagaagacagtagagcaggcacaagaagaagcacgacgtagcaaagcacgacgaaggagggagaagaaggacgagccagcagagagaaaacagggagtagagaaagaaagagacaaagcgcgagaggacgggcgagcgagagagagcagacagggatacgaagagaagaaagaaaacaagcagacagaagaaaggaggaaggaggaggaggacgcgaaggacgcagaggacgacggcaacgcgcatgaaggagggagggagacagaggagagcagaacgcaggaaagacgaaagacgacggagacgaacacaagcagaagccaacacagagagagagaaggacgcagcagcgaggggacggacag

SEQ ID NO: 693989 - DNA, 156 bp, Homo sapiens
tttagcctggaacagagtcaaagatgtgccaagttctaagacaactggagactaagcccactctcatacaagagagggttataacttcttgtttctgtagcacaagaggagagaagagcccctaagacagagctggaaggtctgacctatacaaat

SEQ ID NO: 693990 - DNA, 292 bp, Homo sapiens
aatatagtgcttctctcaattgagcagaggcctctcgtgaatgtaacaagcttgggaaccgttatacaaataccactccgagtataaagttgttgtcattaacacaaatgattccgtaaaaagcaaaacattttttttcaaaagcaggatttgttctaagtctaggttcacaaaggtattcatttctataaatatcaacttaagactgtgagaaatgacgtattctttttcacacgaatatgttccaggtaagtaactaaaaatgtacgcttttattgaaccggatagcttg

SEQ ID NO: 693991 - DNA, 274 bp, Homo sapiens
aataagtatagaaaagtatagaggagaaagtataaagctatgacatccccagcaccagcagaaacgtgaggaagatcagtgcaactaccattcacccaacctaacaaccatacattaaaaggattacaagctcctacttgagctggattttgatatgtccaattataccctgaaaaggaactattatggactgtacctattcggaaaaaatgaaaaataattctccactgcccaaggtacttatctagattgacagccggtccaaggtcgacgc

SEQ ID NO: 693992 - DNA, 326 bp, Homo sapiens
  misc_feature (287)..(287): n is a, c, g, or t
aagactgcctatcatcatatcaaatatgccaatttcttaaaaagagcttaacattagaatagtatatggtagaattactagttcagaattggcatagattctggtgttaaaatagactggatctgtattatctgaggggtagtaactaatgcttagccaggcctgcttcaaaaatgttgctaccaggagtattctttggtaagcaaatgctaccagcatttttttaagcccagtaagggctaaagtactaattatgcaacttaacgtacttcgtaccccagggccanttcaatcaccaaattgcctgggagccctggttgagagag

SEQ ID NO: 693993 - DNA, 858 bp, Homo sapiens
ggagagaactagtctcgagttgttttttgtttttttttggaaaaagtccgggaggccagggggtcggcttgaacccagcttgggggggtccgatcccttcctttttggtctagatttatgtatacgggttctccgaaggtgtggagggtggggggcatccatatggtccctccaggtttatgggagggtcctcctactataacaggacttgttcgctatcgaagcgaaggcttctcaaaatcatgaaatttatcaatattcactggctgttagagaaatggattgagcctacagatgataggatgtttcattgttggcggtactgctatcggggtacggccgagtaacgtcggggctatacgcggataggccagagaacagtgtggtgggcagcacaagtctacgattgagcgccgataaatcatgatagtcgacactgggattgtgggcgtaggttcagggtcacagggggtcagcctgagaattggggagactccgtgaatgacgcctcctatgtgggcacatacgggtccccattggatcggactgcgggaatgagacctagaacgtaatatgtgtccgtgtcacacaggagcgccacgaggtcagaacgcgtgagacttcgtccggcgggggagtgccgccgtagatgtcgactgactgcgctccgaacagggggggcctggggggcaattcttcccacaaggcagggacatcagaaaacttggcacgggggcgatagagcggcaaagacgctaagcaggtatcagggccgctggaacaattgggacgatccggtatgcagcgcagacggggggcggacgtcagccgcgccggggcgcccggagaaagcacggc

SEQ ID NO: 693994 - DNA, 1196 bp, Homo sapiens
gcacctgtgtgcccatgtgtgtgcatggtgcaacatgtcttaccaccggaccaatgagtgacttcaacctgtggcgaatctggagcagttcagcatgtgagagcccatcagccagcctgtgtgctggatccccactggacttttctgaatgtggcctgtgatttttagggcggtgatggtggccaatgtgtgtggcccctcagtgatcacccacaccttcaaccaccagaacttgacccactgttcccgcacactggctcagggacctaacatacatcctcacagcgggactcctctcacatggtttactactaatggagatttgccacgcatgccctggaacggacgtgcctgtgcttttgagcgtgtcagtcagcttgcgacttggacgcctagtggctatggagctacgacccactcgacgctgccggcactgggacggccacttgggacccaggaaccgcggctacaaaaactgcttgacctgaacctccttgtatagcccctgagctgccctagaataccttgcacgcatttgcaccgagcatccactatccctccatcctgtaacccagcgctttcccccaaatacacactctacacccccatcaattcatctccaaatcattcctactaacccttagtagcacaccacactacaaccacacaactcaactaaaacaccacatataactcccaccttacactcaccccttctccgtagcgatcctaccaagcaactcccccctcccgccctcccacccacgctaccctattacccctccactccccccccccctcctcccaaccaccctttcacccaccatatcatatctagcaacctagaacacaaccacgccaacctctcctatctcccctcccatcttcccccttctacactctctcttctaccacaacgataccacatagaccacatacctctcgcacgatcttcctccatccacctcacgcaaaattaccaataaacaacacaaaataacacatacaatcctctacaccttctgcatactaccttcctcacgcacactcccaccaacaatatcaatcgatatctctagctatgaaactcgtagatacaactacacatacacattactactacctattcgctacgaagctaaacactatagacataagccataactcacaaagaagccacacgaccaatatacaga

SEQ ID NO: 693995 - DNA, 776 bp, Homo sapiens
gcggggactggagcaggagggctgcaccgggactccgggacaggcccagttgaaaacggcggggcgagggggtggggtggagacgcccgcgacgccaaggctggggtcccggaaagcgcggggaggagggtggaaggcaaaggcaacttctggggaaactgggaaatggctggcctgtggacctcggggacacttgctgtaccaccctggctgcacagcccctcccgctgcaaaccctgagccaaatggggctggtctgagctgtgctgctctctggagcggagctcagtgggattggtgcgccctggcacttattgcttgggcacagcccagccccagcccaggacctgctggcgggtgcgaacccagcctgggcggggtgcaatgctgcggtggcatgtggcctctgctgcccggccccctcccctgagtagaaaagcatgccgcaggctgtggcgctccaccacggccgtccggggtgggcctagcagtcgctccatttatcgcttgagatctccatgccttaccgtggctcgaaatggaccccaactgctcctgcaccactggtgtctcctgcgcctgcaccgtgctcctgcaagtgcaaagagtgcaaatgcacctcctgcaagaagagctgctgctcctgctgccccgtgggcttgtgccaagtgtgcccacggtgtgtctgcaaagggacggttggagaacttgaagctgctgtgcctgatgtgggaaccaggtcttctcccagatgttatagaacagctgacaactga

SEQ ID NO: 693996 - DNA, 500 bp, Homo sapiens
  misc_feature (108)..(108): n is a, c, g, or t
  misc_feature (112)..(112): n is a, c, g, or t
  misc_feature (138)..(138): n is a, c, g, or t
  misc_feature (144)..(144): n is a, c, g, or t
  misc_feature (148)..(148): n is a, c, g, or t
  misc_feature (178)..(178): n is a, c, g, or t
  misc_feature (185)..(185): n is a, c, g, or t
  misc_feature (220)..(220): n is a, c, g, or t
  misc_feature (224)..(224): n is a, c, g, or t
  misc_feature (450)..(450): n is a, c, g, or t
  misc_feature (476)..(476): n is a, c, g, or t
  misc_feature (480)..(483): n is a, c, g, or t
  misc_feature (485)..(485): n is a, c, g, or t
  misc_feature (487)..(489): n is a, c, g, or t
  misc_feature (491)..(492): n is a, c, g, or t
  misc_feature (494)..(494): n is a, c, g, or t
gtaccctgtggagacgggttctcaggccagaatcccgccaggaggaaactgcagaaaagagctcccagaaatctgcaccgggttctcttgagtctgtactgaggaccngccngtacatgtatagaagaaaactccacnaagccnggcnaagaggagaaaggagcatgtaaggtgaacnacttccngacctcgcacacggtcatgacatactgaagctccngccngggggatgggtccccagtgatcactgtggacattcagtggagactcaggaggagccacaccgtgggaacagggctgatgctgtctgcagtgaaggctcgtctagaacctgcctgagaaactgcagctacagaaatccaaggcctggcatggcggctcacgcctgtagtcccagaactttgggaagccgaggtgggcagatcacctgaggccaggagttcacaaccngcctggtcacttgtaaccccgtctcnacannnntncnnnanntngtcagg

SEQ ID NO: 693997 - DNA, 258 bp, Homo sapiens
cgctgactcaagttcatagcacttgcttcacacggttatccaagacttgggtgccacccagtgcttgccgtgttagtagcaaatgccatgctctggacggcgctgacttacctactcttttgccagccccactttcgcctgtcttactgctgccgctgctagatttcccagatgattgtgaagagacgagtctggtcatgaactcacaaacatcaggcccctcatgagttggacttcaggaggtagtccgcgacttga

SEQ ID NO: 693998 - DNA, 114 bp, Homo sapiens
tctaggttgaccacatctatggtccaaataccaatactgtccaagataggagcctatcacatcctgggccatacgctgcccttccagccatcatctcttaccactatgtcttct

SEQ ID NO: 693999 - DNA, 157 bp, Homo sapiens
ccgccaccacacagacagagcatgtcagacgccccgactcaatttagcaaacacaacctatataaccagtccggtgctagggagctagctgggacccttaaggagaccccaacctgggagaagacataaaacaggacagacagagaacagcgggttt

SEQ ID NO: 694000 - DNA, 167 bp, Homo sapiens
gtatctctaacattaggtacgacaacaattccacgatgccaaattcatggcagacactgatctggatccaggctgtacatgaataaaaggattcgaaatgcacagttagcacagtataacttcattttagttgttggtgaaaaagagaaaatcagtggcactgttaa

SEQ ID NO: 694001 - DNA, 131 bp, Homo sapiens
  misc_feature (84)..(84): n is a, c, g, or t
  misc_feature (86)..(87): n is a, c, g, or t
  misc_feature (90)..(90): n is a, c, g, or t
  misc_feature (98)..(99): n is a, c, g, or t
  misc_feature (105)..(105): n is a, c, g, or t
  misc_feature (110)..(110): n is a, c, g, or t
ggtttttgcattgccggcctttttgccttcccctttttttttccccgccccctgcacattgggggtttcagcccccaggttgtngnntcnttgggggnnggcccncaatnaatgtgaattgttgttgccca

SEQ ID NO: 694002 - DNA, 729 bp, Homo sapiens
tagcggaaaaaagtatcctcgtcataatgtgatgttcctcataagcgataaatgcctggacatagctcgttgtgcaagcctttaaataacatgtatgagtgtattatggagccccagacaacataatgtttcaaaggttgatccccttgctacttgtactggatacctttatcattccatgagactagtttgctgaatttgaaagaatgtaggcattccattgtgtatgtaatttctctcccttgccaaacaagattttctaatactggctggtaaccagccgagagaaagatccaaaacagctactcagttctctgcacctgaggaaaagttttgtccccctacggttggactcctgggcctacaatcagtccaagacttaaccactgggatggggctctggatttgattatgccaaagttagttctggtgctggattgcaaaagaagtgatatttagatggtcttgttaatattcaggcagaatgtgtcttcctattatataggtgtgcttattaaatgtagcagtgtttgcgtatatgttatcggcctgagtttatagcctcaggatatgataagttctgctgatgtgtagttatgtggggcagacatatcttcattaagagttgtttggaaaaactcaccaaattgcgatgaataacattttccttcttaaaccattcgggaatttatttcctaattaaacattgatatatcggaaggaaaaaac

SEQ ID NO: 694003 - DNA, 370 bp, Homo sapiens
  misc_feature (14)..(14): n is a, c, g, or t
  misc_feature (250)..(250): n is a, c, g, or t
  misc_feature (260)..(260): n is a, c, g, or t
aatccgaagctganaaaattaaccatgcttcaacttaagaaaaccttagtgaaatcgctcacagtaagcatgcaaaaaggaaacagtatccttttgcaaaaaaaaaaaaaaaaaaagggttgaaaaaaggttctttatgattctggggatagcccattccatgtcataaagaggccctagatttggtttccggtccaggggttggtgtggatagggtgtgcctaaagagccattttcccaaaagccaatnttgtcttttncataccctccataaatatgaggccataaaaatggccccctttgagggagagatgggatttggtgggctccgggaaaggaggcgtagatctggcaggtgaccaacacaggg

SEQ ID NO: 694004 - DNA, 124 bp, Homo sapiens
ctgtcataaagccatttcttggtagtatgggaaagaggcatatgggatttatacagattcacttgtaaatagtaggataggggattattgtgtaaattttctcaaataaaggctagcagaaacc

SEQ ID NO: 694005 - DNA, 170 bp, Homo sapiens
caaaaaaaaaaaaaaaaaaaaagcccggcatggtggtgggcccctttgatcccacctactcggaaggtttaggtgggaggatccctggagcctgggaagtttaggctccagttagctgtgattgcccccctgctttccagcctgggggacaaaacccccccctgcctcca

SEQ ID NO: 694006 - DNA, 131 bp, Homo sapiens
tcctcggaggaatactatttgctgtagggtctgcaggcaacagatggatgtttctcgcctgagagctgtgggtaggtttactttattcttcttcctttttatttttttttgagacggagctctcgctctgt

SEQ ID NO: 694007 - DNA, 1183 bp, Homo sapiens
  misc_feature (215)..(215): n is a, c, g, or t
ggagagaactagtctcgagtttaatagtgtatatttctctattttttaaaaaagggccaaaatggcttttttttattttaccaggggcccacccggggtcttaattacaaacgaccaaacaacaaacacaacaaatccccacagaggctcagagaataaagagacagctcctcatacgagaacaactccacacaagagagcgcacgagacacgcnatcactaggcgcgaacaaattacacacaccgcagcggcaccacagaggcacgcgcgcgtagggccacgccgaaggcgctccgagggagccactcacggggagcgtgaggtgacaacccgtgcgctgaaagagagcagagctgcagagaactgtctcatgctgagcgagagtgtccacctctgcctgataagcacagcaggagcgccgctgggggcgcggagtgttataatcaccccgagagagacgccgcggcgagacagaacgaagagtgagtgtgaatcaacagagggggcacaatatcaacaaaagagagtgaggagtctcccctcacaactagcaaagagagacaactcgagagaagaggagagacacagcgaacaaagagggggcccgagaacccacaatccaacacacgaggggggaaaaaaacaaacaccaatacatgaccctactcgaggagaggagcacccgcagcgcaaaaaagcagtgcacaccccccgcagggagagtcgacgcacgcagaaacagaagaggcgcagcacaaaacagcacccgggtagcacgatcagcagagagaaaacaaacacaaacagagagagggcgcccccccaatggagcaaacgcgaggggaataccaccacccagcgggcgaggcaaacaccccaccacaagccgcaaacactagaacctacatcgcgccaccaacaacagggggcgacatacactccacaccaactaatgaccgcgggtacacacccacagcccagacacgaccaacacacccccaccacagagcagagaagctgaagacaaacacagaacagcaacaaccccacctgattaaagacaaacgaggagcgtgaagagagccgatgaacacctccatccacaggaagaaaaaaggaggagcgcagcaaaacaccacagcacccaccacaaatgaacaccgcagcgcacaacccgaaaca

SEQ ID NO: 694008 - DNA, 402 bp, Homo sapiens
ttccccacaacccccaatttctttttttcagggaaaaccccaactttggggccccgtggccctttttttccccccctaaaaaaaaaaaggcccctttctaaatgtgggaaccacccccttttttatccccctgggatagtggcttctgagcaaaggccaaaaaatttttttccctgaaatttcccgggagaattaaaaccgcctgaatttcccatgaaaattttttttggggggggggttttaaatacccccccaaaggggccccacccctcttttaataagcattttgtaaagcttgggggtttttttttgggggtggccccaattttgcaagaattaaatggtttcataaagatggggggggcgggtttttttataaaataaaatttcttgaaagcttga

SEQ ID NO: 694009 - DNA, 599 bp, Homo sapiens
  misc_feature (506)..(506): n is a, c, g, or t
  misc_feature (509)..(509): n is a, c, g, or t
  misc_feature (525)..(525): n is a, c, g, or t
  misc_feature (588)..(588): n is a, c, g, or t
ggctggcctcgccgggaggcccgaggggcggcgccttctgcggcctccccggcggggggatgtgaggggcggcccgcggccatggagacgggcacggcgcccctggtggccccgccgcgccgtcatggctgcccccgcggccccctcgccgccgccccggggttcccgggccgggcccgtcgtggtggtggctccgggacctccagtgactacggccacttcggcccccgtcaccctggtggcccccggggaggcgcggcccgcctgggtcccggggtcggccgagacctctgctccggccccggccccagccccggccccagccccggctgtcacgggcagcacggtggtggtgctgaccctggaggcctcgcccgaagccccaaagccgcagctcccctccggcccggaatccccagagcccgcggcagtggctggagttgagacatcgagggctctggccgcaggggcagactcgccgaaaacagaagaggctcgaccctcanccnccccaagaccaggganccccaccgggacccctaccaggaccccttccaaaacggctcctgggtgccctgaccgccaaanccccggcttgc

SEQ ID NO: 694010 - DNA, 1085 bp, Homo sapiens
actgcagtggtttttttacatttgctgggtttgcctcaccaggtcagcattcagcattcaattcattcactcatgtcaattgccaagtcaccagattggagtggcacacagcttcagtgtcagcatcatcatttattattatgcacacacacgtgttgcgttgccctatttatatgcgcaatttcatcacatgcacacacaattgcactttgctaccagtctgttgcatcagcacaccagcagcttcttcacttcccatcattgcaggtcacaagcagtgcacagtgggcacttttaccacatatatccacaagtggggcacaccacagcccccattccacctccattcccacagacatcccagcatgccaattggacacagcggcatggtcacacaagcacacaccattctgcttccccacaccacaattgcaagcaaccacacaacatgagcagatgatatacaagtaggtaactactgcttctgtctctacacaatgacgccacctctcaaccagctctacaagtggtgtcgcctcaattgatgcccccagcagcacaccttcacataaccgaacaacaacagcagttacgatttgtttcacgaacaatgcaacacccagcgccccagcttgccattactatccgcacctgctggccaccacattattccccaggagttggcccctactttctcaccagttgtgttcgcgagcaacagtttctctcacaacaacgagacccccgtttcaactagtgggattgtatgacaactagtggacgccccacaattggcttcaggcgccacccattatgaaactagtgagcaaccacaaccacatttcaaacacattatatgccgttctactgccagtgatcacgctcgtccccctctctacgcgacaccacaccttcagcgtgtcggcatcaactcattggcttcgtgtcccaggccccacacacgtactcgttggtgctcgcgacacagttgggcgaagcgcactgggcaccccagcagcacaaccacccagatgtccccaattgtcctcacaattcccatcagatgcccaattgcacggatgtca

SEQ ID NO: 694011 - DNA, 602 bp, Homo sapiens
  misc_feature (509)..(509): n is a, c, g, or t
  misc_feature (512)..(512): n is a, c, g, or t
  misc_feature (528)..(528): n is a, c, g, or t
  misc_feature (591)..(591): n is a, c, g, or t
gcttagtgaatctgagggcccctcggcgtgtgtatgtccggggcaccgagggggacggtgggccggcccgctgtaccgatggaagactggggccagcgggcgcccctggtggccccgccgcgccgtcatggctgcccccgcggccccctcgccgccgccccggggttcccgggccgggcccgtcgtggtggtggctccgggacctccagtgactacggccacttcggcccccgtcaccctggtggcccccggggaggcgcggcccgcctgggtcccggggtcggccgagacctctgctccggccccggccccagccccggccccagccccggctgtcacgggcagcacggtggtggtgctgaccctggaggcctcgcccgaagccccaaagccgcagctcccctccggcccggaatccccagagcccgcggcagtggctggagttgagacatcgagggctctggccgcaggggcagactcgccgaaaacagaagaggctcgaccctcanccnccccaagaccaggganccccaccgggacccctaccaggaccccttccaaaacggctcctgggtgccctgaccgccaaanccccggcttgc

SEQ ID NO: 694012 - DNA, 168 bp, Homo sapiens
tgtaggtgttggcgtgcgtgcggcgagattgacactcccccgctctcggattcggagtcggaaatctttgaataccctgttacggacagagagttgcaggattcttttaacgagggctaatgagcaggccacaatgtcgtgctagagggcgaagaagcgtgaacgacg

SEQ ID NO: 694013 - DNA, 319 bp, Homo sapiens
ttatatactagttaacacagtgttcacaccaaggccatgaaccatccatcgtctatatactagttaacacagtgttcacaccgaggccatgaaccatccatcgtctatatactagttaacacagtgttcacaccaaggccatgaaccatccatcatctatatactagttaacacagtgttcacaccaaggctgtgaaccatccatcgtctatatactagttaacacagtgttcacaccaaggccatgaaccatccatcgtttatatactagttaacacagtgttcacaccaaggctgtgaaccatccatcggtagacgc

SEQ ID NO: 694014 - DNA, 262 bp, Homo sapiens
atgcaactgctactttcatgtcagagtagagtcctgctgtaatatccaacaagcattagacttgtcttgctagataagtgaactatactagtgtttcgtcaattgaccagacgtatatcgtgctcagggtatacgcctacgtagtgatggcaaccttctttatcttctatccggtccttggattcaaaagaagaggtagaataatctataaggggtgaaaatgaggctgaacctcacgaaatagttcttaatggacaccata

SEQ ID NO: 694015 - DNA, 452 bp, Homo sapiens
atgctggaccccatagaccctgtgtctcgtgactggaactgactcggcgtatagttgcgcttatcaggctaggggactagtcacagaccactgttggggaagagctttaacttacctgagaccagaccttggcatgagctaacagagcacaggagatatctatgacttggtactggacgacgacatctaatacgatgatgaacggagagcctaagagagactctggtctagtgcctagcagtgtcacgaaagagagatgatggactaggagaatggccgcagaccaatcgctctggcttgagatagggaactcaaatcctgaaattactgcctgcatttctgacctcacatactggttggatgacgcggattagtagcttagagtaatactatggagatattacccaccgttcagatttttcgcagatggcccctatacacagtggcgctcc

SEQ ID NO: 694016 - DNA, 318 bp, Homo sapiens
tttttttctgacacaaaatcttgctgtcacccaggctggagtgcaatggcgccatctctgctcactgcaacctccacctcccgggcccatgcaattctcatgcctcagcctctagagtagctgggattatgagtgcccaccatgatgcccggctaatttttatatttttagtagagatggggtttcaccatgttggccaggctggtcttgaactcctgacctcaagtgatccacctgcatctgcctcccaaagtgctggaattacaggcatatagcaccactccccgcctcttactgtcatttttaaaaaaacaggac

SEQ ID NO: 694017 - DNA, 285 bp, Homo sapiens
tcgcagcatttataactttcggctatcatctgataacagcctgattgagagtcatagagtggcaaagtgccgttattcttcaaggttgtgagtgtagtctcgcgggtgtgtgtaatcatcacagtctgttttgcaatattttgatacctcccaaaaaataatccatgccttttagcagtcactccttccccattttcccccagctctttcaccaccagccctcggcagcaattagtctactttctgtttctatagatttgccttatctggacattttgtataaat

SEQ ID NO: 694018 - DNA, 195 bp, Homo sapiens
  misc_feature (175)..(175): n is a, c, g, or t
catgccccctaatttggaagcccccccccctagcaatttcaaccattaacccttcccttacccctttttctttttcccaattttaatttcttactgactattcctaaaaatcgcgtgtcgcccttaatcccaaaggcctaaggttttcacccctttttaagtgaagccctcttancctggcgggacaaccccata

SEQ ID NO: 694019 - DNA, 114 bp, Homo sapiens
gctctagaggatctgcccctgttatacccacctacactgtaaatcaagatctaacggacgtgcgacatggaacccacaggaagtctccttaagccaagacttgcaacagaatgc

SEQ ID NO: 694020 - DNA, 226 bp, Homo sapiens
cgcgcccgatggtgagcccgtgacaggcgggattggtgcgattgaaccactcggtgcagcggaagaccgggctggggaagaccggcttgggccttccagcaccagccgcgcgcccctggcgcgaggcgcccggtgattccctgggcctcgcgagcccgcggcggaaaccctgtcgtcgtgcggccggccaggtcgcggtccttctcgaactggttggcgagccgtg

SEQ ID NO: 694021 - DNA, 440 bp, Homo sapiens
  misc_feature (9)..(9): n is a, c, g, or t
  misc_feature (26)..(26): n is a, c, g, or t
  misc_feature (42)..(42): n is a, c, g, or t
  misc_feature (48)..(48): n is a, c, g, or t
  misc_feature (67)..(67): n is a, c, g, or t
  misc_feature (149)..(149): n is a, c, g, or t
  misc_feature (170)..(170): n is a, c, g, or t
  misc_feature (212)..(212): n is a, c, g, or t
  misc_feature (231)..(231): n is a, c, g, or t
  misc_feature (236)..(236): n is a, c, g, or t
  misc_feature (290)..(290): n is a, c, g, or t
  misc_feature (390)..(390): n is a, c, g, or t
  misc_feature (433)..(433): n is a, c, g, or t
cccaacccnccccacttccgaagtcncccaaagccccagganatcacncctgtatgccctttgccanacacatagccttagccccccacttacaagtgagaacatacggtatttggttttctgttccctgagttactttgccttagaanaatggcctctggctccatcanagttgctgcaaaaagacattgtttctttttttatggctgaanagtattccgtggtgtgtanatatnccacactttctttgtccactcattggtcagtgggcacttaggttggttccatanctttgcagttatgaattgtgctgcaataaatatacacatgcagattttttttgatatattgacttcctttgggtagatacccagtagtaggattgctggntcaaattctatccagtagcatttgaaactgctttaaaaatatnaatgagg

SEQ ID NO: 694022 - DNA, 704 bp, Homo sapiens
  misc_feature (1)..(1): n is a, c, g, or t
  misc_feature (14)..(14): n is a, c, g, or t
  misc_feature (21)..(21): n is a, c, g, or t
  misc_feature (24)..(25): n is a, c, g, or t
  misc_feature (27)..(27): n is a, c, g, or t
  misc_feature (33)..(33): n is a, c, g, or t
  misc_feature (35)..(35): n is a, c, g, or t
  misc_feature (37)..(37): n is a, c, g, or t
  misc_feature (41)..(41): n is a, c, g, or t
  misc_feature (179)..(179): n is a, c, g, or t
  misc_feature (189)..(189): n is a, c, g, or t
  misc_feature (206)..(206): n is a, c, g, or t
  misc_feature (208)..(208): n is a, c, g, or t
  misc_feature (215)..(216): n is a, c, g, or t
  misc_feature (218)..(218): n is a, c, g, or t
  misc_feature (234)..(234): n is a, c, g, or t
  misc_feature (265)..(265): n is a, c, g, or t
  misc_feature (277)..(278): n is a, c, g, or t
  misc_feature (300)..(300): n is a, c, g, or t
  misc_feature (484)..(484): n is a, c, g, or t
ngctccccccgatncccaacnctnngngccttnancncctntatgtttgggtggcatgttcatgaaaaagccatacttctagcaaatcccccaatgaaccttttgtctgtgggaaaagcaggagacgcatcgatttccctgaacctgaccacaacaggacactagtcccccaaacctcngctcttcacngcaccagaacttcccancnaaatctnncncatgttactattcacnatatatagtatttcgtcactgaagactttantcagaaaagaannacctctttttaattggatgganactttctacctgcttggcctggggcctctggaagtctgctgtgaatttgtattccctttcacctcctggaaggtgaagtacccctgcatccctttgttactaacctcagtgtattgtgcagtaggcatcacatatgcttggttcaaactgtatgtttcagtattgattgactctgctattggcnagacgaagaaacaatgaataaaggaactgcttagataatgtgccaagcaattatttcatgggcaactttaccagaacttgaagaaagttgccagtggcatcagccaatttgtctcagtagaactgttcagagcaccattcttccacatattggtcttgcccagcctagcaaccggattgtcaccatggtgagaagccattaacctccagagcactgaaca

SEQ ID NO: 694023 - DNA, 122 bp, Homo sapiens
aatttaaaaaaaaaaaagggtttcctcccaggaacttttttttgggggggggcagatggggtgggctccaaaagcacagggtgggagggggccctttgacccagcattcccccccaacccta

SEQ ID NO: 694024 - DNA, 728 bp, Homo sapiens
tgctgggagctggaggcggaggagctggggaggtccgagcgatgtgaccaggcgccatcgctcgtccttcctctctcctgccgctcctgtctcgaaaataacttttttagtctaaagaaagaaagaaaagtagtcgtccgccctcacgccctctcttccttcagccttccgcccggtgaggaagcccggggtggctgctccgccgtcggggccgcgcgccgagccgggcgccgggccgtccccgcacgcgccccatgcatcccttctacacccgggccgcaccatgataggcgagatcgcctgcgccgctgtccttcatctccaagtttctccgcaccaaggggctcacgagcgagcgacagctgcagaccttcagccagagcctgcaggagcttgttggcagaacattataaacatcactgtgttcccagaaaagccatggcagggggatcgggtaccgggtgtattcgcatcaaccattaaaagtggatcctcgtgatgcggaccaggcagcaacaggaggatggggactgagccagtcaaggagcgtgtaccaggcttctcccaaggtgaactcaccactctgggtgggacccctatgaaggtgtcctaacagaatgtgagaggaatggctccatctaggggtgcggtatgaagcctcaccagcaggaggtagcatcaaaacagcaccaacgtgcaatgggtagacaggcgaatcaggtgtaagg

SEQ ID NO: 694025 - DNA, 864 bp, Homo sapiens
  misc_feature (181)..(181): n is a, c, g, or t
  misc_feature (668)..(668): n is a, c, g, or t
gaaaatcgaacaaatggaggagtttgcaccagaacagatgaaaagatatgatggagtatggtaactgaaattcctcaggaaatgcacctgaagtctgcaggtcttgtgggcaaccccgagcacacgtggttgtgacagtagtgcagttctagtacagcgaaatgttgggtatgcatctggngtgtgatgtgaagcccttcctggtctctggatctgatacaacggagtctatattatggtatgagtggctagactaagtcttggcaacctgccaagttgctagagaggctgatgcacctgatggaatacatggagaaactaagggagtgggcaggttcgtggttgtcattggaactttatgggaatgtgcccataggatacaccttgtacttacatgtaagaatgtagcctatgtcattccaaaggcctttaatattgtatacaaatgagagaagagctattaattgattggcgatcatatgcgcatagattactcgaattcgtatttcgcaacactttgtactctacaacaagaacttcaaggtgatatcttctctctctttttccctgtttgcaatgtgagaatgttgttaactgtagcatctgacttcgtatggttattttcatcgcactttagaagagatctcaatgtggcatatgggagaaanggcctgtggcttacgcttagataggaattatgagttgccttttgtattatgaatgacaagtaggatacttgggatttagaacgtagtcttatagatcgttatgaacgtggtgttccaatttcattcattaatttgatttggtggtaaaagctatggagaagtgggaatcttaaagagtctatgtagtgtgtaactc

SEQ ID NO: 694026 - DNA, 825 bp, Homo sapiens
agcgtatcacagggctgcggccgagaaagaagccttatagagctgctcaagctgcagccctcatctccgccggcgagtagggccaggtgtagggagctcccacgtggacaagatggtgtcttcggcgcagatgggcttcaagctgcaggctctcctggagcagctacagccaggatgagattgagcaagttcaagtatctgatcacgaaccttctccctggtcacatgagactccagaaagatccctgcacataggaggtagacaaggctgatgggaagcaaatggtagaagtcctcaacatccattgtgacggcctactgtggtggagatggagagccttcaaggtcttcgaaaagatgcaccgacatggatctgtctgagagagacaaaggatgaagtcagagacagcagcattagacaatcctttaggtcacacggaaacctctctcattaaggaataacacggtaatgaaacgagcacctcttagaacgatggacggcaaaatgccttggcagcggcttccatatgcactatcagcgcaacaacggcggtgagaagagaaaaacgaaaagggataatggacatcttgccttgggatacaggaaagttattcaaaaggaaagagtaggccaagaggcaaaagacccgaccaggacagcaagggcaatactaaccgacagcgacggacacgacacccgagcaaggataggagcaagaaacacgggacacgggcgaaacacgcgccaaagcaacgaaccaagataatggggcgagacaacgatacaaagaaaggcaagaaaacaccaacacaaagcacacaccg

SEQ ID NO: 694027 - DNA, 601 bp, Homo sapiens
gcatacgtacggtgcgcgagtcgttgtagataagcttatcattggtcagtagctgtgacctagtgagatctaggctcagtgcacgagcgccgtggattgccatcaattccatacaacgctccggcggcgacccggacgcgttctgaacggaaatccgagaatggattttcagagcgtcattacgtggactctatcgacactgcgtaggctccgaaggtccgaaacttcagattattcatcaattgtacgtccccctgtcccctgaccgcggggacctgaaggccaggacgcgcacatccgaatgccgcgaaagtgccacataggaacacatagttcaaacaaagtatcgccgacgacaggaacatccatacaatgatgaaaatccattgaaccatacacgagcagcaacaaggacagagataaaacaatacacacacatagacaggacgcaaaagagcagcatgacaacggaaaaatccacaagagagggaaaatcacgaaaatagacagaaaacacaagcgtgacctaaggaagcaagcaaaaaggaaacagaagaaacaaagatcaacgacaataacggacatgagcaccgaagacgaa

SEQ ID NO: 694028 - DNA, 357 bp, Homo sapiens
attgttataactgtgcaagaatacaaacttacagatataaggaaatacatctgaggatctactgtacatgcttggctgactgtattaaaaatgccaccatcatatactaagaagtgtgctaagcattggcatcaccaaagaaaaagaaaaaaatcgtatttatgtggagtgatggatgtgtcactcagcctgattgtgataatcatttcataatatatgcatacatcaaatcgttacattgtatactgtaaaaatatgcaattttgtcaattatgccttaataatgctgacaacaaaacacataaacaaaaaactttccctgctttaacgggtggctaagctagccctggtcacatt

SEQ ID NO: 694029 - DNA, 147 bp, Homo sapiens
agggagctcgcgcgcttccacccggtgtggcccatgtgaagccacgtccttcatcctcagggctgagcggccccaagccaggtactacgtccaagtggctgctcatgacctcacaaactacggtgaactgagggactgtagtctccc

SEQ ID NO: 694030 - DNA, 660 bp, Homo sapiens
ggctgcggtgccgcgggactgtgcagacgtgtgaaccgtgtgagaatccctaaggcggggaagcgcgatcgtcacgtgacagtgcgagaaccccggcgcggccttgtacctttgcattgcagactgtaattaaagaatgccatctcgtcatactgtcgctgaagagccaaaccttagatgcagaaacagatgtgttatgtgcagtcctttacagcaatcacaacagaatgggccgccacaaaccccatttggccctcatgacagggttgagcaagtgtttaaagcgttctgcaaaaataccatgaattctgcgagggctcaacttcaagacctgttacgaggtcgtcatatctgcccaactgaagaatcatgcgccttaaactaccaagagtcatgtgtatgtccccgagtcgagccaggtgggtgcgcagttgggtgtcgtagtgaagcgtttattgcgagacgcctgacaagttctgttgactccgccttgttgtgactgcttgctcgcaaaacctttatctatcttgacgtgtcgacaacatctagagtattgcaacgagttgcacttattttaaaccttgtgatggttgggctggtgagcaggttatgggttctctataaaggtgtcttaaaaaggttgattctgttatatgagcc

SEQ ID NO: 694031 - DNA, 170 bp, Homo sapiens
aagcgttggtccatccatccatattatgacagagctcgttgatctaggtattcctctactagtgctgcctacgtcttactttctcactgtgccctctttcgccatataccccccttaagtgtaggggtgccaaggtgtgctcaggcctctccttgaacaacactcatccc

SEQ ID NO: 694032 - DNA, 179 bp, Homo sapiens
tcctggggggatagagtctttctctggcacccagggcgggagtgcaggggggcgacctcagcttacgggcaacctctggctccgggggtccaggtgattctccgggctcagcctcccgagtagctgggattacagtcaggtgccaccaggcccagataattgcgggactctaagaagag

SEQ ID NO: 694033 - DNA, 1704 bp, Homo sapiens
gcttgtctttagtagtctctcttatctgcttgtttgttttgtgggtggtggttggtggatggtgttggttgtgtggtaggctctctggtagcggtctctcggctttgatctagctttgttgtgtttgtggttgtgtatgtgtgctgtcttgagttggctgtggtgtgtgtgtggttgttttttgcgggcgtactggtgcttgtgggttgttggttggtcgtaggcggtcgtcggtcgtgggtggtgcggttttgtttttagttgtttgtgttgtttgtgtgggtgttgggtttctgtaccttctgggttgtgtcgtagttgtttggtggtgtgtggtggggatggagggggttgttgtatgcgtcgtggggtctgttccggcgccgtccgtcggtcagcttgcttgatgcttgtccacggcgattggcgtgtgtggggaggatcttctcgatcagcgtccgacagtcgtctgtgttgttggtggtggtgggtggtgtggtgcgttcgacaactaccgacaacagctgcggcatcgtcgtcgaggatggagggcgacgagggaggacgagtggacagggagcgtgtgcatctgtgtctggctgcaacaccgacaccatcatccacatcctcatcatgagcaggtggggtggcgatcgtgatgatgttgaggttgaggagtggcacgagcatcaaccacatcgactaactactggtgtataggtctagtagtagataggtgttgtggtggttgttggtggtctcgtctgggtggtggaggaagaagcagcagcatcctcaatcatcaactccatcagcagcgtcgtcgcggtggtgttggtgggtgggcgcgcggtgtggggtgtccgtcatgtcgtgctgcgctctcgtcactctctgcgtggtgtgctctctgtctcgttgtcgtggtgtggggcacgcggctcgcgcggtgggcgtcttgttgcgtgtcgtgttgtttttgtcgtgtcgtccctgcaggggagagaggtgagtgtgttgtgagagagagataccatctcttgtttttttttctcgcgcgcgccacacacacacactatatatatagtgtacacacacacacacacacacatatatatatattgtgtgagagagagagagtattgtttgttgtatgtgtgttgttgtgtttgttgatatatgatagagagagagatgtgggatgagatatatatagagagatatgatatatatatattgttttgttcatcacacacactctatttctgtgtgttgtctccgaccgcgcgcgctctctgtgtttgtctcacacacccgcgcgttgtgtgtgtctctttgtcgcgtggctgtgggggtgcgccgccctcggcgggttgttgtgtgtgtgtgtgtgtgtgaggtggtgtgtgtgtgtgtttctctgtgtggtggttgctgtgttgtgtgtgtgtctctgtgtggtgcgcgcgggtatagtgtgtgtgtgttgtttcacctgctgttgtgttgtcgctcggtgtgcgagctcagtgtccaccgcccacacataatgtataatatagataatatatatataataagatatatatataatatatatatatatatatatatataaatacaagtaagtttagatgaaggggtataattaacgatcgaaggctagtgtaagctcgatggacggagttagagtattgtgtccta

SEQ ID NO: 694034 - DNA, 363 bp, Homo sapiens
ccatgttactagtatcttgtactgtaggcatttttaccatgtgtatggattatacttaccaaagaaaagaacaacataaatgaaaataactaaaagttggaggaagtaaacgacaatctaaacagcagacctcctcagcctactttctccccactggctaaattccacaacctcccagaacaacgccactgtcctgggggcaggtggatggtcacctccttcccttggatgcaggaagttgcccaaaacaggatgggcatgagcgggacacttacgggcctcggggcagcagcacttgtcttgggccgcagagggacctgaacgtaacaacagccagtgtgcggggcagcactggcaccagca

SEQ ID NO: 694035 - DNA, 563 bp, Homo sapiens
tggattcaaaaagggcctaacctttatggccaaccggctgccaacatttggccatacgttaaccctacctattaggcagatttccacttttaccattaaattcttccgagaaacaaatggggaggagcggtacaattccatttaggacttataatttatgtccaaggtggatttggataccccttttacacattcagcgtgcaggtgtccctttatatatcagtgctagttgtgtgagcacatatttgaactacctggggaccagttcgatatatggacacccgtcaatctataagaaaaatcaacagttttgggccccaggtccaaggtgaactttctcagggagttgcagaattcctcaaagtggccaaaattactgtggctctttttaaatatcctgaacattaacttatttagctacatattgccggacaacgattctctctgggcataacaatgcctctgcttcaaaccttcatttcaggaggcttccccttccccacccatcattaaccttctcaaaagctactccctccctctaagtatcttcacacagatattct

SEQ ID NO: 694036 - DNA, 714 bp, Homo sapiens
gaaagaatctactgttagaagaagatacagtgactttgaatgtctgctaagtgacattagaatagagagagctgggtcgtagttcccccgcatccctggtgaaacgcgttattgtgctgtcagcttccattttagacgtgagtatgatcgtgagatattgtgatgactacaattttagttgcacggaataaggaatataacaagggcttgtgcagacagattctaatataaccaatatgtgtcagcctgagtcaatctctctgggactaccaagaacgaaacctgttgtccattccatccattgtcttcctgtagccacagggaaaatgcacagcactacatctacgcactcaaacgacaatgcataggttactctttccgcgaatttccttaatacccaccatttttaacagggggaaaccattgggcccctgaacacatttttgcgcggcacacggaacaggcggggggcaatttacacagtgacccttattacatgcatttggataatggcaatccagttgatatgaaagtttctacatcttttatggcatgctgctacaggaatattgctataaagcatggcctttcagctatttctaatcactcatgatgctccaggttcgagtttgggttctgggccagttccgatcgaaaggaaaggctcttaaaattcttgggggctttttttaaaggctttaaaggggaaacttc

SEQ ID NO: 694037 - DNA, 424 bp, Homo sapiens
ttactctgtccatttatccacaggaaagtgttatttttcaaggaaggttcatgtagagaaaagcacacttgtaggataagtgaaatggatactacatctttaaacagtatttcattgcctgtgtatggaaaaaccatttgaagtgtacctgtgtacataagtctgtccatacactgaaaccttatctgaacttatttatgttaaaagattttttttaatctagacgatatacaagccaaagtggcatgttttgtgcatttgtacctgatgcgttgggtagaataggttttcccctcttttgttaccccctatggctatgcttccaaggttgcatactgagccaagtatttttttttgtgatgtgtaaaaaacatgcccattattgtcccacattaagtaatcaataaagaaaacttccatagat

SEQ ID NO: 694038 - DNA, 1135 bp, Homo sapiens
gagaacttgccggacatcgccgtcatggactatccgtgtgatggatgatgcagcaatagataatggtaagcgtctgcatgattcgtgtcgaagacgatgatgctgataacctccaggagtccctgtcggctagctagacgcagctagtcgagggggacctcgcacgagcttccgcagcagcttcaggaacatgcaacctcacacggaccacagcacacaccatacacacaacacacgctcacaaccaccatcagaccaacaccaacaaccacaggccacacagcaagagacaatacccagaaccccacgaacaacgaacaacacacacgcacagtaaccgacagggcaacacaagccacagtctcgacaccagtaacaagacacgacacagtcacccgcagcacgcaacccaccacgccgagccaccacggcaccacaccacacgcccaacgcggccccacaaacaacacaacgcccagcccacaagagcacagcaaggacccaaacatcacagaacaagcaggaacacaaaacacgacaaacgaagtccgacagcaacacaacaaatacaagcgacacacccagacgcccaacacacaccacgacgagccccacagcacagaccacacaaaggccaccaacaaaccaccagacacacgccacgccgcccgccccacccgcgcccgcaccagacaagacaagccacagcacacaggaaccacaaagcagagacacaacacaggcacaacgcacccacggagccacgcagccacaccaagcaacgatcaaagcagccaacccccgaaagacacagagccagcacagaccccgaacaccaccgacagcacagaacccccacacgccacacacccaacacgccacccaaaccacacacaccaacaccacgggaaaccgcccgaccgaccgaagcagagaacgagaccgacacaccacgccgcaaagagcgagcgaacaaacaaacgagaacgaggccagacgggaaagaaacacgaccagcccaagagacagacgcaagaggaagacccacaccgaacaagaacagggaggagcaagcaacgacaaccgaacgccaagagggcatcggaacaaagaaagaacacaaagaggagaaaaa

SEQ ID NO: 694039 - DNA, 105 bp, Homo sapiens
gtgaggtgcagccaacgatgcggatgtgctacacgtgctttctctcaagctcttgcgtaattgcgtccaggaccaccttatggtatacaaatactaaaaacttct

SEQ ID NO: 694040 - DNA, 427 bp, Homo sapiens
ctagaggatctccgcagaggcacaagggaggagaacaagatcagcaagcgggaattggaggtaggctatcgtgaatggaatccaaggaggagacgccaggcacagagtgggataaggtggcccagttgtgtgagttcagccccaagagcagaatgcagatgaaagatgtgtccggcttgggctcggtgtctcatgtccctgaagcagacgccactgtccctgtagttgcctgttaggtgcatggccacagagcatgggctggtcctgggcacaggaggagcagctgcttgggtcggggtggagactcgcgaggagctgctacccatagcctattccagtcgtccccatctccaggctgctgggaggtggtgcctcacccgatcaaggcctcgtttcccctcctggccctctggtccagcccctcacg

SEQ ID NO: 694041 - DNA, 207 bp, Homo sapiens
cactactacctgagagacatgctactcccgagccggagacggacccacgcgtgacccgggccacagtacttcatatcgagatgcgttatctgaggctcagcactgccagtggagatgggcgtcactactgctaccctcatttcacctgcgctgtggacactgagaacatccgccgtgtgttcaacgacctgccgtgacggtcattca

SEQ ID NO: 694042 - DNA, 419 bp, Homo sapiens
agtgagaaaaatgtttagctgtgaagaaaaatgcatgtcattaaaaaaagtttgataaatttaatcccattccaaaaaattatccccccttccctctggaaaaaaactataaagaaagtgggctgaggctgtgcaaggtggctcatgcctgtaatcccagccctttgtgaggatccgttgagcccagaaattggagaccttcctaggcgacaaaaagagaccccatctctcccaaaaaaaaaaaaaaaaaaaaagaaagaaaatgggctagagataaaaacagccaattcagagaacatataatgtaaaagtacccttacttaatctcttgttcccaaaaaaagaaatgtaattaaaactaccctgaggaattgttgctcccttatcagatgggaaaaaaataaagatgtttgccccca

SEQ ID NO: 694043 - DNA, 166 bp, Homo sapiens
tttggggcactaataaatgtccatgaaatcttcacttgagcctgggaggtggaggttgcagtgagccgagatcaagccactgcactccaacctgggtgacagagcaagacccttgctcaaaaaataacactaaaaagtctctctggtaataaaatttgtctggagt

SEQ ID NO: 694044 - DNA, 384 bp, Homo sapiens
ggggcccagggtcaaacagcggcagaggctcccgggcctgggagtgggtcctgcctggccccgtgaggctggggacggcacagtcagctgcctcggggacatggggcacaggggtcctctccgccgccactactggccctgcagctgctcccaccgccacggcccacgacctccttccgccacagccagcgtgatggcagcagctgctcccaccgccacggcccacgacctccttccgccacagccagcgtgatggcagcagctgctcccaccgccacggcccacgacctccttccgccacagccagcgtgatggcagcagctgctccgggctacaaagaggcgatgctgccagcattgtgacttttagaaagggaaaccaaaa

SEQ ID NO: 694045 - DNA, 497 bp, Homo sapiens
  misc_feature (7)..(7): n is a, c, g, or t
  misc_feature (9)..(9): n is a, c, g, or t
  misc_feature (25)..(25): n is a, c, g, or t
  misc_feature (31)..(31): n is a, c, g, or t
  misc_feature (53)..(53): n is a, c, g, or t
catggancnccccttggatagaacnccattngtatcggtcagcgcgccattgngttgataccccggaattcggccattatggccggggattcctgttgctgacagcttttcggccgagatgtctcgctccggggccttagctgggctcgcgctactctctctttctggcctggaggctatccagcgtacctccaaagattcaggttaactaacgtaatccaccaaaaatgggaaggcaaaattcccggaatggtatggggctgaagttcattcattccacattgaagttgacttactggagaatggagagagaattgaagtggagcattcagacttgtctttcagcaaggactgtgctttctatctcttgtactacactgaattcacccccactgagatgagtatgcctgccgtgtgaaccatgtgactttgtcacagcccacgatagttaagtgggatcgagacatgtaagcagcatcatggagggttggtgccct

SEQ ID NO: 694046 - DNA, 141 bp, Homo sapiens
tggtttgtttttttaggggcccccccccccctttcccctaccctaagcccccctaaggccttttcccaacgggagggggttaaaaccaggcctggtttttttaaaatttcttttgtaaaaaaaaccctttttagtggggga

SEQ ID NO: 694047 - DNA, 143 bp, Homo sapiens
  misc_feature (1)..(1): n is a, c, g, or t
ntcgagctcggtaccagcaggggtggcgtggtgtgttgtggggtggacagattccagcatcacccccaactggagatgtacaggatctcagacatatttccatgggctataaaatgaagctgtacttctcagtactaacccct

SEQ ID NO: 694048 - DNA, 361 bp, Homo sapiens
  misc_feature (260)..(260): n is a, c, g, or t
  misc_feature (340)..(340): n is a, c, g, or t
  misc_feature (347)..(347): n is a, c, g, or t
ggggaacggaagtgtcccctccttgttgcccccaggctggagtgcaaatggcgtgatcctgggctcactgcaagccttcgcctcccgggttcaagtgattctcctgcctcagcctcccgagtagctgggattacaggcatgctcccacccatgcccagcctaattttgtatttttagtagaaacggggtttcaccatattggtcaggctggtctcgaactccagacctcaggtgatccgcccacctcggcctcccaaacngctgggattacaggcgtgagccaccgcgcctggccagggactatactctttttaaaatagacatttgtggggctcacacnatatatnttatagtaccctct

SEQ ID NO: 694049 - DNA, 860 bp, Homo sapiens
  misc_feature (46)..(46): n is a, c, g, or t
  misc_feature (259)..(259): n is a, c, g, or t
  misc_feature (266)..(267): n is a, c, g, or t
  misc_feature (564)..(564): n is a, c, g, or t
  misc_feature (765)..(765): n is a, c, g, or t
  misc_feature (786)..(786): n is a, c, g, or t
  misc_feature (788)..(788): n is a, c, g, or t
  misc_feature (792)..(792): n is a, c, g, or t
  misc_feature (848)..(848): n is a, c, g, or t
catttttagcctattatccttacttatgcgttaggctgctacattnttgtgtgcgacaatttaacttactacacacacctggtgcgagatcacaaaccttctgatacatttatgagctttagaatgtaactgggaagtgtagcacagccctttgtccctctgctttgcatggtgagagacggctaaagcaaccatcgccgcattctgttttatgagcgcaaaggaacacctattcttatctgggccacgcgcccgggtncttaggnngatgccagacccccctgggatggcaatggcagaggctgcgcagcttcctgaagatgtggtccacagcaccagccccgggcagggagcgagggcaagggcgaacgacagattcttccggagacagcgcagcaacccactgatttgtgtgctcccgcacccacaaccgtgttgcactgggtgcatgtgacgcccagggtgagggaagtggaggcctggtctcacagtgtggaccggctgcgggacaagaacacagttaactttggctttgcttgggaagctgcttcagaaacataactnccggcccctcctgaaaatgatcgttttcttagccggggccctgttctttaggagaggtttactgttagagcttgctgttcttttgaaactgggccacttggctgaggacctgctcagaggctttgatgatcttggagccgaggtaggaggtgctgttggggcccgttttctccagggagttgcggtagttggccatcaggncgcagaggcgggtgatgcttntnaggntcacatccgccatccagttgaagcgccacaacaccgccccgttctgcaggtggganttgggcacgggg

SEQ ID NO: 694050 - DNA, 217 bp, Homo sapiens
agaggaccccagtgtgctgggggctagaagattggagaagaaatactccggtatggagtggtatcggggggggtattttttaaaaaatttaatttagcattcatattttccatcttatccccaattaaaagtatgcagattaatttggcccacaggtggtccttcttcttcagtattcagacatttggttcttgtgccaatccaacggggtaccgga

SEQ ID NO: 694051 - DNA, 860 bp, Homo sapiens
ggtgttaccggcctcaaaagtgacagtaactgtgcccgagcatatgcacagggtatgaggccgaagcaagtactgggagttgatttatgaagactctatggatctagatcgccaaagctagccttgctgttgcacgctagaagatctaccgcaaatctctacagagaaggcatgcggtacttggggccatagactctaacctggactggtctcacaatttcaccaacatgttaggctatacgtgatcatcagttcagctgagctcacggcgcctgtacctcatccagtccacacgatgaccattgagggtgcgcaatgataagtgcccagtaccagctcgatttggatgggcagtgcctctttccgacctctttaccctgtcctttgcaaggctagccagtgaacgtgtgctgtgcagggccatcgtccatcggactggcaaactcgaggagagctgcgttgtcatggcctaacacagacgtgcagacacggaagtgggccacaacgatgtgctcagactgagaacgtcagcgagcatgtatcactcgtgggacacgacacgtcaagctcccggtacggcgcttagtcccagggctatggccattgcacgtactacacggaatgacgtgaatcctgcgataataccttgcacatgctgatgacgtttagctcctgaaaacaccgtgacctgagattgaagcgccaatgtctcaaaggttcgggtgagcatcaggcctgtaacaaagaattgggtgtccacaagaggttccgtctcaagaagcaagggggataccaagccaatgcaatccgttggacccaatctggtaggaatggctcacagtagggggttggctggtctc

SEQ ID NO: 694052 - DNA, 1128 bp, Homo sapiens
gggaggctgaggcaagagaattgcttgaacccagggaggcggaggttgcagtgagccgagatcacgccatgcactccacctgggcaacaaaagcaagaactctgtctcaaaagaaaaaaaaaaaaaaggtgtgccagggttttgaggttaatttagattgggttctcttctccagaaggttaaccttgccaagaaagagaagtgctattagcattgtttacctccttattacgtggtaaaaccattgtggtgaacactcagatttacgtttaaactgtgattgtttttcccaaagtttattgccaaaaaagcaggtgtggtgacttattggaagccccaggggctttattattccccaaagcctctgtgttcttataccctataaatatatgtgggttcacatgtgtgtttctcccactctctgtggtccatataaaatgtgggagaggcataatatatttctctccaagaccctgtgtgtggtgccctgtgaacaatgttgcagtgcggtctagtacgggggatttaaagacgcagaaaaacaatctgagtttgtggtaaacgttatattgtccgtgttacagaaagcacaaaacgcgtggcgtgggtataaaattagaagggggggacctaaagttgtgagcagaaaaaattagaattttgttgtaaaaagaaacccataaattacagaaacgaacacgttcttgggtacactcttacataaacgttcgggtactttcccaaggattacaaaagggatttgtttccaaagaaagaaagacaaagaagaaaaagcggggagggtggcgaccgcattacatgaaaaagattaatctcacccacagtaagaggggggcgcccccagacggacatactcgccggcggttaccccccagaggtattatagtctgtggtctcacccaaagagggtgggtccccccccttatattatagagggaacaacgaacgtatacaataagacggcagaggagcgcgacagaggagcaagcacggctattttacaaccaacggtgcggtgaccggtgggacgaaaacgccaggcaaagcacagtgggggaaccacgatgagggagaagagaaaaacaatttacaatagtaggcggacgt

SEQ ID NO: 694053 - DNA, 216 bp, Homo sapiens
cacgaggattcgggccggtcagggaaacaagcaggtgggaaaggcgggccaggaacaggttgaacagtctaccctcccttagcaggaactactcccaccctggagcctccgatagacctcaccatcttctccttacacctagacaggtgacatcctctatcttaaggggccatcaatttcatcacaacaattatcaatatgaaacccccagaccta

SEQ ID NO: 694054 - DNA, 546 bp, Homo sapiens
  misc_feature (6)..(6): n is a, c, g, or t
  misc_feature (112)..(112): n is a, c, g, or t
  misc_feature (125)..(125): n is a, c, g, or t
  misc_feature (135)..(135): n is a, c, g, or t
  misc_feature (153)..(153): n is a, c, g, or t
  misc_feature (253)..(253): n is a, c, g, or t
  misc_feature (304)..(304): n is a, c, g, or t
  misc_feature (412)..(412): n is a, c, g, or t
  misc_feature (496)..(496): n is a, c, g, or t
  misc_feature (503)..(503): n is a, c, g, or t
  misc_feature (506)..(506): n is a, c, g, or t
  misc_feature (539)..(539): n is a, c, g, or t
gtctangggagaccctgggcccagtctgggaggtacagggctctgggaagggggcagtcctggcggcagaacccggcctgcaggggcactgggcttagaagaggactctccnagcgggagaggcngggaggggcngcatcaggccgtggagcnggttgcggtggtcatcagtatggctgcctgtccaggaagcgggaaaacatggggaaggcagccaggggcttgtcggtgggaaccatgtggccggcgcccntaaacgtgagaaaggcgaggggggagaactcctccacgaagccggcaatcngccccccgccgtccccgtatttcactaaccagggccggcgccgcacccccatctcctggttgagggaatccacaaaccactaaacccccaagaaattgcaggccaagnctacatctccattatataataggatccggtatttctgtaaacaaagcagcatcagaaaccgggagttcatgctttggtagaaanggcggtnctnttagtttaccagaaagttgcacatgttccattnttgcagc

SEQ ID NO: 694055 - DNA, 930 bp, Homo sapiens
  misc_feature (87)..(87): n is a, c, g, or t
gattctatggctagtatttggcacagtcgggagcggtttctggtggagccccaggaagacactcggcttgggccaagaactcagaanggtcttggataggttctatgacacacacatcaggttctcgatgcggcctgagactgggcagttgatcatcatggagacccgcaagaaagatggcacttggcccaggcacagctgcatgtcatgaacaacaacatgtcggaagaggatgaggacttcaagggtcagccaggcatctgtggcctcaccaatctgggcaacacgtgcttcatgaactcggcctgcagtgcctcagcaatgtgccacaggctcaaccgagtacttcctcaagaatgtacctggaggagctcaattccggaaaccactgggcatgaaggggtgacgatcgcagagggcctatgcaagacctggtgaaagcaggcgtggtctggacaccacgttcccattgtggccacaatgtgttcaagaaaccaaggtgggccattttgatcccaaatttctgggtaaccaacaagcatgatactcaaggagctggctgtcatttcctccctggacgggttggattgaggaccttatccgggttgaaggaaagaaaggaggtatgtggcacgctagtagcggacgcaagatgcgcgaaccggaactccagaacggttggaccaacggacggacggtgacacaacaccacagaaccggcggcagcaacatctgcgaatcgtgcccccattcacaggacattactacaaatcacaaacgagtatggccccacatgggcgcaaaggcccacggagaacagcacacagtgggataaccacaagacaaggcaatcacacacaaaggcagcgacagccacaacaccccagaccgcgcaacacaacaacggcgcggccccaaaggcaacacgaa

SEQ ID NO: 694056 - DNA, 426 bp, Homo sapiens
tgtctagagttcccaagcttacgaggacataaaaagttactcacagaagtatttattactatatggggtgggaatcaccaacttttgtgcaaacaatgctagccttcttttaagcattaagagcataactgcttaagaaatgacataagcaataattctacacctacatctcccctaaaataatctttttttttttttttacttttgtgcccggttttagaaatttaaagcccgagataaaggctcgagatctattatccaggggcaaaattcagagtttactagcacctcatcatggggagagcttaccattcagggcatctgtaatgaagcgcggcagttcccctctttcctatttttttaaaccacaaaattcaagtgactaagactttaataggggagtgacaattcacattcaacacaatc

SEQ ID NO: 694057 - DNA, 220 bp, Homo sapiens
taaccttgtctctgtcttctctcatgcttctgcgctctacttcgtttcctctctttcttcctttttcttctttccttttgtttctctcctttctttcttttctttcttctctctcttctttcattctctcttctttcattctctcttctttctctttctttctctgacttctttctttttctttctttcttttccttcctggtaggtatgatgaaggacg

SEQ ID NO: 694058 - DNA, 326 bp, Homo sapiens
aaaatccatctggaatcagaaaacggtggattttggcaaaagggccctgtgccctccccactcatccctggtttggtcccctgttggccctagccctttaccctaagcaccacccccacagactggggaccagcccccttgcctgcctgtgtttctcccccaacccccttaaatggggaaggaaaaggaggaaaagggagggggcctgcccccccctcaggcatttgggagggccccgcccccaagggctttacccttccctgcggggtctttccccgacacatttgttaaaatccaacctgaattaaactacaagtttcaaatta

SEQ ID NO: 694059 - DNA, 327 bp, Homo sapiens
gggggaggggggggggggaatttttttggggaaacggggccccttttcccccccccccccttttttcttttttccaaaattttaaaaccagggggggggggtttccccgtggccccttttcattttttaagggccccccccaaatttatttttttttttttcccccccttccccgggtttttggggggggggaccccccgccccccggggaaaagggggggggttttctttttttttggttggcccccccccccccccccttggttttgccccccccggggggggtttgttttcccccccctttttagggggttttttgggggggta

SEQ ID NO: 694060 - DNA, 109 bp, Homo sapiens
aggaaagatgggaaggggagagtgggcggaaagaggagagtggggttacgtgccctagcttcagatcagccgaagatggtacatgccattctactgtctctaggtcaag

SEQ ID NO: 694061 - DNA, 647 bp, Homo sapiens
atgagaattcagagacgtttgaaggctgctgtgtgcatgttggggggtctgaaaagacagttgtgtgcagtggatgtgtgcgtggaggagaaagaacgtgggtaagatgtcccttcccagtccctgatagcactggtcacagttggccacctccaagcgggagaccttgtccttgtggctagagtcctcccacccttggggggctcctgcctgaggtcctcagaatcccactgcaatggagcccaggcagcgccggcaggaagccatgctgggtccccggcagggactatcccataagcagtggggcacgaagggggcgacttgcctgcccctgtaacccttgttccgcattgtgcccagtttgcattctgcaggttttctcatttaagtgggttctgctttctatatttgcagagacagagcatgtgtcttctctgatccgtttgccaataggtaaagccagtatcagttagactgcaatactttaaaacacgaagacaaaacaatccatatgtgagggaaccaggaaaagtcccgctggttcgtgtccctttcttggggggaatgcagggcctccgaacagtgtccagttcccttgaacgtacttttcctccccgagaaaaagacaataggaacagggatcaaca

SEQ ID NO: 694062 - DNA, 363 bp, Homo sapiens
agctatagagggtggcatcgcatcatggaaattttatcaactgaaatacaaatgtggaagtcaagtggaagagatcagtggtgtggctgtttatattcaaccaaaaattgttcgcaggaactgagaggaaggcacaggattggtgtaagatgtatcgtggagccctatggctagaaacttaaatagtccctggtggctaatgcttgggggattggtggggtgagtggccgtcggtgtccctcctgcactgtcttgccctcctgctctatacactcctgttccttattcctagcgcattgcttcctgcagaatttgtctcctcctcttgtattcttaacctcctcacagtgactggggggatct

SEQ ID NO: 694063 - DNA, 1530 bp, Homo sapiens
  misc_feature (1530)..(1530): n is a, c, g, or t
agcgtgtggggtttgatgccgagccgggcgccgtgagcgttggaggcggcgtataagccgactcctggtgctctaggatgagctcgtggccaggcatgccagggactcgcgggggcgtaacgaggtgcctacatctcatcgacgaagtgcatcggggaagtacgacggatcgagctggtgatccttgcgttgttccctgcgttggtctggtgatacgagggacgccttcagaacaagaacgccggcattccgaattctctcctggtgcgtggaagaacgcgataccatagctactcgaaacttgcaggatctgtatagacgcattgtgtacgcgcggtcaatcttgctttaaacacacgagcgattagacgcatttgtgcttattcgatcccatgcagatttgtaaccgaacgtaaacgatctcgccgaagccatgaattagcgtggcttgggatatagccccattgagaaatgcccctacccaataggtagattcccgattccccgcggttttgcttctcatagagaagcagttcccccaatccaagaggtatgtcacccacggatagtttgatcggcacgggtcgacaatggaaagcatctcgtattgcgcttgacgtgcatcgagcgcactgggggggcgacttgggttctacgttgggtctgtaacgtacccgtagcggctaagaggggagcgtcggtttcatgattgcaccatcggaaaagggcacttccgccgtccagattgggtcccaagggcaaacttcgttcgtgcccaaagggccactttaggccccatttcgaaaggagccggtggtcgattttgtatcgttctttggggaagccccagtttccttggaagttttggtaccccagcacctctttcccacgttggccgtacataattttcggcgaaacgattcctccattctaaaagagtggaatcgggtcattaaggagggtagaaggggggcagggccggtttttcataaaggggattaggccatgggggagtagcgttcatttggaaagagagggtgttgaaagggtgaattatagactgggggaaaggtgctcatttcgaaacacgaagttctttgcgcgacacgtttcgcaaacgttagggcgttgcatgtatatcacctttgggtggctttggtattaggaaaaggagggtatggtacgattatttggctagtgagtgggttttcacaaaagttataaaagagaggtttcacgttaagtttccgttaaggggcagtattcattcttggatcgaataagagcttatggcaggaatttaaacacaagtaggcttgtttgacaaggccgaagcctagagggatcccaggggggtaatacagaggtggggagacgaatagatttgtctgtaatcgagaagataagagagttggcggagcggatatgatgataagccacacatggagatatgtgggtgatgagagcaggcatgtagtagctttcaggagagaggatccaaactgaatcgcatatagattgggtggaatn

SEQ ID NO: 694064 - DNA, 269 bp, Homo sapiens
tgactacaaaatgcgtctggctgcatacgtgagaacctgcatgtaccggggggggggccagcggaccatccagctgtgtttccagagcagtgagctggtgagctgggcagactggggcccagcgacagcagcatccacccgagcctgaggctacaagctgccctataccaccccaatcccccaggcaggaccaaaatacctccgtcgagcaagaacccaagcccacttccaaacctgcctgtcccaaaccatttactccccggtacatg

SEQ ID NO: 694065 - DNA, 606 bp, Homo sapiens
  misc_feature (568)..(568): n is a, c, g, or t
  misc_feature (582)..(582): n is a, c, g, or t
  misc_feature (597)..(597): n is a, c, g, or t
cacactgagctgcaggagagctcatcttaaaatcaaaaaggtttgagcaaaggatgaacacaatctacagtcagattatgtcactcctttgcccagaccttcttgattgcttctaattgcacatagaatgcatcatccttcatatggtttgtaaaaaccttaaatggtatctggcttcatacttattctagtaccagtacatttctgtttcctttttaccacaggaagtcctttctttccttggacatgttacatttctttctttctgcagtgtcctttgcctggaattcttttcttccagcctttagctgattaactgacgatcgttcttcagatcttgatttaaatgtaactttctcaaagaggctttcccagaccttccccagtttcagttgttttatgttatactttctccctgtaattttttttttcaaattattggatcacattttaagattgcatttattgaataaatgaaagaaacttggaagaattttagaactgaactgaaattagacaggctagcatttggacatgactcctaagaatgaagttgtggattttaganctttggtggcttgnttgaagaatacaccncttgtaaat

SEQ ID NO: 694066 - DNA, 371 bp, Homo sapiens
  misc_feature (46)..(46): n is a, c, g, or t
  misc_feature (60)..(61): n is a, c, g, or t
  misc_feature (72)..(72): n is a, c, g, or t
  misc_feature (74)..(74): n is a, c, g, or t
  misc_feature (76)..(76): n is a, c, g, or t
  misc_feature (233)..(233): n is a, c, g, or t
  misc_feature (254)..(255): n is a, c, g, or t
  misc_feature (259)..(259): n is a, c, g, or t
  misc_feature (263)..(263): n is a, c, g, or t
  misc_feature (307)..(307): n is a, c, g, or t
actacatacttccgactacatactccggactacatactttcgagtnctaagggaccatanngagtattcctngntncacaccaggaccagccactgttgcagcatgagttcccagcagcggaagcagcctgcatcccaccccttaagtttaagcagcggcaggtgaaacagccttgccagcctccacctaaggaaccatgcatccccaaaaccaaggagccctgccacccaangtgcctgagccctgccacccnnaagngccngagccctgccagcccaaggttccagagccatgccaccccaaggngcctgagccctgcccttcaatagtcactccagcaccagccgagcagtagcccaaacaatctcat

SEQ ID NO: 694067 - DNA, 953 bp, Homo sapiens
tgaatcttttactgtatacttgcagatcagatgtggaagcaaaatcttgggaagtttggggaagccctgaggcccttgccagaggagagaaaaattgcgtaaggaagcagaaatagaatacagagacaggctatggtagaaaccaagacaaatataaagagaatacagaagattgcttgggaaactaccaagccacgctccagaaagagcatcagtgttttttaagggaccaggaaaagtggtgatggttgcaatttgcgtcaatggattaaactgcttctttaaattgcttgcctggatatataccggtatcagcaagtatgtctcagaagctatacactcattatctgatacttgtaatcagggtttactagcatggggcatcagctaagtctgtgcaaacaccagatccgttctcatccgtcacggattttgcaaatatgcgctatatttcttcgactaatgagtggtgtggaattcccatgatgggtgcaggactatcttggtaccatggagtcagtgcgattgcttcgatcctcaaccaatagaatcccttctatgggcatatcgtatacttagcaggatcatcagtatctgaaggaagcaacacttcttgttgctgtaaatgaacttcgtaggaatgctcggctacaggactgtcactttacccccggtctgtaattggaaaggcgggaatcctcgaccaaatgtgatattaatggaggagtcaggctgaccttagaagtattaacgccggccctggaagggctcaaattataagggacccaggtttgaaaccagacttggggtgggccaaaaagagtgcgcgccccatacatgcaagggcggggggacaccagacagacgacccctgagacccagagacagtatgacatgcagaaagtacaacaaggatatacaagagaggaccagaaagacagaatcaccaagaa

SEQ ID NO: 694068 - DNA, 203 bp, Homo sapiens
gagaagaatccaactattggaaatttccctattacaaatgtggagctgagaggatacttgtctgacgaagtacaagcagtacacaagaataccacctatgacctcattaccaacatcgtgcatgacggcatgccctccgaggttcgctaccggtatccacgttgcttcatcatggttacaggcaaatggttatgaattacaag

SEQ ID NO: 694069 - DNA, 123 bp, Homo sapiens
atatagctggctccatgtatgaaaaagaaacggtcgcgatcttctaaaaaaagaaccgaaaacggagtgggagtggcaacttcccaatatgagtagactgtgccggcaaagaggaaagagaga

SEQ ID NO: 694070 - DNA, 397 bp, Homo sapiens
tggcccgaggaaatgccagcgtcctagcaattcccttggttttgggtcagatgaaaaagcttggtttttttttaggaactttggtgcctgaacattataagtagatcactgctttatttttgagctgttccccctccatgaagctttcaaatcctgcatcctgaggatccagatggatgacaaggacacagggctgccattgagaaatgaaaatgaactgtgtcacaaatgcagtggattaatgactgcccttgtaatagtccattttgtatttgttggtaattcattgaggcatttttggttttttaagagtttggattttttgaattcaagaattgtaacatcactgttagatccctccttatttaatgagagaaataaaatatttggcccggga

SEQ ID NO: 694071 - DNA, 287 bp, Homo sapiens
gcgtcgaccattgattgtgtcccaatagatttcatagaggagcagccagctgagtaggcatcctttatggctgtggcctctgccgctgccaatgaatacctcccctaccacggtcctggcagactctgtcctcccatttgggcctccctggaaggccacgccccttgaataacaagccacgcctcccccattgccagtccttgcccatcctcaggccgagcccctcatttgcccattctctcagtcagaagcttctccattaattcactttagcaggccgtcgacgc

SEQ ID NO: 694072 - DNA, 267 bp, Homo sapiens
ccccccttttttttggggcccgggggcaccggggggggtttttttttgggaaaaccgccaattttggggggttttggggcgaatttttttctccccccccccttccccccccccccctttgggggttggccccttttttcccggggggccccccccttttggggggccccgggtttttttttccccccccccccccccccccttgggttttttttttttttttttggggggggggggattaaaaaaagggtttttttgcccggggta

SEQ ID NO: 694073 - DNA, 151 bp, Homo sapiens
agagatctgtaaaatgtgatttattacttccactatataatacttgtgacttggggaggattgtgcgcaattcaattatgatgaaaaacctatctattatgtaatgttggcatacttgagggaattatagtggcaaatacattccccagac

SEQ ID NO: 694074 - DNA, 114 bp, Homo sapiens
acccttgcccaccgagagcgtcgcccgccgaacaacgtcgcatcgccgccatcctgcgccgtcgcgaccgcggaaatcaccgtccacagctgtgactgattccgcctattccgt

SEQ ID NO: 694075 - DNA, 148 bp, Homo sapiens
ataaagggcactccatagcagagacagactcctgtatttttattccagatgcattgtcttggtgattattaaattataggaaattgagtacaatagatcacggaaaaggcaatagacagggtaagccattctagattgttagacgtac

SEQ ID NO: 694076 - DNA, 479 bp, Homo sapiens
  misc_feature (224)..(226): n is a, c, g, or t
ggccttcagtatcgcggacggaagatggcgtccgccacccgttctcgatccagcgtgcatgcgagtaactggcgcgtccgggtgcatagaccgtgctaggggcaagcttgcagcttacgtctacccaggatgatctcgcaagcgaacttcagccttccttcccaaaggctccctgtgttgaggtccctagccaacaaagcttcttccaacaaatttaactatgnnngcactcgcgattggccggccggcggacatctggtggcccccttttccattcattcaatgtcggtcggcaagaaggggcgctggttgtcaggggcaaggcacagcaagaagacgctcgtgctggatagctggccactggacgaagacaggcgggtgaactccaggttccttcccattaaagcaggtggggagcctgtcctcgggaccaagccttacctggtgaccactggcacctctcacggccacccgactta

SEQ ID NO: 694077 - DNA, 348 bp, Homo sapiens
  misc_feature (160)..(160): n is a, c, g, or t
  misc_feature (246)..(246): n is a, c, g, or t
  misc_feature (304)..(304): n is a, c, g, or t
ccaactgatcacaccttggtacaagaagcgtatattagagcgacgtgtagtctaactgaaacaggctttacagagcaaataggggacgccaaaccaggcagtgtacaccacacccatgctgcctacagagaaagttaaacaccaccaaaccggggtagcngtatttaaacaaacatagaggtatggtaagccatggtatgggttaccggcctatgagcactgcctatatacaacatccatttaaanagctgaactaaaaaaaccatgatggtgcttaagcctaccgtgttgttgcggccgtctntagtggccatccagagccaaacttggccttataataccgatgat

SEQ ID NO: 694078 - DNA, 297 bp, Homo sapiens
gtcgacgcgtgactaatccatcagaagtatactctaggggtcaggcgtggtggcttacgcctgtaatcccagcactttgggaggccgaggtggatggatcacctgaggtcaggagtttgagaccagcctggccaacatggtgaaacccgtctctactaaaaatacaagaattggctgggcgtggtggcgggcgcctgtagtcccagctactggggaggctgaggtggagggatcgcttgaaccaggaaggcggtggttgcagtgagctgagattgtgccagtgcattccagccctgg

SEQ ID NO: 694079 - DNA, 995 bp, Homo sapiens
ggtgccggagctgctgctgctgcggcgcggatcggaggcgcacctggtgaggtgtccctgaggagagggaggtgggtgcgcggtgccctgcggaccatggggcgctgacatcccctcacttggaggcgccctgcgtccggcagaggaggcgagcataccgctcagtgtgatgaggaaccccatcgctgcacccagcgcagaagtgctgctgcctggccggacgcctccattgttatgagccagaacaatgggccgggtattctcacccagcaggatcctaaggccatttgtagtccttcagccactgtgggccctgcctctgcctgtacttcatggaatagtcgttgggggtataggatcctgtcactagtggacgcaccttggcgtgcgaagtcctaacaggggaccaccagtgtttgcacagaggatgagattggtgtaatggcaggaggatttcggatggtgctttgaaggaaggcacgtatagtggctggagcaggcagagaacaccattgctctgaacggagcgagaaggagttgagcaggctatgcgtgccatgtggggaaagtcctttgggacggagttgtcgtgagttggggaacaaagggtggttcttagctgtgcctcaaggtgatcacaccggggggactggcgcaaggggtaccttcggagcagccggcgctgagcgagatatggcaccccagggtagacccccagggaaagccggacgggatggggaacgaaaaggcccgccgcggggaaagggaacgacgcggagggtggcgcccaacggaggacccccccgatagtagcgcacctcaagaaaacaattggggtaggggggaccaaccgttggcgacttaagtagggaagggggcagaacattgggcaagtgtaaacgaggcagctttgacatgcacggatcgacagatcggacctgagagcaacgggcgtcaccttgcgaagggagcaacacagggaccagccgaacgat

SEQ ID NO: 694080 - DNA, 1035 bp, Homo sapiens
  misc_feature (640)..(640): n is a, c, g, or t
caagaatcacatacatttactttaaatatagttgcctttttgggtcaaaaaaaaaaaaaaaaaaaaaaaaaaaaaaaaaaaaaaaaaaaaaaaaaaaaaaaaaaaaaaaaaaaaaaaaaaaaaaaaaaaaaaaaaaaaaaaaaaaaaaaaaaaaaaaaaaaaaaaaaaaggggggggggggggggttttggggggagacaagaacaaagaaaacgaccacccagcggatagtagagaaggagggggagcgccccagacattagggagttgatatataaaaataaatacaagagagccgccgaggcgagcgttaaaaaacaaacaaccgaatgggacgagagaacaaaaacactgatccggtggtaatcttggatggcaagacacacacacacacctcggggggggggcgcgcgcgaagcaaagagcgaggaccaccactaactcacaagaaagtaggtaaaaccgcgccgcgagggagacaatacaacaacagcaggaagaaaggaagtgggggaaacaccacccgcgatgctaagttgtggcgcggggcaagcgacgaaacaaagggctcgacgcagaggcaggtaatcatgcaataacaaacttttctgccccgcggcggcgtttgtaatactatcanaacgggacgaaagagcaagacaagcaaacagcaggaagcatgacaagcacgatagataagacaacaaagacgagctggaaaaagcacaagaagagacgtcagagaagaaaaaaagcaaaagcagagagaggagaagagaccaccaaagagggcggccgggacggctgccgaacgcgcgcggggagggagacgaagcggcagagatagcaaaggactacgagagagagaaggaacagcgacagaaaccgcacggcgacaggatcagtcccaacccaccgcaagcgcaccaacagagtcacgcagccagcgcaccagaaagcaacaaaagaaaagaaaaaagaaaaaaagcgagcgcgcccgacacgagagacaaacgcccgcacacacaaagagcg

SEQ ID NO: 694081 - DNA, 171 bp, Homo sapiens
gacaacctaagccaaaccatttacctaaataaagcatagacgatagacattgaaacatcgcgcaatagatatagtaccgcaaggaaagatgaaagattataactaagcatagtatagcaggactaacctctatacctatctgcatcatgcattaactagaacactatgcaa

SEQ ID NO: 694082 - DNA, 154 bp, Homo sapiens
ttgcagactcgggtatggatgtgtcacctttgtctctagctctacgttgcaacggaagtaacatctgtcgagaagtgcaccatgaacctttgattgaagctcttcctgaggacaatgtgggctttaatgtctagaatgtgtctgtcatggatgt

SEQ ID NO: 694083 - DNA, 119 bp, Homo sapiens
ggtgctgacagaacaaacaaataacaaaaattttttggggaattttatttaattatcatgaactgtgtagatcaactgagagagaagtggcattgtgtcttactatccatgacctgggt

SEQ ID NO: 694084 - DNA, 257 bp, Homo sapiens
  misc_feature (10)..(10): n is a, c, g, or t
ggcaagaggncaaagagggtgccggttttaccgccttttccttccggtcctttacctacccccttccctctttttaccttttcatttactccttgtttccgtgctggtggggttgacctttgaccgtgtggggggccttgttcccgccaggattcccagcgtcccgttccttgggaagttcagcccgaatttttgtctttcccccggcagccccgccttgcccacttttcttccctaaagcaagctcacccttggga

SEQ ID NO: 694085 - DNA, 528 bp, Homo sapiens
aaaaggtggagatggccctcaattcttgaagtttggggaggccgcccttgtttatatggttcccggcaagcccctgtgtgttgagagcttttccaccaatccccctttgggtcgctttgctgttcgtaaaataccacacccgttgcggtgggggtcatccaacccgtggcccaaaaggctggtggggctggcaaggtcccccagtttgccccgaaaggtcagaggggtaaatgaattttttccctaatccccgccccccccctttttatcagggggggaagaacggtttccgaactgtttgtttccattggcccttttagttttgggggaaaaggcggggttatgatacccatgccttgttaacccctccgaaggaaaggggaatgttttggggccccctttggttttttttttgggggggggccgttttaaggtttttgttttttaaacccggccttttttatgggacccccttgccccaaaatttgtccccgaattttgggccccctttaaaaagtttaatgggga

SEQ ID NO: 694086 - DNA, 172 bp, Homo sapiens
cccccccccccccccccccggggggggggtttccccccccctggggggcccccccccccctttccccccaattggtttttttttttgggggttttttaaaactctcccccctttcccccggggggggggggtgggggggggggtttttggggggggttttttttttttttta

SEQ ID NO: 694087 - DNA, 203 bp, Homo sapiens
ttgaaccatccttgtatttgagggaataaattccacttggggccaggcacgcctataatcccagcattttgggaggccaaggcgggcagatcacttgaggttgggagttcgagaccagcctggtcaacatgggagaaccccgtctctactaaaaatacaaaaattagccagtatcgtggtgcgacagagcaggaatctgtctc

SEQ ID NO: 694088 - DNA, 1013 bp, Homo sapiens
agatgtgttgcccctcccttttaaaattttattttcgtttttctatgggtattgttatgtttcttgatactttttctctctctcctgccccccatcccgcactcccggcgacccaaaccgtcatctaccactaggataagatcaccctcaggacagacagcgcatctccatgccccaggcactaggtacgagaggcccaacacgatggaaaggacactccagtcaagagatgtgctgaactgaaaacatagtcgactgagaactcaaatcagagtgtctacacaaacgcagactcataacccactgcccatcacttaaagaagacgagcctcatagaaatactacgatggatactgcacaagaaacacagaaaagcagaggttgatatatcagagatgtcatataaatactagaattcaaaaaaagcatcgtgaaatgagttggcacacaagagcccatctactaaatggcaacaaagaggatagcattgtgaacctttaccactcgtacaacggccatccctcgacacgacagtggacatcaagaacaacgacacagttaggacaaacaaccaacaagatcgaatgagcaaaatgcgtagggacaagtactttaccgatgcccgaggacaaagcacacaccatggagcaagcaaaggaacgagagaacacgacgcaaaagcgcactggagaagagccagcaggacaacacatggaaaacgctagtgcccccacagacgcacggattcacgcactgaacatggggtctggcaacaagtcgaccacggagcatagcacccggtgtggccagcatcgcctacagcccacaggatggaggcaacgtcgcaaccggtaccagcgcaaaaagaccccggcggaacacacgccgcgaacagcaccctaccaccacgaacgacaggagaggcaacaatgaacgaagaacaacagagcaggagacacgaaaaaaaggactgccaaaacgtagcaagaaaggaaccgagcacgcagaagaaa

SEQ ID NO: 694089 - DNA, 330 bp, Homo sapiens
agtagctgggcattacaagtcgccaaccaaccatgcccagtgaatttttagtagttttagtagaaacggtattcaacaaaaatggccaagttggcttcaaattccctgacctaaggggaccctttcccttggggttccccaaaggtttggggatttacagcattgaccctttggggccgggccccttgtttctcttttcaacggggtaaaaatggggaaattttttctacaacaatactcaggatgtttgttagacgaacagttcacagttctttttcacacaacgccatgcgggacacaaaggagacatagggtttggaaaacagtatg

SEQ ID NO: 694090 - DNA, 219 bp, Homo sapiens
ggatttgctggtgcagtacaactaggcttaatagggacatgctgtccaggatggctttgaatgtggcccaatacaaattcgtaaactttcttaaagcattatgtgatttttctgtgacttttttttttatatatagctcagcagctattgtcagtgttaatgtattttatgtgtggcccaagaaaattcttcttctaatgtggcccaaggaaaccaaaa

SEQ ID NO: 694091 - DNA, 299 bp, Homo sapiens
  misc_feature (7)..(7): n is a, c, g, or t
  misc_feature (12)..(13): n is a, c, g, or t
  misc_feature (19)..(19): n is a, c, g, or t
  misc_feature (36)..(36): n is a, c, g, or t
  misc_feature (138)..(139): n is a, c, g, or t
cacaaanatggnngtgccngcacctgggactcctcnaacactgtgccccgcttcctgttcaaaaccccgtagatgccaccgaccacctgctctggacactggatctccacaaggtagatgggctccatgaggctgtgnntgggcggtcagcacacttggctgtagcaggcagcgcctgtgcttgtggggcatgatcttggcccccttccggcggtggataggcgtcggcgatgcagggtgactgtcgtggacgtcggaagcgcacaccccggcatgttctcctcacacagtgcgccctc

SEQ ID NO: 694092 - DNA, 145 bp, Homo sapiens
ctggcgtggccaatcatggttactgcagcttggttccttgggctcaggtgaccctcccaccttagcctcccaagtagctgggactacagatgcacacctacatgctcagttaattcttttttttttttttcaagaagggggggtt

SEQ ID NO: 694093 - DNA, 429 bp, Homo sapiens
taatatattaatcacttcacgtagttactattggagtgtgtgtgtgtgtgtgtgtgtgtgtgtggtgaaaatttgtaagatcaactttcttagcaacttttaagtagcaatgcattattattaactatattcttatgttatacattagatctccagaacttattcattctacatgatcggcactttgtaccctttgaccaatatctccccatttcctccactcccacacccctggcaaccactgttctactctctacaactatgagttctagtttaatttagaatccacatctcaattagaccatgcaacacttctctttctctgtctggcttatttcacggtatcatgtcccccaggttcatccatgttgttacagatggaaggaattctgacacatgctacagcatggatggactttgaggatatgc

SEQ ID NO: 694094 - DNA, 512 bp, Homo sapiens
ggtcttagggagacttcacctaagaagtaaagaaaaaaaaaaagaaaaaagtctcaggctatgtctgaactaggagggtagaaagaaaattcatttgggttgccacaaaccatcgaaacaaagatgcaggtcattgatgtaaaaatacagttagtccctactgactccttttcagcttctcttcatggctatgagccagcatctcctgtgtcaggtttcagtctatggcctcccagttccaagtgcacctttcaatatgtccactgtgataaactgggaagcacttttcaatatacctcctggaagtgaacattctgcaggcatctagatagagggtggagggactgcagagggccttgatcaggtccaagccccaaacacagacctaggcgtggtccctcagccaacttgcagccttggcctgcagcatctcgacgaggaaaccaaaatgcagcagggcccgtgtgatctgaaggtccctgaaaagttgtccgggcctccctaagacccta

SEQ ID NO: 694095 - DNA, 521 bp, Homo sapiens
  misc_feature (512)..(512): n is a, c, g, or t
gtcgatctagaggtccctgtggagagggggttcatatggtgggccaggctgggtctcaagctcctgacctcgggtgatctgcctaccttggcctcccaaagtgctgggattacagcgtgagccaccgtgcccagccaagattctggatctaatggagaatttggaccttgtttggacaagcattaaaccgggtggggttcaggccacaagttccaaccagtctttttggatttcaaggtcagtttcaaaggcttttcctttctaggcagatagatctcttggtaggcggtggtcttttccttagttcagttctcaaagtcttgggtatgctccttaggattagatccacatagttacagttgggagggggagcccagcagttcataagcaacttaagggggtcactggcccaatctcctccctctcggtgatgtccccagtactttcctgttcccgggggctccctatttagttctctgaccagaaagtgaggtttacttatccaagtctgncaatatctc

SEQ ID NO: 694096 - DNA, 528 bp, Homo sapiens
ctgagagggaaaaatttattgattgctatgacatgggcatgatatgatatggtgacgcctgttcatacagatgactttttagggccagaagagaattttttttccttttacaaatacatttgatcagcaggaaaaaacattttaaaaacagagcattttcatattaggtggaaactaaaaacaatggctttccccccggcaactcatgaggaatagggctggtcagcaatagatctctgagtgctgccaatgtgagtgcaggccactggccccagtctgttccttgtttttcacagagagtccgtccaggggcaaatgaaattagaatctcaccaaaacaggtgcctaaatgcagctcgagaaatatgagcgcgacacgactgtaacgctttaacttatttggctgactgtgcaagaacatttaatattcaaagtttacagcgggattgaaacaattgtttaaacatcaataaaacaattgatgtgctaaatgctaacaccttagagatgcctataccacagttgact

SEQ ID NO: 694097 - DNA, 506 bp, Homo sapiens
agcgagtggtaagaggctgctgagtagcttttttccccacagtaaccgtagaggcaagaactgatatatatatgtcacttttactaagaaggggggaaacatttgctattaatctgtaaagagaagtcatttggcatgctagttacgtggagtaacagggaatagtatttacacttcactgcctcaaaaaagtgaagaccagaaaaacattgtttcagacaatggagagcaagaactgatacggtgtgagtaatacaagaatggcgtcataaacatgactggggagcaagtagcatagatgtgtctcaaggtaggagatcgtacagagacatacaaaaacagtaagaagcgaaaatttacttataagttacagtgatactataatgttagcatatgggctaaaattcaaagaaacttaagagccaagagaactcggttggacatgagaagggaaaaggaggaaccaattccagggcaacagaaagtactcgaaaaaccaagaaaaa

SEQ ID NO: 694098 - DNA, 622 bp, Homo sapiens
gtcaagcccatgtgtgttgagacgcgtctcagactatccagctttgcgcggtcgcttggctgtgcgctcggatatgagacagacgagttgcggtgggtgtcgatcaaagcagtggacaaaaaggctgctggaactggcagcgtcaccaagtctgcccagaaagctcagaaggctacatgattctgtaatgcctaattactctgccatgcccacttcttacctcatggctgggtggatacaacggttctcagaatctgtgttgtgtcaagttggacatttacgtttaaatacctaaaagactggttaatgaatatataagtgcatcgtagaaccttcacaaggaccggagaaatgtttaggtggaccactttgccttctgtctgtgtaatctgcggtgtgcgtgagtgttaaaaggttattagtttttaagaatcagtacttatgtgtatagtggagacaacttgacccataacattggtcacagaagtttggcagaccctagttgaaagaaagttaacatgagagcaagcaccctaaggatggggcaacaagacttgatgcatctttgtcccccaagcaaaaaggctacatgtacctccttcattgataataaaaccttctg

SEQ ID NO: 694099 - DNA, 103 bp, Homo sapiens
agcaccaccgaaagcggcacgaggaggaacagcacgtccacggctcagccctccatggccaccgccgcatgcggaatggcttgtgcagatgcaggggatgcat

SEQ ID NO: 694100 - DNA, 349 bp, Homo sapiens
  misc_feature (162)..(162): n is a, c, g, or t
ttgttctatgatggatccctgtagaggtgatgtctccagcacgcagctggagatctgagaacgggcagactgcctcctcaagtgggtccctgaccctgacccccgagcagctaactgggaggcaccccccagcagggcacactgacacctcacacggcaggntattccaacagacctgcagctgagggtcctgtctgttagaaggaaaactaacaaccagaaaggacatctacactgaaaacccatctgtacatcaccatcatcaaagaccaaaagtagatataaccacaaagatggggaaaaaacagaacagaagaactggaaactctaaaaagcagagtgcctctcc

SEQ ID NO: 694101 - DNA, 260 bp, Homo sapiens
cagtaaaaacagtcctcgctggactgctcagagtgccagacctacatccattccaaaatatgcccgctacttctccaccgccaagcgcaaattcatcatcgccgacacccctgtgccatgagcagatacacccgcaacatggccaccgagtgcgtccacctgatgacctgcgcgatcatccttgctcgacgcccgctacgcgcgtgcgagacccatgacccggtcgtcacagactacatcgcctcgattgctcgggcatc

SEQ ID NO: 694102 - DNA, 514 bp, Homo sapiens
  misc_feature (35)..(35): n is a, c, g, or t
  misc_feature (40)..(41): n is a, c, g, or t
  misc_feature (50)..(50): n is a, c, g, or t
  misc_feature (66)..(66): n is a, c, g, or t
  misc_feature (69)..(69): n is a, c, g, or t
  misc_feature (81)..(82): n is a, c, g, or t
  misc_feature (93)..(93): n is a, c, g, or t
  misc_feature (152)..(152): n is a, c, g, or t
  misc_feature (190)..(190): n is a, c, g, or t
  misc_feature (193)..(193): n is a, c, g, or t
  misc_feature (327)..(327): n is a, c, g, or t
ggagggtattggtcatgatccatcctctctccagngaganngagcctgtngtgtaccaattaggtnagnaaggtctggtgnnggtatccctantcaaaagacttattatatggaagtaccactttttaagtaggcaagataccttttaattncattccacagaagggaattttttggttccaggtctcanatnaatttggtattcctttttaaccactctacatttcccctggtttttaacctcaggcacatgtgctcttggtacagtttaaaaaggggtattaaattcggccttggtcatggtgggcaagtttaattcctctggtntggcataatggtgtatgggccggaggtggtgggctctggcaaagggggaggaagggattggcgattccttgtaaaaggtccccagacatgggtataattttaatcatgaattcaggtcttcctctgatggtccggaaaggtcctaaatactctaatttggatggcccaaaaggacttaacccattca

SEQ ID NO: 694103 - DNA, 534 bp, Homo sapiens
  misc_feature (70)..(70): n is a, c, g, or t
ctacagagttccggcgacggatctggatatatgcacagcaggcctctgtctatattaacattattgtgcncacagacacttcaaattttaataaatataatacaaagtagcaggcatggtgatcacgctgtatcccactactcaggaggctgagcacatgattgttgaacccagagcggagttgcagtgagccgagatgggccactgcactcaggctggcgacaagcgagactctgtctcaaaaaatagataagtaaatatcacggtgacattcccaaatgtttaacagtggtacctctaggtggtaaaattacagggttatttttctcttccttcgtcctctgtataataatttccaaattttctagttagtaagcatatgttacttgcatcggaagaaaaaagcacttgggctggggggcggtggctcacgcctgtaatcccagcactatgggagggcgaggcgggcagatcacctgaggtcaggagttcaaaaccagcctgaccaacatggagaaaccccgtctctactaa

SEQ ID NO: 694104 - DNA, 213 bp, Homo sapiens
acttcaggaagcttttcagctcaagctgaattaaccaggaatccagcagggactggagttcaggagaaagctcctcaaaggcgaagcttccttggtgggggttttccaaagggccccttggggttgagcgaagggtgtatttctatacatgaaaaagaggaagtttctccatcagccgctctcctaccctagtacagcaggcgcgcttggggc

SEQ ID NO: 694105 - DNA, 105 bp, Homo sapiens
ctactgggagccttaaccctaactacgttcagtaggggagcagggcgtattcacggttcacagaacaagtccaggtccctttaccttgttccaaccaggacgtgt

SEQ ID NO: 694106 - DNA, 183 bp, Homo sapiens
cgagccggtccacactagaggcaggaaagagatgggttcagaaaataataaaatatcaagctaggagcgttggctcgcgcctgtaatctcagcacttggggaggctgagtcaggaggatgcttgagctcaggagttcaagaccagcctaggtgacatagagagacctcatctctactagaaat

SEQ ID NO: 694107 - DNA, 825 bp, Homo sapiens
  misc_feature (760)..(760): n is a, c, g, or t
gagacagacgagtggaagaactcatgacatcacggaggccctgccaccgctactacttcgggctccgccggcaccgggacctgtctggtgatggccggtccaggcgttgttcccagcccagctcaccctgagggactgggagctttccatgcagttgattgcctgccttcatgtggtttctgagttcacctggctgtgttcctcctcctcctttcttctgtaaatggcctgtccgggcctcagttcctgtggtttgtgggctcacctggctgtgttcctcctcctcctttcttctgtaaatggcctgtccgggcctcagttcctgtggtttctgagctcacctggctgtgttcctcctcctcctttcttctgtaaatggcctgtccgggcctcaggccttgaacggtcccttggcaaccttccccatcaacaggaggcagcgggtcagttagatttgggcaatgtagattcccagatttatctccagcccagaccgctctggacctgctcagcccttgtgcccacagctgaggccacatcttgcccatcgggatgtcagtggcacctgtgcccctctatttgcttgctgtctttccggacccttctttctctcacatggcacctctggtccatcaacagtccctgtggctttattttcacagcacgtctcaccacttccctcccctccctgactacctggcggcttcaggccaccagtgtctctcacaggagtctcccaagtggtcccctccttcaccancccccaacagtctctcgtgagcacagcagccgtgtaatcgccttcagtaatcgccttcagcccgt

SEQ ID NO: 694108 - DNA, 129 bp, Homo sapiens
cggctgatgctgatgtaagccatccaccacgacggaaatccccggagaatccatggctcatgaatggacactggcaccagctggaggaagaagcacctcctgggtcctaataatctttctgggcctctc

SEQ ID NO: 694109 - DNA, 266 bp, Homo sapiens
ccctgttgagtggcatgtgatcagacatcacctgggagtggtggagggggaggaacccaatcagatattgagtgtgatcagatatgagggtggggggtcctatgctaaactgacttagccagggttctttgctaaaactggatcttacaaggaagtgcacagatggacctaggagaagtttcaggggcttgactaaagttcagccaagcaaaggatctttgtcaccgtgtcttagcaaatgcttgacacttcccttccccacaacc

SEQ ID NO: 694110 - DNA, 384 bp, Homo sapiens
gcacgaattccgacatccgcgttttgttccgcaaagcgcagctcggcaactcgggaagcgtagcgtacatgttcgaccgcgtaggcctcgtggaagccacgcacgccgaggcgagagatccggaagaagccgcgatcgaggcgggcgcgcagaacgtggagccgatgaaagagctcgataaagacgccaagagcggcgccatcttctacaccgagatcagcgacctcaacgccgtgtcgaacgcgctcaccgcggccggctggaaagtaaccacgagcgagctcggcttcaaggccaagaatcccgtggaactttcgggcgaccaactcaaggagacggccgagttcctccagtcgatcgacgacaacgacgacgttacaccgg

SEQ ID NO: 694111 - DNA, 147 bp, Homo sapiens
tacaggatcttccccgactagccgacagcccgagtatccgacagccccgactagcccgacagcccacgactagcccgacagtccccgactagccctcgcgaacgtgttatccccctgtcgggctagtcagggggggtaccgtagctc

SEQ ID NO: 694112 - DNA, 134 bp, Homo sapiens
ccaaattggtaagcatctatcttcgtaggtccactctacctgagctaaattatagatccagctatgctatttattaattatttcttgatggataaattttcaattctcccttgaccattcagacacttccatac

SEQ ID NO: 694113 - DNA, 684 bp, Homo sapiens
agcggggcgggagttcgagacaagcctggcaacatggtgaaaccctgcctctagtaaaaacacaaaaattagccaggtgtggtagtgcgcacctgtaaccccagctacttgggaggctgaggaatgagaatcacttgagcctgggagacagaggttgcagtgagccgagatcctacctctgcactccagcctgggctacagagtgagactccgtctcaaaaaaaaaagaagaaaaaattcagcaacaagcaaaaaagaaaggtggaaatataggtagggggttaattaaattgaatgtaatttcttttggagacaagatttggtttggggacacaggttgggagtgcaggggagtgatcaatagtttaattggagattggaactcctaggctcaaggtggatccttgggtaatcctccggagtgggtaagcctatagttggggtgccaccaagcgggacttaattttgatatcaaggtaattctaaaattcaaaaataaagataaatatagttgtacaattaccattgcacttgggtggggcactttggaacaggatttacctagtagttgaacaagattggcctttggagcttaaccaattgtatataggttaaggggcccctaaaggtggctttacaattggcggaaattatacatttcgctatcagagaatcattggatag

SEQ ID NO: 694114 - DNA, 413 bp, Homo sapiens
aacggcctcatagcttagcatagcctacttcaactgctcagagcactaacattagtctgcagctgggaaaatcaactaacacaaagcctattataatcaagtgttgaagatctcatgtaactgaatgagtactatactgaaagtgaaaaacagaatgggggtaggagtacctgaagtacggtttctactaaatgtacattgttttcgcaccatcggaaagtcaaaaaatcattaagtcaaaccatcctgagttggggcctgcctgcatatagagatagagtctggttgggggggagaaaaaaagaactagattctaggccaggcacggtggctcacacctgtaatcccagcactttgggaggtcaaggcagatggatcacctgaggtcatgagtttgagaccagcctggccaa

SEQ ID NO: 694115 - DNA, 82 bp, Homo sapiens
gcggccgcctactactactactgctcgaattcaagcttctaacgatgtacggggacatggattaaataatattctttatgac

SEQ ID NO: 694116 - DNA, 1228 bp, Homo sapiens
cctccgtaccccctaacaagcccacctcctaatactaactacctgactcctaccccgtcacaatcatggcaatgccaacgccacattatccagtgtaaccactatcacgaaaaaaactctagcctctctatactaatctccctacaaatctccttaattataacattcgcagtccacaggaactaactcatatgtttatatgcttcttcggaaagccgacacttatccccaccattggctatcatcagccgatgaaggcgaagcagtgcagaacgcctgatgcgcaggcatcgatactgtcctgattgctagcactcgctaggtaggctgcccttccgcctactcatcggcactaatttacaatcgcaagaccctaggctcactagaacacttctactagcttcgagcccgtcactgccgcaagagagctatcagaacgtcctgaggccaacaagcttaagtatgactagacttacacaaatagcgtttgcactagtacaagactaccgtcgtttagcggagctcgcacttcagtgactcgcctaaaggcccatgtcagaatggcaccccatcgcgtgggtcagatagtacttggccgcagttactctatgaaagctaaggcggctactggtataatacgacctcacactcaattgtcaagcccctgaggaaaaacagatagcctatcccttccttggtacttattccctatgagggcatacagttattacagagctccatcctggccatagagcaaccagaccttgacagcgctcactgggcatacttcttccatccaggcccgtaggccctcgtagataaccagccgatcccagtcaaacccctgaaggttcccgggcaagtaattctaaaaagacggccctaggaacattactatcctcccatcgcattccgggcatacgaagctcacattagagagaacaccccgagtcggcattacacacccaccttccgaggggtgaaacctaaaccccccgaataaattgtgagaagtcctaagacggccgccagacctggatattcccccgtaaatcacactgggggcacgctcggtataatcatacctcgtgcgatcacgacaaacaacgatcagtcacggcctgactggaatagcaagtggcactgcatactaacattggagcagtggcagctccgcaggggtaagagatactgctagatggtgtatctcacgcgcacatgcatccca

SEQ ID NO: 694117 - DNA, 113 bp, Homo sapiens
atttatttatttttgggacaggatcttgctttgtctccctgtgagtgcagtggcagtgagctgagatgtgccactgcactccagcctgggtgacagtgtgagactccatctca

SEQ ID NO: 694118 - DNA, 149 bp, Homo sapiens
tcctaggcagattgtagtggtgagggtgtttatccataataatgttatgtagtatatcggctcatgaagaatagtggcgaaggggcctgtgtgatattcgatgtttgaagcctgatgactagttctggactcccctatcggcaaggtcg

SEQ ID NO: 694119 - DNA, 1078 bp, Homo sapiens
  misc_feature (1)..(1): n is a, c, g, or t
ntttggcaatatttcgggggcgaaggccctcatggtgcgggatatataaaagaagatctcgaaccggggggggcccccttgaagtgtatgatatacgcgtctgttgaaggagtttctccgtgccgggggcccgcaacagtttttagacaagcacagagattaatggggcgatatgtattgaaccaccccctcccgcggaggatatttctttctcttctatagagcgcccacacagcaggagttatgttcccccagaggctagtttgcgcctctttacggcggggggctacattgagcgtcaacatcatttgggagagaaagccacacagacgctgttcgtgtgggagatacttctttggggagaaaaaatccggtgtgtagcccccaaacctggcgctcaaacttgtgggagaagaaaatatgtgggaggaaagatttttttctgaaagaccgcgcagagcagtgggttttacacaggaggatggtggaaacagatcatttgttgtgggtgccacaccacgccgcattacagagagattgtagaacaagaatgagtgatacttggtgtttctaccgaccaagggatattcatatgtttttctgccacacttttttattatatgcgttcgcgcataaaaaaaccctttggttatatccctatatatccccacaaattacaatgagatttaaataaaatgtctttgaattgctttgaaatttgtggaaaagttacccccgcgagatgttcccccgtattccacgggaacaattaagggccacaagcacatgtccaccttacccacttaatattcccctacttaagaaggtgttcaaccacagatgaattaattggggaaaattgctttcagaaatttattaaagccacaagtgtcccctcacttatagtgaaatataatgctccaccgaatcacaatactgagattttttaaaaaaaggaaaatttgaagtgggaattttttgcttagaggttttataaaacctagttttgtgtgaaaaccgtttgtggggatacttttccccccacccccccattaatttttaattttaaaccccccca

SEQ ID NO: 694120 - DNA, 109 bp, Homo sapiens
ggtcgaccagcataacaatagcatcagtagtcttacactatatgatcggtagtctcttacattagcaagtatatgagtagaaaagacctccacatatattcaagattca

SEQ ID NO: 694121 - DNA, 104 bp, Homo sapiens
  misc_feature (19)..(19): n is a, c, g, or t
gtatcatcaccgatagcancagcagaacgctgacgcaggccatacttcctattctacacctagtaggctccttccctactcatcgactattaactcacaaacct

SEQ ID NO: 694122 - DNA, 138 bp, Homo sapiens
tgactctacaggatcttactatacacctacactccccaccttcacctatttacagttaagaaaagcactacctccatgagaattcactgtgtgtgtatagctgtgtggtatagacgtggtatcaagggtggtatcaga

SEQ ID NO: 694123 - DNA, 635 bp, Homo sapiens
  misc_feature (458)..(458): n is a, c, g, or t
gcaacttggaggatgatctggaactgggcaagtccctgtgtctggggcgctgactgatcacggacaagtcagagtgcactggtcttccatcacatgtatcatacatggaatgggatccgacacttgatgcggtacctcagacactgcctgatgatctctcaattatactagtccgaactggttatgctgcatggtactgcgtagccctctatggggctggaaggcatgtgccgaacggaggctgagaccgtcctctgactacacagtagagaattcacccacttctctgaccgtcatgcgaatctcctgcccgggaactgttctgataatctgtctagactctctggaagataacagatctccttgacacacatcactacctgtgagaccagtctaatagcgagcgatccatttttgcactcgactctacagatgcagtggttgccctgactccattntctgcgacatgtagccgactatcgagcatgaagcatatagccactatccataacgtactccgactagtgctggaagtcagctcagggttcatgtaacttgagacagaggtaactgccagcttgtatggtttttgccatgtggattggcctatgttggatgggtagatcttgtctttg

SEQ ID NO: 694124 - DNA, 618 bp, Homo sapiens
tttaatatagcctgattggggaagacgggtgtggtgggtttaatcccagcacttggaagcccgggtggcggacacctgaggtaggagttcgagaacagcctgaccaacgtggagaaaccccatctctactaaaaatcaaaaaatagccggacttggtggcacatggctggtatgccagctactcgggaggcttgaggaggagaattgctttaactttggaggcggaggttgtggtgaagtgagatgacgccattgcactccagcctaggcaataagagcaaaactctgcctcaaaaaaaaaaaaaaaagttctaaaggtttaagttttgatgcggttccttgaattgctcttttttttttttttttttagaaaaggcaagggattttggccttggttttttagttggattcttagagatttaattttaagggtgtgttcctaaatttgttttgcccgctttgccattcgatttcttgcagccggggggttccttgtttttaggggggcggcacggggtggagtccgctttgttcccttgagtgaggtattgggcgttggttattctgtctagtgttctgtttgtttttccttttatgcggctctgtttgtgccgccgg

SEQ ID NO: 694125 - DNA, 484 bp, Homo sapiens
  misc_feature (49)..(49): n is a, c, g, or t
  misc_feature (60)..(60): n is a, c, g, or t
  misc_feature (67)..(67): n is a, c, g, or t
  misc_feature (91)..(91): n is a, c, g, or t
  misc_feature (112)..(112): n is a, c, g, or t
  misc_feature (120)..(120): n is a, c, g, or t
  misc_feature (180)..(180): n is a, c, g, or t
  misc_feature (244)..(245): n is a, c, g, or t
  misc_feature (248)..(248): n is a, c, g, or t
  misc_feature (262)..(262): n is a, c, g, or t
  misc_feature (290)..(290): n is a, c, g, or t
  misc_feature (309)..(309): n is a, c, g, or t
  misc_feature (312)..(312): n is a, c, g, or t
  misc_feature (316)..(316): n is a, c, g, or t
  misc_feature (350)..(350): n is a, c, g, or t
  misc_feature (369)..(369): n is a, c, g, or t
cagaggtcgctgcatttagaaaggagacggggtcagaggaatagaaagngatagggctgnagaacanaggtcgctgcatttagaaaggagncggggtcagaggaatagaaanggataggnctgaagaacacaggtcgctgcatttagaaaggaggcggggtcagaggaatagaaaggganagggctgaagaacacaggtcgctgcatttagaaaggaggcggggtcagaggaatagaaagggannggnctgaagaacagagntcgctgcatttagaaaggaggcggggtnagaggaatagaaagagatnggnctgnagaacagaggtcgctgcatttagaaaggaggcgnggtcagaggaatagaaagngatagggctgaagaacagaggtcgctgcatttagaaaggaggccggggtcagaggaatagaaagggatagggctgaagaacacaggtcgctgcatttagaaaggcggtcacgcca

SEQ ID NO: 694126 - DNA, 950 bp, Homo sapiens
ggtgctgcgtccgaccccggctttctttcttagacgcgcttttcatgctcccccgctttggcccttttcacatattcttcgccctaatcggtcccttcgggccccggttttccctacgggtgggccagccattggctggaccaccctgtgcgcgtgatagctccccaaccgggcttgggtccccgaaaaccttttgtttgacctgcctcttggaagctttgttttctcccacagataagccttggttcctacccggggccacttggtgttcctttaacctgccccgcttgggcaaatctgcatcccccagggcgcctgtgcctcggtgcccgccgcggagacccaaggtggtactcccttcgaccgggtcctctttggggaatttcttagatcccgccgttccagcccgccctgcggtctcctccccccgggacagaccctggttcggccgcgacacctcgtccccctcctgtgacggcggtcggactcttcaccgagacactgcggccattctccgacccgtcccggcgagcaagttcattgctcggcgatattcgggcctccttgcgcagaacgggcgaacgatctttccccggggcccgctccgtttggtactccccggggaacacaggccctgcccctggaggacctcaacactagtggcgaggtcagtaactctcccacgaaagacaatggtggcttgtaggcgacggccgggtgcacagcatttgttttgcccccacttcacccgccgctggtttcttagacatctggccgcacgcctcaaggggggtccgcaccccgccagtcttgcaccgacagttcgcggcccccgccacttgatacttcccctgcggtccccccccctcagaccaggcagttcttccgaccagttcccccccctgaggggggttgcccctctcaaaaaccgccccccgcccaaaataaca

SEQ ID NO: 694127 - DNA, 197 bp, Homo sapiens
cattgtgtgtttgcagctgtccaatgtcaacaggaccctcattctattcaatgtcagcaagaaatgacacagtcaagctacaaatgtgaaacccagaacccattgagtgccaggcgccgtgattcagtcatcctgaatgtcctctatggcccggattcccccaccatttcccctctaaacacatcttacagatcagg

SEQ ID NO: 694128 - DNA, 102 bp, Homo sapiens
ggatcccctaaattgtaatagttcattaatgtaaagtacggacacagtcttccttttccttcttagacctgtttcaatatggccacgaaacaagtagtctct

SEQ ID NO: 694129 - DNA, 532 bp, Homo sapiens
tctagaggatcccgtgggagagggggtctcaccagcgtgggcgggctgggtctcgaaactccgggcctcaggtggtccaccggtctgggctcctagggggtggggattacaggcatgagccaccaggctcggcccagtccagacttttaaactaccgggccccattgcagacacagttccctctagtccttcccagagttacaagaagagaactccagtagccttattcggtcagggacgagtggtttaccccatgataaggtaggatatcataaattcttctgcaaaggtttaagcctgtaattggtaaagtacatggagttctgagatcctctccaaagaagcaaggtatcagtatgtccagctcaccggtgcttggtccttcattttaacttttaattccctcattctttatgtctcctggcccctagtttcagtaaacaatcccctcctagcctcggtcaccggctcggacctgagtcaccttaagtcaccgggtccgaaaccatctgtccggtctaaatttctcacc

SEQ ID NO: 694130 - DNA, 182 bp, Homo sapiens
ccccgtgacccagggatactgagtttggttttaaaagtgaaagccaagtgggggtatgtaaagggatttccatgtagctgtggggcgagttattaccggctacattatatgctaagggtattggtgttccccaagtgtacaagccgttctatcaaaagtatgcggtatggctcagcgcgggg

SEQ ID NO: 694131 - DNA, 340 bp, Homo sapiens
actctagagggtccccaccacacttatttaagagcatattccaatatcaaacggcaaatttcaacagtgcaaaaaccacaattacgtttgcaccaaccttaatatttatttttatacctgtgaattaagaatgcataagtaaaaataatagcaacaaaacattaaaatattagtgatcatgtatttcatgtaactagtccatcaatataggacagttaaaagtggttttgcactagctttaagatctttggcaaatgctttgcctaaattttcccaaagttttaaaatgaagtactttttactgagatgtgattggtatagctgcatttctaaaataaca

SEQ ID NO: 694132 - DNA, 284 bp, Homo sapiens
ttagtttgctaaggataatggcctccttaaagaatggcctccataaagaagttgctttatgaatgccagctccacccatgttcctgcaaattacatcatttcattcttttttatggctgcacagtattccatcatgtgtatgtaccacattttcttaatccaatctgtcactcatgggcatttgggttgattctatgtctttgctattgtgaataatgctgcaatgaacatttgcctgcatgtgcccttaccacagaatgatttatactcctctaggtacatag

SEQ ID NO: 694133 - DNA, 781 bp, Homo sapiens
gtatgttgggtaggctaatgtaagagttccaattctgggaaacaatgaactaattgggtcatgggacgaacatttgcttagattaccaatgtctggttgaggcgtgcaagatttgccaacttttgatgtgacagtggtctcagaattaggtaataggtccggttacttaagataatatagcatgtgtttcaactaatatgaagtacttgagactcttgaagaaaattcagaatgaagttatggagaaaggtatgttactgtgagtaatacgtgctttgaacaggttttgtgttttgtcattagtctgctgcccttgtgtgtaatgtaaatatttatggttcatggaccaaagggtttactcgacaaactagtgtgacagactccgaacaattccttactgacgaagtataatttataaaatcaaatatacccattttaagggtacagtctgatttttgaccagtgaaactatgatcccaatcaaggtatagatgccgtcacgctcgaaaaagttccctcgatatgccctttgcagtcagttcatccgtactctggcacagatgatcactgatcttgtcatatatagatgagttttggccagttcagagaatttaactggcaatcagatattgtaagcattcttgctgtaatacttcattctctctcacttaatgagattcatccatacttgttgaatgtttcactagttaatgtttacttgttcaataattttgtatatacattttagaagcctattcactaactccattggctttagatt

SEQ ID NO: 694134 - DNA, 222 bp, Homo sapiens
actgcactccagctgggcgtcagacccagacccgttcaaaaaattaaaaaaccaaaaaaaaaaagcaaaaacccacacaatgaaaaatagaaaacttataggtccgcaaggagcacattaggtgaacgaggaagcaggtggctgtatctggggcggaagctgggaggtcactgggtttcagagacatgccgcatgcttatctacagactatctgagtcttgg

SEQ ID NO: 694135 - DNA, 362 bp, Homo sapiens
tcgacggtaccaacaccattggagacttgttagagcttggcagcttgggttggcgcatctccttggggtgtctcggtactgcaggcagagccggttggggcccagacctggagcatcgctcgggtcagtgcctaattagaaaagttgcactcgggccgggcactccgctcgttgtcccggatgcccttggacacctgtgtggccttcagtctttcataccgattgctgttggaaccacaccactggtggatgttgttgcccaggtccaggatgaagcagtcgccattgttgaagctctcccaggacacaggtacctcggtggcacggaccacacgccgccctttgacctggaagagtctctg

SEQ ID NO: 694136 - DNA, 953 bp, Homo sapiens
  misc_feature (10)..(10): n is a, c, g, or t
  misc_feature (101)..(101): n is a, c, g, or t
  misc_feature (127)..(128): n is a, c, g, or t
  misc_feature (167)..(167): n is a, c, g, or t
  misc_feature (178)..(178): n is a, c, g, or t
  misc_feature (191)..(191): n is a, c, g, or t
  misc_feature (195)..(195): n is a, c, g, or t
  misc_feature (223)..(223): n is a, c, g, or t
  misc_feature (227)..(227): n is a, c, g, or t
  misc_feature (234)..(235): n is a, c, g, or t
  misc_feature (281)..(283): n is a, c, g, or t
  misc_feature (301)..(301): n is a, c, g, or t
  misc_feature (307)..(307): n is a, c, g, or t
  misc_feature (309)..(309): n is a, c, g, or t
  misc_feature (323)..(323): n is a, c, g, or t
  misc_feature (326)..(327): n is a, c, g, or t
  misc_feature (333)..(333): n is a, c, g, or t
  misc_feature (337)..(337): n is a, c, g, or t
  misc_feature (350)..(350): n is a, c, g, or t
  misc_feature (353)..(354): n is a, c, g, or t
  misc_feature (360)..(360): n is a, c, g, or t
  misc_feature (368)..(368): n is a, c, g, or t
  misc_feature (372)..(372): n is a, c, g, or t
  misc_feature (375)..(375): n is a, c, g, or t
  misc_feature (381)..(382): n is a, c, g, or t
  misc_feature (393)..(393): n is a, c, g, or t
  misc_feature (398)..(398): n is a, c, g, or t
  misc_feature (402)..(402): n is a, c, g, or t
  misc_feature (417)..(417): n is a, c, g, or t
  misc_feature (479)..(479): n is a, c, g, or t
  misc_feature (488)..(488): n is a, c, g, or t
  misc_feature (494)..(494): n is a, c, g, or t
  misc_feature (498)..(498): n is a, c, g, or t
  misc_feature (534)..(535): n is a, c, g, or t
  misc_feature (641)..(641): n is a, c, g, or t
  misc_feature (652)..(653): n is a, c, g, or t
  misc_feature (716)..(716): n is a, c, g, or t
  misc_feature (719)..(719): n is a, c, g, or t
gaatgggaangtaccttaaagtaaacaaaactggtgctaatccatggcgttgaaggaaagttttgagagaaagctgtccagtgatggtcacatagattttnaacatgttccactttaggtaggcganncctttgagcagaaaatagtggatcttttctccaaaaggngtttaattttntggagatgttganaggnacatgccaaatctgagtatacgtgtganaatnatatggnngaggagcaaatactaaaccttgtatatcaagtttacatggggaaannnacattagataaataaatncatttncntgcctctttaaganatnncccttngggncacggggtatgcngtnngggggnggggagtnattnctngggggnntgctataattngtttnggtnttgcgcttggcagtnccactttcacatagttcaaaatcaggatatgtggatcttgattgggccttaggatgtcagtnttgaggggntcagtnagcngcgtgatactaagatgggccctttgaatctttaggnnagttcatccatttttagtcaataaaattggtgtactgtcaagtataagatttcttgaagtaagccacttgaaccattgtgaagctacacataacttgatgtctgantgaggttaaanntgggtgtataagtctttaatacagtgaaccatgctattaacccaacatctgttttataaagangcnagtttaacctgctttgcgttcttaatttctgttaatgtgcaaactttaccatgctaagacattagtaaatttataaattttcttgttgaacagcagcttcaatgcaaacacaatgcttccagcattggtattttggctaaggtaaatctacaaatcactcactgttgatgtttatggaatgaagcttttcacagcattggtttttaaagtcagtcaaaatagttacacaatgaa

SEQ ID NO: 694137 - DNA, 109 bp, Homo sapiens
ccaccatccgctcatctgcctaccctcaccccacgagacagcccctatcaggatttccactggaccttgcccaaatatgcaccttaggccactgcccctaaagactgag

SEQ ID NO: 694138 - DNA, 337 bp, Homo sapiens
ctgttcgctcgtgctggatacttcggtgaaagtccaactagtttaccgaggagttaatcttcggcctaatgaccagtagttagcaaatgccaagttctcaaacagctacagaacctctttattgggaccccagataaccttggattttagccttctgctaccctttcctgtctgcctcccgtgcattgtaagtaatatctgaaatggaactgtagtctgaaggcagtacaatggttgcttctccagtgtgctaacatctcagtgcttttttttcctggaattggagaggtgtaggatttgaagattagcacgtcttatgtctgtatgtacggttata

SEQ ID NO: 694139 - DNA, 225 bp, Homo sapiens
cccttttggggccagctgtaaaatatttggatataggaaatgttgtgtttttcttgcacccctgatattcagggtggattgtaaaatataaatttttgtgagatttccaagatttagatttttttgatacccttatttcccgatttaaaaaatgtggttatccccagtctcgagggggaaacttctgcataaaataactaacttggaataaattttttgcctcca

SEQ ID NO: 694140 - DNA, 370 bp, Homo sapiens
ggtaaagtttttcaagttcagcttgtgcccgaacataatcattaaaatcacgaagtacaaaatattcatcattataaacggtgagcgaatcaaaaatttcgcgaccttcacttttaatatttggcaccgttccgtcaattaaggcattcaaaattcgattaactactggattttgctcataaatatcacgcgcattataattaccattgcgataatattcataaacttcatccttagtcagcccaaaaacaaaattatttccatcccctgccgcttcaaaaatttcaatatttgcgccatcaagtgttccaatggttaaagcaccatttagcataaacttcatatttgaagttccagatgcttctttaga

SEQ ID NO: 694141 - DNA, 1032 bp, Homo sapiens
ggtcatctggaggagatttgctttctgttttctccaaaaggggaggaaatctgaaactgagctggcccactgatgggaacgaggggaaagcccatggggtacaggatggcctctggctgtgaaggcgagaggctaacatggggttcggagcgaccttggccgttggcctgagccatcttttgtgcttgtctggtcagtcactactcatcatcttgcttcacctgctcctgctgctgcctttacaacgactgtgccgccgaccacgtccggtttgtcaccacacagcacgatccagccactgatggtgcattgccccgttatcctcagcgctccaagtgtgcctgaccaagctaccctggaccaaagctaccaggtgctaccagcaccaatgccgccgtcagcgcagggattgccatgcatgcacctaagccaatgcagatacccaacacagcgttacgccagctccaggcccatgggcccaaccggccatacgcacgaagaacctgggtggatggacgcacgccgcagcccctacccccgagcagccatgacatccttacaaacccggcactacactggattgccccgaaagggcgggccctcttgacgcaatttcccttgggactcctctgggcttgccaacgttgggaaactgtaggcggtggtgtggccgtgaggctggtaggtgcaacaggcagcagagacacattgacggacccgattgtagcttgctggtgtcgtgtcccagggacaactggtttccattctacgtccccaattgttgattgctgttgatgatggtcctggccatgagacctattgggggggcattccccgtcgtgtgactgcgttggcaacaccggttggctgagaacgcccacgtccctttgtccaagaaagcttgagcgcttgtgtgacccacttaaccgttatggcgtcagtacttacccatcaagggcatggggagaattctactgggctcacaataaaacactttgtataaaccactaagaatctcccatggagactttg

SEQ ID NO: 694142 - DNA, 330 bp, Homo sapiens
ttgtatcagcaggaagccattgccattttgacccttgaagggcaaggagggaaacagtgttaccaaagcccagtaaaaactgctgtcatgaaggaggggcccccttgtaaaagacatcattactaccagaactggggggccaaattgctggggtttttttttggagaaaccaaccaaaaacatttgttggagagcccaggtgggcccaaaaaagggtggaaaaagaatttgggaaaagaaatggagaataagcagcccagtgttattcatttttgtaaattcctatgtaaaaggctcagtgttagaaataaagttattttactagttgca

SEQ ID NO: 694143 - DNA, 879 bp, Homo sapiens
  misc_feature (202)..(202): n is a, c, g, or t
ggggagaccagagaatctagcgactgaagcagcatggccagctgtgtggggtgcgcctgagcggggaagcccgcaaacgaggtggaggtctgcagacagaatcttttccaggaggtcttcagtttcctcatttgcagagtcttgggaccctagttgtatgtccaaaggccacttccagattccatttgtcagacagtctcanttgagacatattctggtgattccccttccacttgctaatgttaactgcacgaggcttgacggaacttcgctctcacagagttcgttggccactagaaatatcagtataccttgatatacagctctgggcatagagtgactcccttgcaatgtggcgtgtacttgacgttccactccgggcccacactgagaacatccccaatcccagaatcctcactacctaaggatgatgagatggaatacagataaggcaggagaaggaaagaagtccctaagtgtggatttctccctgggaatgagaaagtcctgtccctgcgttgctctggttaagccagaagtctggactctcaaagagaaatgcattcggggtgattacatggatccaatacctgatccccaagattgagcgatggacaatgatttgtggggtagcaatccaggagaaaggtgccttggaggagggtgaatgccgtcaagaaccaatagtggacagctttccagacaaccaattttccaaagtacttctcagaacggggggatgcttgtggcaaggctccaggagactctgtaatgggttaccggcctgtggcatgaccgagattaggagctagggggagtcacgcatgtgtgactgagggctttatggaggttacaatcatccggcgcactgggaaatgg

SEQ ID NO: 694144 - DNA, 170 bp, Homo sapiens
  misc_feature (157)..(157): n is a, c, g, or t
gttgccgccggtctgtctagacggatcccgttcatttctacacataatagttgatcatcagaatgattcctttagagcagaaacaattattaaggattgtttatatcttatacatattgggctaagccatgaggttcacggaagatttttctgtgcngggttgttgcaga

SEQ ID NO: 694145 - DNA, 273 bp, Homo sapiens
atacatggggatcaaaataggagctagaataggcaggatccaagtcgatggcaacagccagtcagtgaaatcagtatagtaggcagctgcacgggactacgggacaggaacactgggacagccgaacgcctcaacaggatagttcttgatacagctcttatacagctctccgagcttctccccagatgatgtgccgagcgggatcatccggcgccttgcagtcaagatcgtacttcccattgcgatagaactcagatgctgccacatccatgc

SEQ ID NO: 694146 - DNA, 613 bp, Homo sapiens
agcggggaacagtcacttcgggagtagcacaggtagacacatctcaaggctaaatctggctcaggtcgccacggctctcataaggacacacatgcagtaagaagactttggtaagggaattggagtacacccaagtgaaatggtgacaggaggttggtatggttaacatctgatatcagaaggttaaaagtgccttcggtcttaaatctcaaaccaaatatttggtgtgtggacctggggcagaagaagtgtccttccctcttttcttcaccgtcaggtagaaaacctgcactctgcagaagggtcctgtgtgatcacttaatcctctggtggagaagcagcagtaatgttatggcttccaaccggattaatcatttaatgtggaaaatagtcaaggagaccagtatctctggagtgcttaatatgccttctctttgaagggaggggacgggctctgctcggtacactcaaatgtgtagagtcagcaacaattccgtagcttccaactgactcagaatggatgcaacgtaggtcttctggcccgaggcaggtatcaagtccaaatcataatgaacttttcaccagtttcaaccagtttcttaaaagagagcta

SEQ ID NO: 694147 - DNA, 1050 bp, Homo sapiens
tattataaaaaaaaaaaaatcttctctccccccacacaaaaaaaaaaagaaaaaaaaaaacaaaaaaacacacagagaaaaaacaaaaaaaaaaaaaaaaaaaacaccccccaaaaaaaaaagaaaaaaaaggggggggagaaaaaaaacggacgggggataaaaaaaaaaaaaaagagggaggaggagcgagaggggcgcagaagagacaacaagaggggaggaaaaagaagagagacgagagaggggagaggggcgagagggggcgggggggcgacaccaaaaaggacggggacgaggcgacaacacgcagacaggagagagagagagagagagaggagagaagaacacaataatataacaaaacaaaaaaaggattaaagataaaaaaaaaattaaaagaagaaggcgggagggagagggtgggtgacggcgacggtaaaagaagaggaggagagggaaaagaaaccatgagccagaaaggagggaggaagggcggaacaacagaagagagaagaaaggagaacaaaaaaaccaaagcagagagagaacaaggaacaaaataagacaacgataaacaaagagaggggggagagacaggagagcgaagagaaacaaaaaaaaaaaaaaagaaaaaaaaaaaagaagacacgagcaggagagcgagaaaaagcacaacaaaacaaaataagaaaggcggaagacaagcagaggagcgaaatcaaaaacacaaaagcgagacgaacacaaacaaacaaagaaacaaagaaacaacactacacacaaataaaaacaccataaaccaacacagagagtcagctgtaatccaacgaacaaaataaaaggagcagaaagaaaaaaatagaaaaacaaaccaaaaaaaacgacggggcacacacaacaaaacaacaccaaaaaaacaaaaaaacgagaggggagcatacacacatacgaagccaacacaagctagagcacaataaaacaaacagcagacatacaaacaaacagaacaacgctggtgacacaaaccaaaacaatggtcaacaagac

SEQ ID NO: 694148 - DNA, 816 bp, Homo sapiens
cattctactctctaccttgtgaggtcaacttttagctcccaatatgagtgagagcatgcaacattgactttcggtctgagttagtcacttaatatatgtccttcagttcatcatgtgctgcaaaggcagatttcatccttttgtggctgaatatatccatcggtatatatacgtgtcttatccagtcatcactgatagacacttaggtgacggacttctattaaatgtatatgactactgtacctctgtcctccattgcctatatctcttcagttccatatctctgctgtccgtgctgcattgaatagctgttattactgccagcaactctttctttaggttggtaaccggtttataactcacaataaactgtaattttattagtgtacttttaatctccataagtgtatttagttcttgtcacatctgcctagccgttttaatttattttgttaattcgtaattggatatgctgtttttatttttaaaagcatgttaaagtgatggatacatgaacttacataagtaataaaaacaccacaacaagtatgagtgaaactggggatatctgaacaagatgatggatgggatcatgtccagtatcctgcgtgtgatactgtattatagttttcaacgatatcatcattgaaggaaccaggtaaatgttacagatactctgtataattcttacatgggatctaacgttattcaaaaaaaagcgaaaaaactttggggggctgccgaaatttaaaccttgtggggggggccaagatgaaaggggcacggccaagaaccgggagagggggggtcccaaga

SEQ ID NO: 694149 - DNA, 176 bp, Homo sapiens
ctggttccatgagtaagctattgcttatctagaaggagaaggcaagcaggtctccgtgaaaagcctctctccgatctggccgtctctcctacctggcatattggacagagcgtcatcttggagtatctctaccaccaccatgatgaggcacatcagcatcaaggcaattagcagag

SEQ ID NO: 694150 - DNA, 352 bp, Homo sapiens
  misc_feature (46)..(46): n is a, c, g, or t
ccgtccctaacattagaacgagtgggcgcagattggaaggggcctnggaggagcggaggaggggggggagaatgttagattccttacatacttcccccatattcctaaaaccaggcgacctgcgactccttgacgttgacaatcgagtagtactcccgattgaagcccccatttgtataataattacatcacaagacgtcttgcactcatgagctgtccccccattaggcttaaaaacagatgcaattcccggaggtttaaaccaaacccctttccccgctacacggccgggggtatactacggtcaatgctttgaaatttgtggagcaaaccccagtttcctgcccctcca

SEQ ID NO: 694151 - DNA, 617 bp, Homo sapiens
  misc_feature (2)..(2): n is a, c, g, or t
  misc_feature (8)..(8): n is a, c, g, or t
  misc_feature (11)..(11): n is a, c, g, or t
  misc_feature (69)..(69): n is a, c, g, or t
cntccgtnatngccaccgcctccatccgctcccgcagactccccacgctctgccgtgccctgcctcttnaccccccctcccccttcagccgggctctgtgggctcagggtgggagcacccgtccacgtgggtggtttggggcagggctggcaccggctgaccaacactctccccatcacagtcaccggactttgctgaggagttgaggtccctggaaccatctcccagccctggcccgcaggaggaggatggagaagtggctctggtgcttctgggcaggccctcacccggcgctgtgggccctgaagatgtggcactgtgcagcagccgccgccccgtaaggcctgggcgccgtggcctgggccctgtgccctcctagaggagcaggcacctcccccagacttggggtgggggccctgccagctccagcaccacccttgccccaagtcttttaacctgggtgttagcattttaaagagaccccacaggagttctggcctgtgactaactaactgccccaccccagccgagacctcggcgagactgtaactagtgatgtttgtacaaccaaagactctattttgtggtttaaggagaataaagttgactacatttta

SEQ ID NO: 694152 - DNA, 268 bp, Homo sapiens
  misc_feature (108)..(109): n is a, c, g, or t
aaatttttttgccgggccccccccccgccctttagggggttgggcagtcccccccttccccagggttcccagttttttaaccaaacgggggggtggaacattaaactnnagggtgggggggggtttttacccccccccccccgggcttggggtgccttttgtcccttaaattttttgggcccggggatggaaaaaaaattttttcccttttttttaaagggggggggtaaacaaggaaacccccctttaattttttttttttttccca

SEQ ID NO: 694153 - DNA, 687 bp, Homo sapiens
cggctgatctgtctgctccatctctcctgcaaagctccagccagcacactgccatggagagagcagctgcccagcccaggcccccgcatcctgtgggaacggggacgagcccctccgtgctgaccgagtgtctggggcatcccctgggactatagtcaggttggggaacgtgaagagctgctgtggcttttaggcaagccccagggtccccagtccctcctggtcgggggccacagaccctgcccatcctcacccagccactggcatactcctccaggtaccgtctggagcagctggagggaagatggctgaatctccctgctcccctagtggccagcaggtgagtgtcccaagttaacgggtgtgccccatggtgggtggagggcagggcagatggccgctgtgcacagggcccctcctccagggatggggggtcaggggccatcgtggggtgctgttgactccggttttccctctgctaccatggggcctcctgtgtgaggaaggccagggacgcttacctggccagagctgcctggcgactggggtgggggagcgcctgaagatgtgcttgaaccctggaagggggctcaaagctcctgagaacaccagacaggtgtcatcaggaccacaacacctcccaaggggcccacacttatccctgacctggccttatagtacaggaag

SEQ ID NO: 694154 - DNA, 3103 bp, Homo sapiens
  misc_feature (23)..(23): n is a, c, g, or t
  misc_feature (27)..(27): n is a, c, g, or t
gtacgcgctaggcggaccgcgangggnagaggccagcactgaggaggaggacaaggagggggccgtggtttctgcgccctctgtcaagggagtgtcgtttgaccaggccaataacctgctgatagagcctgctcgcattgaggaggaagagctgaccctcaccatcctgcggcagactgggggcctgggcatcagcattgcgggcggcaagggctccacaccctataagggggacgacgagggcatattcatctctcgggtgtccgaggaaggccctgcggcccgggctggagtccgtgtgggtgacaagctcctggaggtgaatggtgtggctctgcagggcgccgagcaccacgaggccgtggaggcgctccggggggccggcactgccgtgcagatgcgagtgtggcgggagcgcatggtggagcctgagaacgcggtcaccatcacgccgctgcggcccgaggatgattacagcccccgagagcggcggggaggggggctgcgcctgcccctgctcccgcctgagagccccgggcccctccgtcagcgccacgtggcctgcctggcacgcagcgagagggggctgggcttcagcattgctggtgggaaaggctccacaccctacagggctggtgatgcgggcatcttcgtctcccgcattgccgagggcggtgctgctcaccgcgcgggcacactgcaggttggcgaccgcgtcctctctattaatggagtggacgtgactgaggccaggcatgaccacgccgtctccctgctgaccgctgcctcccccaccatcgccctgctgttggagcgggaggctgggggccctcttcctcccagccctctgccacattcctcaccccccaccgctgctgttgccaccaccagcataaccactgccacccccggggtgcctgggttgccgagcctggcccccagcctgctggctgccgcgttggaagggccatacccagtggaggagatccgtctgccaagagctgggggccctctggggcttagtattgtcggaggctccgaccattccagccacccgtttggtgtccaggagcctggtgtgttcatctccaaggtgctcccgcggggcctggccgctcgcagcggcctgcgggttggggaccgcatcctggcagtgaacgggcaagacgtgcgggatgccacgcaccaagaagcagtcagtgccctgctccggccctgcctggagctgtcgctgctggtgcggagggacccggcacccccgggcctacgggaactgtgcatccagaaggcacctggggagaggctgggcatcagcatccgcgggggtgccaggggccacgctggcaacccccgcgacccacagacgagggcatcttcatctccaaggtgagccccacgggggcagccgggcgcgacggtcggctgcgtgtgggtttgcggctgttggaggtgaaccagcagagcctgctgggcctgacgcacggcgaggcggtgcagctgctccgcagtgtgggcgacaccctcaccgtgctggtctgtgacggcttcgaggccagcaccgacgcagccctggaggtgtccccaggtgtcattgccaacccctttgcggcaggcatcggccaccggaacagcctggagagcatctcttccatcgaccgggagctgagccctgagggcccaggcaaggagaaggagctgcctggacagaccctgcactgggggcccgaggccacagaagccgcaggtcggggtctgcagcccctgaagctggactaccgcgccctggccgccgtgcccagcgctggcagcgtgcagagggtaccgtctggagcagctggagggaagatggctgaatctccctgctcccctagtggccagcagccgccctccccgccttctccggatgagctgcccgccaatgtgaagcaggcctacagggccttcgcggccgtgcccacttctcacccgcctgaggatgcccctgcccagccccccacgcctgggcctgcagcctccccggagcagctgtccttccgggagcggcagaagtactttgagctggaggtgcgcgtgccccaggccgagggcccccctaagcgcgtgtccctggtgggtgctgacgacctgcggaagatgcaggaggaggaagccagaaaactacagcagaagagagcgcagatgctgcgggaggcggcagaggctggggccgaagcgaggctcgccctggacggggagacgctgggcgaggaggaacaggaggatgagcagccaccctgggccagcccgagccccacctcaaggcagagcccggcgtcccccccgcccctgggaggtggcgccccggtgcggacggccaaagctgaacggcgccaccaggagcggctgcgcgtgcagagtccggagccaccggcacccgagcgtgccctgtcccctgccgagctccgggccctggaggccgagaagcgtgcgctgtggagggcagccaggatgaagtcattggaacaggacgctctccgagcacagatggtcctcagcaggtcccaggaaggccggggcacgcgggggcccctggagcgactggccgaggccccttcccctgcgcccaccccgtcgcccacccctgtggaagacctcggcccccagaccagcacctccccgggacgcctgtcaccggactttgctgaggagttgaggtccctggaaccatctcccagccctggcccgcaggaggaggatggagaagtggctctggtgcttctgggcaggccctcacccggcgctgtgggccctgaagatgtggcactgtgcagcagccgccgccccgtaaggcctgggcgccgtggcctgggccctgtgccctcctagaggagcaggcacctcccccagacttggggtgggggccctgccagctccagcaccacccttgccccaagtcttttaacctgggtgttagcattttaaagagaccccacaggagttctggcctgtgactaactaactgccccaccccagccgagacctcggcgagactgtaactagtgatgtttgtacaaccaaagactctattttgtggtttaaggagaataaagttgactacatttta

SEQ ID NO: 694155 - DNA, 3082 bp, Homo sapiens
  misc_feature (23)..(23): n is a, c, g, or t
  misc_feature (27)..(27): n is a, c, g, or t
gtacgcgctaggcggaccgcgangggnagaggccagcactgaggaggaggacaaggagggggccgtggtttctgcgccctctgtcaagggagtgtcgtttgaccaggccaataacctgctgatagagcctgctcgcattgaggaggaagagctgaccctcaccatcctgcggcagactgggggcctgggcatcagcattgcgggcggcaagggctccacaccctataagggggacgacgagggcatattcatctctcgggtgtccgaggaaggccctgcggcccgggctggagtccgtgtgggtgacaagctcctggaggtgaatggtgtggctctgcagggcgccgagcaccacgaggccgtggaggcgctccggggggccggcactgccgtgcagatgcgagtgtggcgggagcgcatggtggagcctgagaacgcggtcaccatcacgccgctgcggcccgaggatgattacagcccccgagagcggcggggaggggggctgcgcctgcccctgctcccgcctgagagccccgggcccctccgtcagcgccacgtggcctgcctggcacgcagcgagagggggctgggcttcagcattgctggtgggaaaggctccacaccctacagggctggtgatgcgggcatcttcgtctcccgcattgccgagggcggtgctgctcaccgcgcgggcacactgcagattaatggagtggacgtgactgaggccaggcatgaccacgccgtctccctgctgaccgctgcctcccccaccatcgccctgctgttggagcgggaggctgggggccctcttcctcccagccctctgccacattcctcaccccccaccgctgctgttgccaccaccagcataaccactgccacccccggggtgcctgggttgccgagcctggcccccagcctgctggctgccgcgttggaagggccatacccagtggaggagatccgtctgccaagagctgggggccctctggggcttagtattgtcggaggctccgaccattccagccacccgtttggtgtccaggagcctggtgtgttcatctccaaggtgctcccgcggggcctggccgctcgcagcggcctgcgggttggggaccgcatcctggcagtgaacgggcaagacgtgcgggatgccacgcaccaagaagcagtcagtgccctgctccggccctgcctggagctgtcgctgctggtgcggagggacccggcacccccgggcctacgggaactgtgcatccagaaggcacctggggagaggctgggcatcagcatccgcgggggtgccaggggccacgctggcaacccccgcgacccacagacgagggcatcttcatctccaaggtgagccccacgggggcagccgggcgcgacggtcggctgcgtgtgggtttgcggctgttggaggtgaaccagcagagcctgctgggcctgacgcacggcgaggcggtgcagctgctccgcagtgtgggcgacaccctcaccgtgctggtctgtgacggcttcgaggccagcaccgacgcagccctggaggtgtccccaggtgtcattgccaacccctttgcggcaggcatcggccaccggaacagcctggagagcatctcttccatcgaccgggagctgagccctgagggcccaggcaaggagaaggagctgcctggacagaccctgcactgggggcccgaggccacagaagccgcaggtcggggtctgcagcccctgaagctggactaccgcgccctggccgccgtgcccagcgctggcagcgtgcagagggtaccgtctggagcagctggagggaagatggctgaatctccctgctcccctagtggccagcagccgccctccccgccttctccggatgagctgcccgccaatgtgaagcaggcctacagggccttcgcggccgtgcccacttctcacccgcctgaggatgcccctgcccagccccccacgcctgggcctgcagcctccccggagcagctgtccttccgggagcggcagaagtactttgagctggaggtgcgcgtgccccaggccgagggcccccctaagcgcgtgtccctggtgggtgctgacgacctgcggaagatgcaggaggaggaagccagaaaactacagcagaagagagcgcagatgctgcgggaggcggcagaggctggggccgaagcgaggctcgccctggacggggagacgctgggcgaggaggaacaggaggatgagcagccaccctgggccagcccgagccccacctcaaggcagagcccggcgtcccccccgcccctgggaggtggcgccccggtgcggacggccaaagctgaacggcgccaccaggagcggctgcgcgtgcagagtccggagccaccggcacccgagcgtgccctgtcccctgccgagctccgggccctggaggccgagaagcgtgcgctgtggagggcagccaggatgaagtcattggaacaggacgctctccgagcacagatggtcctcagcaggtcccaggaaggccggggcacgcgggggcccctggagcgactggccgaggccccttcccctgcgcccaccccgtcgcccacccctgtggaagacctcggcccccagaccagcacctccccgggacgcctgtcaccggactttgctgaggagttgaggtccctggaaccatctcccagccctggcccgcaggaggaggatggagaagtggctctggtgcttctgggcaggccctcacccggcgctgtgggccctgaagatgtggcactgtgcagcagccgccgccccgtaaggcctgggcgccgtggcctgggccctgtgccctcctagaggagcaggcacctcccccagacttggggtgggggccctgccagctccagcaccacccttgccccaagtcttttaacctgggtgttagcattttaaagagaccccacaggagttctggcctgtgactaactaactgccccaccccagccgagacctcggcgagactgtaactagtgatgtttgtacaaccaaagactctattttgtggtttaaggagaataaagttgactacatttta

SEQ ID NO: 694156 - DNA, 296 bp, Homo sapiens
gaataccaggatttgccagatatgagcacccacggtggccaatgagagaccatgtgatacaccatgcaacaccaactgagaccaaatattgccagaggttaacctgctgctctcccattgatgtccagtggttgacacatcagcgcaccttgggggaccaatctgttcccaaggtattgccaatcacagaccatgcattcacacaaggaagcacctgattgacatccaaggaactacaccacatagcaccaagtgaaggacacactgaggcccccagtgatgtggcctggcaaatt

SEQ ID NO: 694157 - DNA, 2832 bp, Homo sapiens
  misc_feature (23)..(23): n is a, c, g, or t
  misc_feature (27)..(27): n is a, c, g, or t
gtacgcgctaggcggaccgcgangggnagaggccagcactgaggaggaggacaaggagggggccgtggtttctgcgccctctgtcaagggagtgtcgtttgaccaggccaataacctgctgatagagcctgctcgcattgaggaggaagagctgaccctcaccatcctgcggcagactgggggcctgggcatcagcattgcgggcggcaagggctccacaccctataagggggacgacgagggcatattcatctctcgggtgtccgaggaaggccctgcggcccgggctggagtccgtgtgggtgacaagctcctggaggtgaatggtgtggctctgcagggcgccgagcaccacgaggccgtggaggcgctccggggggccggcactgccgtgcagatgcgagtgtggcgggagcgcatggtggagcctgagaacgcggtcaccatcacgccgctgcggcccgaggatgattacagcccccgagagcggcggggaggggggctgcgcctgcccctgctcccgcctgagagccccgggcccctccgtcagcgccacgtggcctgcctggcacgcagcgagagggggctgggcttcagcattgctggtgggaaaggctccacaccctacagggctggtgatgcgggcatcttcgtctcccgcattgccgagggcggtgctgctcaccgcgcgggcacactgcaggttggcgaccgcgtcctctctattaatggagtggacgtgactgaggccaggcatgaccacgccgtctccctgctgaccgctgcctcccccaccatcgccctgctgttggagcgggaggctgggggccctcttcctcccagccctctgccacattcctcaccccccaccgcatcctggcagtgaacgggcaagacgtgcgggatgccacgcaccaagaagcagtcagtgccctgctccggccctgcctggagctgtcgctgctggtgcggagggacccggcacccccgggcctacgggaactgtgcatccagaaggcacctggggagaggctgggcatcagcatccgcgggggtgccaggggccacgctggcaacccccgcgacccacagacgagggcatcttcatctccaaggtgagccccacgggggcagccgggcgcgacggtcggctgcgtgtgggtttgcggctgttggaggtgaaccagcagagcctgctgggcctgacgcacggcgaggcggtgcagctgctccgcagtgtgggcgacaccctcaccgtgctggtctgtgacggcttcgaggccagcaccgacgcagccctggaggtgtccccaggtgtcattgccaacccctttgcggcaggcatcggccaccggaacagcctggagagcatctcttccatcgaccgggagctgagccctgagggcccaggcaaggagaaggagctgcctggacagaccctgcactgggggcccgaggccacagaagccgcaggtcggggtctgcagcccctgaagctggactaccgcgccctggccgccgtgcccagcgctggcagcgtgcagagggtaccgtctggagcagctggagggaagatggctgaatctccctgctcccctagtggccagcagccgccctccccgccttctccggatgagctgcccgccaatgtgaagcaggcctacagggccttcgcggccgtgcccacttctcacccgcctgaggatgcccctgcccagccccccacgcctgggcctgcagcctccccggagcagctgtccttccgggagcggcagaagtactttgagctggaggtgcgcgtgccccaggccgagggcccccctaagcgcgtgtccctggtgggtgctgacgacctgcggaagatgcaggaggaggaagccagaaaactacagcagaagagagcgcagatgctgcgggaggcggcagaggctggggccgaagcgaggctcgccctggacggggagacgctgggcgaggaggaacaggaggatgagcagccaccctgggccagcccgagccccacctcaaggcagagcccggcgtcccccccgcccctgggaggtggcgccccggtgcggacggccaaagctgaacggcgccaccaggagcggctgcgcgtgcagagtccggagccaccggcacccgagcgtgccctgtcccctgccgagctccgggccctggaggccgagaagcgtgcgctgtggagggcagccaggatgaagtcattggaacaggacgctctccgagcacagatggtcctcagcaggtcccaggaaggccggggcacgcgggggcccctggagcgactggccgaggccccttcccctgcgcccaccccgtcgcccacccctgtggaagacctcggcccccagaccagcacctccccgggacgcctgtcaccggactttgctgaggagttgaggtccctggaaccatctcccagccctggcccgcaggaggaggatggagaagtggctctggtgcttctgggcaggccctcacccggcgctgtgggccctgaagatgtggcactgtgcagcagccgccgccccgtaaggcctgggcgccgtggcctgggccctgtgccctcctagaggagcaggcacctcccccagacttggggtgggggccctgccagctccagcaccacccttgccccaagtcttttaacctgggtgttagcattttaaagagaccccacaggagttctggcctgtgactaactaactgccccaccccagccgagacctcggcgagactgtaactagtgatgtttgtacaaccaaagactctattttgtggtttaaggagaataaagttgactacatttta

SEQ ID NO: 694158 - DNA, 3178 bp, Homo sapiens
  misc_feature (23)..(23): n is a, c, g, or t
  misc_feature (27)..(27): n is a, c, g, or t
gtacgcgctaggcggaccgcgangggnagaggccagcactgaggaggaggacaaggagggggccgtggtttctgcgccctctgtcaagggagtgtcgtttgaccaggccaataacctgctgatagagcctgctcgcattgaggaggaagagctgaccctcaccatcctgcggcagactgggggcctgggcatcagcattgcgggcggcaagggctccacaccctataagggggacgacgagggcatattcatctctcgggtgtccgaggaaggccctgcggcccgggctggagtccgtgtgggtgacaagctcctggaggtgaatggtgtggctctgcagggcgccgagcaccacgaggccgtggaggcgctccggggggccggcactgccgtgcagatgcgagtgtggcgggagcgcatggtggagcctgagaacgcggtcaccatcacgccgctgcggcccgaggatgattacagcccccgagagcggcggggaggggggctgcgcctgcccctgctcccgcctgagagccccgggcccctccgtcagcgccacgtggcctgcctggcacgcagcgagagggggctgggcttcagcattgctggtgggaaaggctccacaccctacagggctggtgatgcgggcatcttcgtctcccgcattgccgagggcggtgctgctcaccgcgcgggcacactgcaggttggcgaccgcgtcctctctattaatggagtggacgtgactgaggccaggcatgaccacgccgtctccctgctgaccgctgcctcccccaccatcgccctgctgttggagcgggaggctgggggccctcttcctcccagccctctgccacattcctcaccccccaccgctgctgttgccaccaccagcataaccactgccacccccggggtgcctgggttgccgagcctggcccccagcctgctggctgccgcgttggaagggccatacccagtggaggagatccgtctgccaagagctgggggccctctggggcttagtattgtcggaggctccgaccattccagccacccgtttggtgtccaggagcctggtgtgttcatctccaaggtgctcccgcggggcctggccgctcgcagcggcctgcgggttggggaccgcatcctggcagtgaacgggcaagacgtgcgggatgccacgcaccaagaagcagtcagtgccctgctccggccctgcctggagctgtcgctgctggtgcggagggacccggcacccccgggcctacgggaactgtgcatccagaaggcacctggggagaggctgggcatcagcatccgcgggggtgccaggggccacgctggcaacccccgcgacccacagacgagggcatcttcatctccaaggtgagccccacgggggcagccgggcgcgacggtcggctgcgtgtgggtttgcggctgttggaggtgaaccagcagagcctgctgggcctgacgcacggcgaggcggtgcagctgctccgcagtgtgggcgacaccctcaccgtgctggtctgtgacggcttcgaggccagcaccgacgcagccctggaggtgtccccaggtgtcattgccaacccctttgcggcaggcatcggccaccggaacagcctggagagcatctcttccatcgaccgggagctgagccctgagggcccaggcaaggagaaggagctgcctggacagaccctgcactgggggcccgaggccacagaagccgcaggtcggggtctgcagcccctgaagctggactaccgcgccctggccgccgtgcccagcgctggcagcgtgcagagggtaccgtctggagcagctggagggaagatggctgaatctccctgctcccctagtggccagcagccgccctccccgccttctccggatgagctgcccgccaatgtgaagcaggcctacagggccttcgcggccgtgcccacttctcacccgcctgaggatgcccctgcccagccccccacgcctgggcctgcagcctccccggagcagctgtccttccgggagcggcagaagtactttgagctggaggtgcgcgtgccccaggccgagggcccccctaagcgcgtgtccctggtgggtgctgacgacctgcggaagatgcaggaggaggaagccagaaaactacagcagaagagagcgcagatgctgcgggaggcggcagaggctggggccgaagcgaggctcgccctggacggggagacgctgggcgaggaggaacaggaggatgagcagccaccctgggccagcccgagccccacctcaaggcagagcccggcgtcccccccgcccctgggaggtggcgccccggtgcggacggccaaagctgaacggcgccaccaggagcggctgcgcgtgcagagtccggagccaccggcacccgagcgtgccctgtcccctgccgagctccgggccctggaggccgagaagcgtgcgctgtggagggcagccaggatgaagtcattggaacaggacgctctccgagcacagatggtcctcagcaggtcccaggaaggccggggcacgcgggggcccctggagcgactggccgaggccccttcccctgcgcccaccccgtcgcccacccctgtggaagacctcggcccccagaccagcacctccccgggacgcctgcccttgtctggaaagaagtttgactacagggcctttgcggccctgccttcttccagacctgtttatgacatccagtcaccggactttgctgaggagttgaggtccctggaaccatctcccagccctggcccgcaggaggaggatggagaagtggctctggtgcttctgggcaggccctcacccggcgctgtgggccctgaagatgtggcactgtgcagcagccgccgccccgtaaggcctgggcgccgtggcctgggccctgtgccctcctagaggagcaggcacctcccccagacttggggtgggggccctgccagctccagcaccacccttgccccaagtcttttaacctgggtgttagcattttaaagagaccccacaggagttctggcctgtgactaactaactgccccaccccagccgagacctcggcgagactgtaactagtgatgtttgtacaaccaaagactctattttgtggtttaaggagaataaagttgactacatttta

SEQ ID NO: 694159 - DNA, 234 bp, Homo sapiens
tgaaggctgaggctgcagtgagctgagattgcactactgcactccagcctgggcaacagagtgagatactatctaaaaaaaaaaaaaaaaaaaaaggaaaaaaaaaaaaaaaaaaaacccctttcctcacccttttaaggcccgtgttatctgccccttggtggctcatcgtcacattggcaaccaaaaacaacaattgccaaagccaattatccttgtgggacaattgccttt

SEQ ID NO: 694160 - DNA, 875 bp, Homo sapiens
actactccctagtgacagaggccgggaggtatcgggcctgactaagccgagtggcagcggagtgagcggagccttcagccccgcggctgggccgagcccgaaggtggctgtcggtgtcgtgggagcccggcggtgcacctggccgtcctccctggtgcctgcatctgctggtgtgttggttggaccaggggctctgtgtgcttcacacaatggctggtgcttctgctgtggctgagaaccatgcctgcgcatatgttgccttgaatgatgctctatgcctggtgcccatgcttgtggacctggcctgggttgcgttgccctgggagctgcccgggctgcgatgcgttgtgctgtggctggctgttgtgtctgcgggttgctgcatcccccattcaaaatgcactgggctgttgtggttgtgcctggactttggggatgtgctgcttgtggcacaggtggtgcttggttgggtgatggctgccccttgctttgtggttgggtgcctgtgcccttgctgtggttgttggccccattggaggccatggtttgtgccccctgtggctttgggttggatgcctggaacctcctggccctgtctggtggctggccctgccccttgctgtgtggccctggctggacatacggtcgtgtttggggctggtggaggccttggctttggttttccggactggatcccccttggggcctatggttggcacccctgggtgttgcccaacaacttgggccttaatgccaaccctggcttgttttgcctgggtgctgccttctttgtctccccacccgggggtggcttgtttccatgccggggggctttgggccttgttgtgaagtggccgggcctgctggcgccgttg

SEQ ID NO: 694161 - DNA, 2400 bp, Homo sapiens
gctccaagctgccccagcccgaggccgttgtggctctgctgcagggcatgcagcctgatggggagggccctgtggctcccgggggctggcacaatggcccccacgcaccctgggctcctcgggcccagaaggaggaggaggaggaggaagagggtagtcctcaggaggaggaggaagaggaggaggaggaaaacagggctgaagaggaagaggcctgggttgccgagcctggcccccagcctgctggctgccgcgttggaagggccatacccagtggaggagatccgtctgccaagagctgggggccctctggggcttagtattgtcggaggctccgaccattccagccacccgtttggtgtccaggagcctggtgtgttcatctccaaggtgctcccgcggggcctggccgctcgcagcggcctgcgggttggggaccgcatcctggcagtgaacgggcaagacgtgcgggatgccacgcaccaagaagcagtcagtgccctgctccggccctgcctggagctgtcgctgctggtgcggagggacccggcacccccgggcctacgggaactgtgcatccagaaggcacctggggagaggctgggcatcagcatccgcgggggtgccaggggccacgctggcaacccccgcgacccacagacgagggcatcttcatctccaaggtgagccccacgggggcagccgggcgcgacggtcggctgcgtgtgggtttgcggctgttggaggtgaaccagcagagcctgctgggcctgacgcacggcgaggcggtgcagctgctccgcagtgtgggcgacaccctcaccgtgctggtctgtgacggcttcgaggccagcaccgacgcagccctggaggtgtccccaggtgtcattgccaacccctttgcggcaggcatcggccaccggaacagcctggagagcatctcttccatcgaccgggagctgagccctgagggcccaggcaaggagaaggagctgcctggacagaccctgcactgggggcccgaggccacagaagccgcaggtcggggtctgcagcccctgaagctggactaccgcgccctggccgccgtgcccagcgctggcagcgtgcagagggtaccgtctggagcagctggagggaagatggctgaatctccctgctcccctagtggccagcagccgccctccccgccttctccggatgagctgcccgccaatgtgaagcaggcctacagggccttcgcggccgtgcccacttctcacccgcctgaggatgcccctgcccagccccccacgcctgggcctgcagcctccccggagcagctgtccttccgggagcggcagaagtactttgagctggaggtgcgcgtgccccaggccgagggcccccctaagcgcgtgtccctggtgggtgctgacgacctgcggaagatgcaggaggaggaagccagaaaactacagcagaagagagcgcagatgctgcgggaggcggcagaggctggggccgaagcgaggctcgccctggacggggagacgctgggcgaggaggaacaggaggatgagcagccaccctgggccagcccgagccccacctcaaggcagagcccggcgtcccccccgcccctgggaggtggcgccccggtgcggacggccaaagctgaacggcgccaccaggagcggctgcgcgtgcagagtccggagccaccggcacccgagcgtgccctgtcccctgccgagctccgggccctggaggccgagaagcgtgcgctgtggagggcagccaggatgaagtcattggaacaggacgctctccgagcacagatggtcctcagcaggtcccaggaaggccggggcacgcgggggcccctggagcgactggccgaggccccttcccctgcgcccaccccgtcgcccacccctgtggaagacctcggcccccagaccagcacctccccgggacgcctgtcaccggactttgctgaggagttgaggtccctggaaccatctcccagccctggcccgcaggaggaggatggagaagtggctctggtgcttctgggcaggccctcacccggcgctgtgggccctgaagatgtggcactgtgcagcagccgccgccccgtaaggcctgggcgccgtggcctgggccctgtgccctcctagaggagcaggcacctcccccagacttggggtgggggccctgccagctccagcaccacccttgccccaagtcttttaacctgggtgttagcattttaaagagaccccacaggagttctggcctgtgactaactaactgccccaccccagccgagacctcggcgagactgtaactagtgatgtttgtacaaccaaagactctattttgtggtttaaggagaataaagttgactacatttta

SEQ ID NO: 694162 - DNA, 285 bp, Homo sapiens
tgacttagtgtaacctaggagattttatagtttttttttaatgaaaccctgattgacgcccaccagtggggagaacagcgtttttttcctgtccccaaaaccaggaaaccccgtttgtaagggtgtgttgtggtgctttattgtacaccccccaggggggttttttttactttaatgtttttttggtttccccccccaaaaaaatcatgaatttgccccaaccctaatttttggttccttttttttttattgatggattttaaaatgaaaaattttataaggcca

SEQ ID NO: 694163 - DNA, 2326 bp, Homo sapiens
  misc_feature (23)..(23): n is a, c, g, or t
  misc_feature (27)..(27): n is a, c, g, or t
gtacgcgctaggcggaccgcgangggnagaggccagcactgaggaggaggacaaggagggggccgtggtttctgcgccctctgtcaagggagtgtcgtttgaccaggccaataacctgctgatagagcctgctcgcattgaggaggaagagctgaccctcaccagcctgctggctgccgcgttggaagggccatacccagtggaggagatccgtctgccaagagctgggggccctctggggcttagtattgtcggaggctccgaccattccagccacccgtttggtgtccaggagcctggtgtgttcatctccaaggtgctcccgcggggcctggccgctcgcagcggcctgcgggttggggaccgcatcctggcagtgaacgggcaagacgtgcgggatgccacgcaccaagaagcagtcagtgccctgctccggccctgcctggagctgtcgctgctggtgcggagggacccggcacccccgggcctacgggaactgtgcatccagaaggcacctggggagaggctgggcatcagcatccgcgggggtgccaggggccacgctggcaacccccgcgacccacagacgagggcatcttcatctccaaggtgagccccacgggggcagccgggcgcgacggtcggctgcgtgtgggtttgcggctgttggaggtgaaccagcagagcctgctgggcctgacgcacggcgaggcggtgcagctgctccgcagtgtgggcgacaccctcaccgtgctggtctgtgacggcttcgaggccagcaccgacgcagccctggaggtgtccccaggtgtcattgccaacccctttgcggcaggcatcggccaccggaacagcctggagagcatctcttccatcgaccgggagctgagccctgagggcccaggcaaggagaaggagctgcctggacagaccctgcactgggggcccgaggccacagaagccgcaggtcggggtctgcagcccctgaagctggactaccgcgccctggccgccgtgcccagcgctggcagcgtgcagagggtaccgtctggagcagctggagggaagatggctgaatctccctgctcccctagtggccagcagccgccctccccgccttctccggatgagctgcccgccaatgtgaagcaggcctacagggccttcgcggccgtgcccacttctcacccgcctgaggatgcccctgcccagccccccacgcctgggcctgcagcctccccggagcagctgtccttccgggagcggcagaagtactttgagctggaggtgcgcgtgccccaggccgagggcccccctaagcgcgtgtccctggtgggtgctgacgacctgcggaagatgcaggaggaggaagccagaaaactacagcagaagagagcgcagatgctgcgggaggcggcagaggctggggccgaagcgaggctcgccctggacggggagacgctgggcgaggaggaacaggaggatgagcagccaccctgggccagcccgagccccacctcaaggcagagcccggcgtcccccccgcccctgggaggtggcgccccggtgcggacggccaaagctgaacggcgccaccaggagcggctgcgcgtgcagagtccggagccaccggcacccgagcgtgccctgtcccctgccgagctccgggccctggaggccgagaagcgtgcgctgtggagggcagccaggatgaagtcattggaacaggacgctctccgagcacagatggtcctcagcaggtcccaggaaggccggggcacgcgggggcccctggagcgactggccgaggccccttcccctgcgcccaccccgtcgcccacccctgtggaagacctcggcccccagaccagcacctccccgggacgcctgtcaccggactttgctgaggagttgaggtccctggaaccatctcccagccctggcccgcaggaggaggatggagaagtggctctggtgcttctgggcaggccctcacccggcgctgtgggccctgaagatgtggcactgtgcagcagccgccgccccgtaaggcctgggcgccgtggcctgggccctgtgccctcctagaggagcaggcacctcccccagacttggggtgggggccctgccagctccagcaccacccttgccccaagtcttttaacctgggtgttagcattttaaagagaccccacaggagttctggcctgtgactaactaactgccccaccccagccgagacctcggcgagactgtaactagtgatgtttgtacaaccaaagactctattttgtggtttaaggagaataaagttgactacatttta

SEQ ID NO: 694164 - DNA, 382 bp, Homo sapiens
  misc_feature (55)..(55): n is a, c, g, or t
  misc_feature (82)..(82): n is a, c, g, or t
aggctgggtgcggtggctcacacctgtaatcctagcactttggaaggccggggtnggagggtctcttgagcccaggagtttnagaccagcctgggcaacatagtgaaatcccatactacaaaaaattagctggttgtagtggtgcacacctgtagtcccagctactcgggaggctgaagcaagaggaccgcttcagccggggaagtcaaggctgcagtgagccaagatcatgccactgcacttcagcctgagcaacaagagtgagaccctgtgccaaaaaaacccctcaaaaaaccatgttggggagggctgatcagattaggggagggaaggtctttgttgcagggaaaaaaaggcagtttttaaggcctcactggttttc

SEQ ID NO: 694165 - DNA, 879 bp, Homo sapiens
  misc_feature (871)..(871): n is a, c, g, or t
ttgtgctctatcccccgtcgtgccccgtattgacgttccatctcgaacactttgcaattaaaggtagattctcgtgtaccgttatttccgaggggtgtccgatgatcgcgtcgcgccagcattttagccgggcgttaacctgcagacatgtggagaagttgcaatagatgatacgttgtatatccaaatatatcagagcacgaatgatagctagactatatcttgccatggcagatgcgtacctcagcccacactgtctcgtagtcatcgtttatcacatagtgtgattgactggtgtgactggattcattggtttggacatcatagctagcatagtgcaattatgataatggggactgacccttatcacctctgtgcacttgggcatatatccggtactctggagatattccgagatgctgggagcttgtaaatagaccatggtggctgcatgctctgtgggacctaggtgcaagtacaaatgaggctttgtacatagctcttacagtgcagcagcaacccacagacatctgtatcatcaagctttccctacaccaaagtcggaatctactgaacaatcagaaaagaaaaaaatgtaagtgcaaatttgagaggaatagcaggtgcatgaccaattgtcaattaaatattcagttttatgtctccatgcaaacattcaaagtgcttcacatcagaagcggagtaaaatacgtgaaacacctgtgaagatctgcaaactggattagggtcttttacttcagtgtttaaataagcagaagtatgtatgcatggttatactattttgttaacatgtacaatttccgtgagtgtttcttcagaaatgcgttgttataaagtattgtctatttangtaccccg

SEQ ID NO: 694166 - DNA, 422 bp, Homo sapiens
  misc_feature (40)..(40): n is a, c, g, or t
  misc_feature (124)..(124): n is a, c, g, or t
  misc_feature (169)..(169): n is a, c, g, or t
tcccaccctttttttaaactatgccctccggttttttggnaccgtgtttggtgaaggggcccttttaaacacctggtacctcaagaatgccttttccgattggtgcctagtcccttccagattngttcccctttttaaatttgaaattagcccagatgtggtggcttanacctgtaatcccagcattttgggaggctgaggtaggcagatcgcttgaactgaggagttaagagaccagcttgggcaacatggtgaaacctcgtctctacaaaaaatacagaaattagccaagtgtcgtggtccacccctgtagtcccagctgctcaggaggctgaggcgggaggatcgcttgcacctgggaggtcaggactgcagtgagccatgtcctcaccactgtaatccagcctgagttacagagtgag

SEQ ID NO: 694167 - DNA, 3575 bp, Homo sapiens
  misc_feature (23)..(23): n is a, c, g, or t
  misc_feature (27)..(27): n is a, c, g, or t
gtacgcgctaggcggaccgcgangggnagaggccagcactgaggaggaggacaaggagggggccgtggtttctgcgccctctgtcaagggagtgtcgtttgaccaggccaataacctgctgatagagcctgctcgcattgaggaggaagagctgaccctcaccatcctgcggcagactgggggcctgggcatcagcattgcgggcggcaagggctccacaccctataagggggacgacgagggcatattcatctctcgggtgtccgaggaaggccctgcggcccgggctggagtccgtgtgggtgacaagctcctggaggtgaatggtgtggctctgcagggcgccgagcaccacgaggccgtggaggcgctccggggggccggcactgccgtgcagatgcgagtgtggcgggagcgcatggtggagcctgagaacgcggtcaccatcacgccgctgcggcccgaggatgattacagcccccgagagcggcggggaggggggctgcgcctgcccctgctcccgcctgagagccccgggcccctccgtcagcgccacgtggcctgcctggcacgcagcgagagggggctgggcttcagcattgctggtgggaaaggctccacaccctacagggctggtgatgcgggcatcttcgtctcccgcattgccgagggcggtgctgctcaccgcgcgggcacactgcaggttggcgaccgcgtcctctctattaatggagtggacgtgactgaggccaggcatgaccacgccgtctccctgctgaccgctgcctcccccaccatcgccctgctgttggagcgggaggctgggggccctcttcctcccagccctctgccacattcctcaccccccaccgctgctgttgccaccaccagcataaccactgccacccccggggtgcctgggttgccgagcctggcccccagcctgctggctgccgcgttggaagggccatacccagtggaggagatccgtctgccaagagctgggggccctctggggcttagtattgtcggaggctccgaccattccagccacccgtttggtgtccaggagcctggtgtgttcatctccaaggtgctcccgcggggcctggccgctcgcagcggcctgcgggttggggaccgcatcctggcagtgaacgggcaagacgtgcgggatgccacgcaccaagaagcagtcagtgccctgctccggccctgcctggagctgtcgctgctggtgcggagggacccggcacccccgggcctacgggaactgtgcatccagaaggcacctggggagaggctgggcatcagcatccgcgggggtgccaggggccacgctggcaacccccgcgacccacagacgagggcatcttcatctccaaggtgagccccacgggggcagccgggcgcgacggtcggctgcgtgtgggtttgcggctgttggaggtgaaccagcagagcctgctgggcctgacgcacggcgaggcggtgcagctgctccgcagtgtgggcgacaccctcaccgtgctggtctgtgacggcttcgaggccagcaccgacgcagccctggaggtgtccccaggtgtcattgccaacccctttgcggcaggcatcggccaccggaacagcctggagagcatctcttccatcgaccgggagctgagccctgagggcccaggcaaggagaaggagctgcctggacagaccctgcactgggggcccgaggccacagaagccgcaggtcggggtctgcagcccctgaagctggactaccgcgccctggccgccgtgcccagcgctggcagcgtgcagagggtaccgtctggagcagctggagggaagatggctgaatctccctgctcccctagtggccagcagccgccctccccgccttctccggatgagctgcccgccaatgtgaagcaggcctacagggccttcgcggccgtgcccacttctcacccgcctgaggatgcccctgcccagccccccacgcctgggcctgcagcctccccggagcagctgtccttccgggagcggcagaagtactttgagctggaggtgcgcgtgccccaggccgagggcccccctaagcgcgtgtccctggtgggtgctgacgacctgcggaagatgcaggaggaggaagccagaaaactacagcagaagagagcgcagatgctgcgggaggcggcagaggctggggccgaagcgaggctcgccctggacggggagacgctgggcgaggaggaacaggaggatgagcagccaccctgggccagcccgagccccacctcaaggcagagcccggcgtcccccccgcccctgggaggtggcgccccggtgcggacggccaaagctgaacggcgccaccaggagcggctgcgcgtgcagagtccggagccaccggcacccgagcgtgccctgtcccctgccgagctccgggccctggaggccgagaagcgtgcgctgtggagggcagccaggatgaagtcattggaacaggacgctctccgagcacagatggtcctcagcaggtcccaggaaggccggggcacgcgggggcccctggagcgactggccgaggccccttcccctgcgcccaccccgtcgcccacccctgtggaagacctcggcccccagaccagcacctccccgggacgcctgtcaccggactttgctgaggagttgaggtccctggaaccatctcccagccctggcccgcaggaggaggatggagaagtggctctggtgcttctgggcaggccctcacccggcgctgtgggccctgaagatgtggcactgtgcagcagccgccgccccgtaaggcctgggcgccgtggcctgggccctgtgccctcctagaggagcaggcacctcccccagacttggggtgggggccctgccagctccagcaccacccttgccccaagtcttttaacctgggtgttagcattttaaagagaccccacaggagttctggcctgtgactaactaactgccccaccccagccgagacctcggcgagactgtaactagtgatgtttgtacaaccaaagactctattttgtggtttaaggagaataaagttgactacattttacctcccgtctgcctgtccatcccccacccactagcacagacccttcctgccttccacaccgctcagcctcggcctccttgtgcctctgggcctcctgggcccggcgctgctgctcagcctccatgttctggagcatggcctccgtgaggctcaggtcccacgagcgcagcacgctcaccactgtgtccagtgaggccacctagtgacagacgacatttgtcgggccctcagtgcgtgttccgagtctcctcagcctggagaggaactgttgctctcccatctgggagaaagggtgccattatgcagaaagggcctcagtgctcacagctggtgcgtggtgggccccaaagcatgagcccctgtggggctgctgtccccaaagcccaggccacccaggccgctgggaattctcctgggctccctgaccaagtccaagcaggaacctgctcctgtggctgggcctccaagggct

SEQ ID NO: 694168 - DNA, 499 bp, Homo sapiens
  misc_feature (420)..(420): n is a, c, g, or t
acagtggaggtgggtgtgttttagctggcctcctgtagagtcagcctttaaactgctgtgaactttgtcatgacttgaagatagacaaaaactctctaaagacatgtgtttgtgctcacttcggcagcacctatactaaaattggaaggatacagagaagattagccatgccccctgctcaaggatgacacgcaaattcgtgaagtgttcgtatttttttttaaaaaagacatatgtttgttttccccattacagaatgtgtgagcttagtttatcttcttttgtatttagtcataaactctgaagctggcagctacgaccttaggatcaggaaggtgcatttcacctggtagaattaagtgttgctgattatgggaagcagaaggtaagtaatggaaaaacgttttgcctggggtgggnttctattttagaaaaaagaagatgatcattcttgaaccattagttttatttttgctattttcttttaactatcctgatg

SEQ ID NO: 694169 - DNA, 3364 bp, Homo sapiens
  misc_feature (23)..(23): n is a, c, g, or t
  misc_feature (27)..(27): n is a, c, g, or t
gtacgcgctaggcggaccgcgangggnagaggccagcactgaggaggaggacaaggagggggccgtggtttctgcgccctctgtcaagggagtgtcgtttgaccaggccaataacctgctgatagagcctgctcgcattgaggaggaagagctgaccctcaccatcctgcggcagactgggggcctgggcatcagcattgcgggcggcaagggctccacaccctataagggggacgacgagggcatattcatctctcgggtgtccgaggaaggccctgcggcccgggctggagtccgtgtgggtgacaagctcctggaggtgaatggtgtggctctgcagggcgccgagcaccacgaggccgtggaggcgctccggggggccggcactgccgtgcagatgcgagtgtggcgggagcgcatggtggagcctgagaacgcggtcaccatcacgccgctgcggcccgaggatgattacagcccccgagagcggcggggaggggggctgcgcctgcccctgctcccgcctgagagccccgggcccctccgtcagcgccacgtggcctgcctggcacgcagcgagagggggctgggcttcagcattgctggtgggaaaggctccacaccctacagggctggtgatgcgggcatcttcgtctcccgcattgccgagggcggtgctgctcaccgcgcgggcacactgcaggttggcgaccgcgtcctctctattaatggagtggacgtgactgaggccaggcatgaccacgccgtctccctgctgaccgctgcctcccccaccatcgccctgctgttggagcgggaggctgggggccctcttcctcccagccctctgccacattcctcaccccccaccgctgctgttgccaccaccagcataaccactgccacccccggggtgcctgggttgccgagcctggcccccagcctgctggctgccgcgttggaagggccatacccagtggaggagatccgtctgccaagagctgggggccctctggggcttagtattgtcggaggctccgaccattccagccacccgtttggtgtccaggagcctggtgtgttcatctccaaggtgctcccgcggggcctggccgctcgcagcggcctgcgggttggggaccgcatcctggcagtgaacgggcaagacgtgcgggatgccacgcaccaagaagcagtcagtgccctgctccggccctgcctggagctgtcgctgctggtgcggagggacccggcacccccgggcctacgggaactgtgcatccagaaggcacctggggagaggctgggcatcagcatccgcgggggtgccaggggccacgctggcaacccccgcgacccacagacgagggcatcttcatctccaaggtgagccccacgggggcagccgggcgcgacggtcggctgcgtgtgggtttgcggctgttggaggtgaaccagcagagcctgctgggcctgacgcacggcgaggcggtgcagctgctccgcagtgtgggcgacaccctcaccgtgctggtctgtgacggcttcgaggccagcaccgacgcagccctggaggtgtccccaggtgtcattgccaacccctttgcggcaggcatcggccaccggaacagcctggagagcatctcttccatcgaccgggagctgagccctgagggcccaggcaaggagaaggagctgcctggacagaccctgcactgggggcccgaggccacagaagccgcaggtcggggtctgcagcccctgaagctggactaccgcgccctggccgccgtgcccagcgctggcagcgtgcagagggtaccgtctggagcagctggagggaagatggctgaatctccctgctcccctagtggccagcagccgccctccccgccttctccggatgagctgcccgccaatgtgaagcaggcctacagggccttcgcggccgtgcccacttctcacccgcctgaggatgcccctgcccaggtccagctccaccccagaaccccacacgcccatgggcactgacagactccaccgggagcagcatgtcacttcacgaggcagcggcagaaagtacatatatgacgatggaggtgctgcagtgccaccagggacaggcaggagaaccacgacataagacgcgtagtaccctggatggcgtgcatgaccgaaccaatgccggagcgcactgccaggaacggacggcacagccacgacaagccctaacagacacgaaaagaagacgcgcaggacatgcctgccggagcaggcgcaggcaacaagagcctgcgggcccgcacaccgccgagggcatccagcaccatggcacccggggacagcaaagacaggaggcagacgggacggcaacacacagcgacggactcgaagcaagacacaagaacagagggaaccacgagccgcggacgacggccaaaacaatgacagagacaaccaagcgacagcaggacggaaaaaacaacaaccggagacaccagcgagcagaagcaacatgagacggccccacacgagcagaaccgcgaaacgagaaacgacacacacacccggacacgcgacagaacaccacacgaccgacacacgaacccatgaaacaaacgacacgaagaaaccaagcacccggaaacaacacggagacaagagccggcgcagccacagaggcaacagacgcccaacaacgagccgaggaaagagacagagagagaaaaaaagcaagagagcaacgagcacacaagcggaagacaggaacgaaagaccacacaagacagagacaaaagagcaagaggagagagcagaaggccaaggaaaggagacgacagaaacagcaaaaacagagaacacacagagaaacaggaagaaaacaagaaagcaaaaggacaccacacgagagagaggaaccgggacagcaacgagaaggaggaaccacagaaaggggaacagggcgaccagaacgaccaatacggcgaagacagccagacacaagaaaagagacagagaacaagcagcgacaaaggacaacgaaagaccaacagagacagcaacaaagcaacgcaggaccaagagagaaaaccaggaaacagacaacagcagagagagacagcagccggagagacagagagagcgcgaaaagaaagagcgaaggagcagggacagagagaggacagaggaacaagcgagccgggacaaagcgaacagagaacagagagaaagaggcagaaagagaaaagaaaggacagaagagacggccgagagacagcaaaacaacaacgagagaaaaaaccaggagaaaagcacaggaggaacaagacagcaagaggcaagaagacaaaacacaacaaaagag

SEQ ID NO: 694170 - DNA, 395 bp, Homo sapiens
gccatgtacctgggatagaataaagtgctcgattaatattagatgcaccgtaattatgatcctgtttattactctctacgattaactcctgagttctagctcttcctctcatcttgctataggatcttaagaatgttgcttctcgtcttccctgctccctgttctcagaccatcaaatgagaggtttgatgagatgatctctaaagtctcctttagctctacggtattagcagtcactgatctttttttctttctttttttttgaggtggggtctcactctctcacccaggctggagtgcagtggtgcaatcttggctcactgcaatctcttcctccctggctcaaatgatcttccccagtagctgggaagatcatttgaggtaatccgtgaggg

SEQ ID NO: 694171 - DNA, 120 bp, Homo sapiens
atttttgggggggccccccccattaaaaaaccccccctcttggggggttttttaaaaaaccccaaccccccaaaaagtttgccaagaaaagatttttttaattgttaacctttaagggga

SEQ ID NO: 694172 - DNA, 227 bp, Homo sapiens
  misc_feature (195)..(195): n is a, c, g, or t
gagaccgtgacgtagcacaggaaatagaaagacatataaaaaagcatccgatgaactatgtagacttatataaccccaaacggcaccgccaatgtattggtttagataaatgctaagtaatgataccaaatcgatagggttacttggaatagaggtaataggagactcggaggtatcccttctcagagtgtgtgnggtttatgtagccgactgaagttcatgagagt

SEQ ID NO: 694173 - DNA, 144 bp, Homo sapiens
ccttcgacttggcgggcacttagaggtggggagcagagaattctctatccaacatcaacatcttggtccagatatgaactcttcaatctctgcactcaaagctgttaagatagttaagcgtgcataagttgcccgccaatcgaa

SEQ ID NO: 694174 - DNA, 536 bp, Homo sapiens
tgcttatagccagcaaaaatggtctttgatagcagccttctagacatatttgcctttaagagtcctgttcctggcaggcctccacaggctccaagatagtggaacaagagaggaaacaaatctttaattatagcttctatttcttcactgtaaccactacttatttctgtactcctcagtcattcaaaattagaactcaggattaagaaactcacttgaaactgcacaactatttgggaatggaacaacttgctcctgaatgactactgcgtaaataatgaaatgaaggcagaaataaggatgttatttgaaactagtgaggacaaagacacaatgtaccagaatctgtgggaaacatataacatggtgtgtagagggaaatttatagcactaaatgcccacaagggaaagcaggaaagatctaaaatcgacaccctaacatcagaattaaaagaactagagaagcaagaacaaattcaaaagctagcagaaggcaagaaataactaagatccaagcagaattgaaagagatccag

SEQ ID NO: 694175 - DNA, 115 bp, Homo sapiens
ggctcccccgagttatcagacgggtgcacgatatcgaggtttctacgacagatgtcgtagatggcctcattgtctatcatgaacagcacaaatcagagtgctcccacggctggtg

SEQ ID NO: 694176 - DNA, 413 bp, Homo sapiens
  misc_feature (2)..(2): n is a, c, g, or t
  misc_feature (404)..(404): n is a, c, g, or t
  misc_feature (408)..(410): n is a, c, g, or t
anggacctttccctccatataaatttcctttttttaataatccatcccttacccaaaaatacatccttttatagccctcaacttttttccaccatatcctctttcccccctactaaagtaattccctgatgcccctcaaaagtgaaaaaggcccaagtaatgtgattcaaaacagaacagagccttagattttgagaggggtctgtctgcttacacttcttggggttttatgaggaaaacagagtttctcccaaaacagggtctgtggagccttctctctttttcccaaggagtccccagctgtcagaaagtaccttatgtcctctcatgtgggcattcagagtggcaggaagacagactggggaaataattcagttgactgagaagaaagacaaacaaaaaantaannntcg

SEQ ID NO: 694177 - DNA, 432 bp, Homo sapiens
  misc_feature (70)..(70): n is a, c, g, or t
  misc_feature (73)..(73): n is a, c, g, or t
  misc_feature (98)..(99): n is a, c, g, or t
  misc_feature (102)..(102): n is a, c, g, or t
  misc_feature (108)..(108): n is a, c, g, or t
  misc_feature (127)..(127): n is a, c, g, or t
  misc_feature (130)..(130): n is a, c, g, or t
  misc_feature (138)..(138): n is a, c, g, or t
  misc_feature (143)..(143): n is a, c, g, or t
  misc_feature (330)..(330): n is a, c, g, or t
cctcttcccaagcttaccgacccgcggctgctctacatctgctttttgggctactgccgcggcctgattnatnactgatcgccggaggccgatcgcgnnggntggttngcatcgccagcttctatanatnacggcctnttttnttgctggatattatcttgtaaaacgtgaagactacctgtatgctgtgagggaccgtgaaatgtttggatatatgaaattacatccagaggattttcctgaagaagataagaaaacatatggtgaaatttttgaaaaattccatccaatacgttgaagtcttcaaaatgcttgctccagtttcactgntacctgctgtttctgaatttgatggaacatgtttcttatgacacttgaagcttacgctaatctgtatgttgacaccttgtaattaaaatacgtaccatgaga

SEQ ID NO: 694178 - DNA, 123 bp, Homo sapiens
tgaagactgcggagatctcggggtgagccttcgtacagcagatccagtattttttggcgcccaatgagccagtagctcgggggtgatcttgagctcccaggagttctcaggtactcctcagct

SEQ ID NO: 694179 - DNA, 202 bp, Homo sapiens
gatcacatacgaggggagatcacatcacggataaaatggagatcttccgcctcacacacagagtcggtggctggcatctggctctttggtcattggtgctgggaatgtgcagagaccattacagattaactttttggaaaaagggtctcattctgtcacccaggctgaagtgcagtagtgcaattacaggtcactgcagcct

SEQ ID NO: 694180 - DNA, 275 bp, Homo sapiens
agaggatctccgtgactggcattaggcttataacaaacttcctttaaaaataggtcttggtcaggcgctgtggtcacacttgtatcccagcactctgggaggcctaggcgggtgggtcacgaggtcaagaaatcgagaccatcctggctaacgtggtgaaacctcgtctctactgaaaatacaaaaaaaaaattagccagggggtgttggcaggcgcctgtagtcccagctgctcgggaggctgaggcaagaagaatagcttgaaccgtgggagg

SEQ ID NO: 694181 - DNA, 129 bp, Homo sapiens
tcagctcggtaccagctcgccatgaagtttactcatctctgccgagcaggacaacgtgctgtggagaggctagaagtagaaaaggcccatgtttaccatctagtggaaattgttttgaggaggaaatga

SEQ ID NO: 694182 - DNA, 210 bp, Homo sapiens
ctgctacccgtagtctccactttctcactgcttaggagacagatcactcctggaggctggggatggtaggatggctggggattttttttttttaaacagggtctcactctgtggcccaggctagagtgcaagggtgcaatcacagctcacggcagcctcaacctctggggttcaagcaatcctcctacctcagcctccggggtagctagc

SEQ ID NO: 694183 - DNA, 837 bp, Homo sapiens
gagcctgcttgtggacagagcaggggttggcagtggtgacgactgtttgggaaaggaaatgtaagggcatttcggctgctgtgctggggctgacgaggagcacacaggagagatgcccctcccatctcccagagtgggttggctggagttcattgcggagcatgaggacgtgtgggggacaatattatcttattcttgagaggtgtaaagagctcggccttaaagaatctcaacttttgacccgagtgacctccaggatacatccaacagagtaacagtcaagtattagttaccatttactggctgggaaaagcagcaaacagctgcacatcctacagcggaacgacactaaacctgaaggagtttgaaggattgtggctcagatgcgaaaggacactgatgacattgaaagtcctaaacgcagtatccgagacagtggctacatcgactgctgggattccgagcgcagcgactccctctctcctcctcgccacggcagagatgattccttcgacagcctggattcctttggctctcgctctcggcagacgccttcaccagatgtagtcctcaggggaagcagcgatgggagaggaagcgactctgaatccgacttgcctcatcggaagctgccagatgtgaagaaggatgacatgtctgcacggcggacttcccatggtgagccgaaatcagcagtgccttttaaccagtacctcccgaacaaaagcaatcagacggcctacgtccccgcgcctctgagaaagaagaaagcagagaagagaggataccgcaagagctggagtacgcacctccccggtgggtggggagaggccttca

SEQ ID NO: 694184 - DNA, 515 bp, Homo sapiens
gcaagttcatgacttgttgaaaaactacgggaaccagacagcgtggcagcatcaagacggacatacacatcaaggaaacaggacggccaacatggtgaaaccctgtctctactaaatataaaaaattaggcaggcatgaattttttgacaggtgctgaggtgattcaacatcgaggaggatcatcttttcacctaatagttctgaacaactggacagccacgtctaaaagaacgaagcccaaacactttctcatactacatacaaatattaactcaggatggattatagacctaaatgtgaggactaaaactatgaaactttttagaagaaagcactggaaattttttttttttggtcttttggtgagacaggatctcccactgttgcccaggttgtagtacaggggtgtgatctcagctcactgcagcctcaaccttccaggctcaagcaatcctcccatttcagcctcccaagtagctgggattacaggcatgcaccaccacacctggaaatt

SEQ ID NO: 694185 - DNA, 684 bp, Homo sapiens
tttttttttaacttttgcctcagaaagacagctccctttcagagcaggaatttcccttcaaggtagcaggagatgaacgcgtgctgctccaggattttacagaactgattctgcagcaaagacaaatgttgcctgtatttgccagatagtataaacaggagcaaaagttgcacagctaaaccaggggctcattcccaggacagacatgcagttatggattccgaaagacaagtcaaaaggacactgatgacattgaaagtcctaaacgcagtatccgagacagtggctacatcgactgctgggattccgagcgcagcgactccctctctcctcctcgccacggcagagatgattccttcgacagcctggattcctttggctctcgctctcggcagacgccttcaccagatgtagtcctcaggggaagcagcgatgggagaggaagcgactctgaatccgacttgcctcatcggaagctgccagatgtgaagaaggatgacatgtctgcacggcggacttcccatggtgagccgaaatcagcagtgccttttaaccagtacctcccgaacaaaagcaatcagacggcctacgtccccgcgcctctgagaaagaagaaagcagagaagagaggataccgcaagagctggagtacgcacctccccggtgggtggggagaggccttca

SEQ ID NO: 694186 - DNA, 278 bp, Homo sapiens
gcctggcgcaagtccagaaatatttaacaggtttatttatttttattataaagtggaaccgctgaaacttgtgggctgaaacatcctaacttgcattaatcctttacgtctccgcatttatattaaaaattcacacacaaatgaaaatggaaaaactgccaatacctgatttctgtcccctatttttccactcgcaatcatatacttaggtaccttttgaccccatggaaaaaaaatattctaacgttcagaactaccaataacagtatgaagagaaa

SEQ ID NO: 694187 - DNA, 611 bp, Homo sapiens
tttttttttaacttttgcctcagaaagacagctccctttcagagcaggaatttcccttcaaggtagcaggagatgaacgcgtgctgctccaggattttacagaactgattctgcagcaaagacaaatgttgcctgtatttgccagatagtataaacaggagcaaaggacactgatgacattgaaagtcctaaacgcagtatccgagacagtggctacatcgactgctgggattccgagcgcagcgactccctctctcctcctcgccacggcagagatgattccttcgacagcctggattcctttggctctcgctctcggcagacgccttcaccagatgtagtcctcaggggaagcagcgatgggagaggaagcgactctgaatccgacttgcctcatcggaagctgccagatgtgaagaaggatgacatgtctgcacggcggacttcccatggtgagccgaaatcagcagtgccttttaaccagtacctcccgaacaaaagcaatcagacggcctacgtccccgcgcctctgagaaagaagaaagcagagaagagaggataccgcaagagctggagtacgcacctccccggtgggtggggagaggccttca

SEQ ID NO: 694188 - DNA, 488 bp, Homo sapiens
acccggggagggcatagacagtggatgtagaaggcgctgggggccagagaagaagagagacggaccgcgaggagaggcagatgtaccccacattttaccagtgaactggtccccgcgtgctcaaaaggtggcccttccaggccgttggtaataatagtacttgagctcaccgttatttttcgagggacatatttctttttgcttttacacataagcaaacagatgttcagagacgctaagtaacgtagcaaggtcacatgcgttaataactgttttgcaagagccaaattttacaaccacatcctaagcatggaccatcacgccacgtttccttccacacgttttacccgccgatgatactgacttatgatcactactgatgagaactattcattcagttaccaaatttttgctgagtgtggtacacattctggacatgggactaggcattggggtaccatggtgagcttaaacatggagaatagact

SEQ ID NO: 694189 - DNA, 427 bp, Homo sapiens
tttttttttaacttttgcctcagaaagacagctccctttcagagcaggaatttcccttcaaggtagcaggagatgaacgcgtgctgctccaggattttacagaactgattctgcagcaaagacaaatgttgcctgtatttgccagatagtataaacaggagcaaaagttgcacagctaaaccaggggctcattcccaggacagacatgcagttatggattccgaaagacaagtcaaggttaaggttttggtttttcgtttttgttttgaactatcattgtactgttgtgaatccaaactttgtgatcctttcttctaattctttctctactcttttttttttaaacctagggaatatgagttatttggggattttttttaaaaaaaacgttgtgcatgattttctgattgggaaagttgcagcaaag

SEQ ID NO: 694190 - DNA, 1089 bp, Homo sapiens
  misc_feature (1)..(1): n is a, c, g, or t
  misc_feature (159)..(159): n is a, c, g, or t
ncttgacggcgtgcgcggggcgaggcggctggacgtggctggagcttgtcgttgtgctcgctgtgttcggttccctgggtgtgggcgcggggtgttgttctgtgtcgcggcgcgttcttgtcggggtgttgcgctccgccggggggggtcgtggggcgnagtcccgcggttgcggctcgcgtcgaggctggagcggtttgtcggagcgggggcccgttgcggggtgttcccggggggagcgccgggggggctgtggggctcacagggttgtgccagggcgtgtccattcttgttgccgagttgtttttcacccctggaggcaggccagattgcgggcatttccgtgtggtttctgggcgagagcagtcgccaggttgagccctgtgcggctgcggcgtgtacgtggccgataccggacactccccccgtacgggctggccagcacaccccagggggcccctggtccgagggaatgtgtacatccacccgcctcccaggtggccccctcggctgtgctggcccccacgtttccatcgggaagggggtgaccctgggtgagggtgttcggctccgggagagcatctgtcctccctggagcccctttgcaggggcacacgtgtgttctgcatagcatcgtgggctgggggagccccgtgggaccctgggcccgcgtggagggtaccccccgtgagcccttaccccctcgatccccgagcccgcactggaccgtgagagcctttttcaggacgggaagctgctgcctgctatccccctcctgggctgccgagtccggatccctgccgaggtgctcatcctgaaactcgattgttctgccacacccaggaggctgagccgaagcttcaccaacccgatcactcctttgagtagggctgccacgaaggcccccagctcctacccacctccccttgaggctgctgcctgcttggccagcctctgtccagaaaggaaccagagaaagccacggctggatcgtcacaatgccggggagccaatgtggatggcctggggaactcctgggttttttccctcccgactccctaattaaccccgtgaaccttggagcccaga

SEQ ID NO: 694191 - DNA, 1015 bp, Homo sapiens
  misc_feature (154)..(154): n is a, c, g, or t
  misc_feature (160)..(160): n is a, c, g, or t
  misc_feature (164)..(164): n is a, c, g, or t
  misc_feature (167)..(167): n is a, c, g, or t
  misc_feature (175)..(181): n is a, c, g, or t
  misc_feature (183)..(183): n is a, c, g, or t
agagaataaatgcgaaggccaatctccacgaaataataatgtaattccattcaagacaagaggtgaagaacagatattgcctctgcattttaactcctcccagtgccataaaatgacaacttggtaaatgttgatgtgagtgtgaatcttttanggactncaanacngaaggagnnnnnnnangcaagtaactggcagaagtttggtgataaagattttcggacaggtttagaaaatggaatcctcctctgcgagttgctgaatgctataaagccaggacttgttaaaaagatcaatagattgcctacccccattgcaggactggacaatattatcttattcttgagaggtgtaaagagctcggccttaaagaatctcaacttttgacccgagtgacctccaggatacatccaacagagtaacagtcaagagccttgattatagtaggaagctgaaaaatgtattagttaccatttactggctgggaaaagcagcaaacagctgcacatcctacagcggaacgacactaaacctgaaggagtttgaaggattgtggctcagatgcgaaaggacactgatgacattgaaagtcctaaacgcagtatccgagacagtggctacatcgactgctgggattccgagcgcagcgactccctctctcctcctcgccacggcagagatgattccttcgacagcctggattcctttggctctcgctctcggcagacgccttcaccagatgtagtcctcaggggaagcagcgatgggagaggaagcgactctgaatccgacttgcctcatcggaagctgccagatgtgaagaaggatgacatgtctgcacggcggacttcccatggtgagccgaaatcagcagtgccttttaaccagtacctcccgaacaaaagcaatcagacggcctacgtccccgcgcctctgagaaagaagaaagcagagaagagaggataccgcaagagctggagtacgcacctccccggtgggtggggagaggccttca

SEQ ID NO: 694192 - DNA, 273 bp, Homo sapiens
acacacacacacacacacacacacacacacacaaatatacatatatatcaaatatatatgtatatttgatagagatgatagcaattatgtgtgtgtgtgtgtgtgtgtgtgtgtgtgtgtgtgttagccaagtgtggtttctcatgcctgtagtcccagctactttggaggctgaagtgtaagagttgcttgagcccatgagttagaggctgctgtgagctatgatcatgcccctgcactccagcctgggcaacagagcaaaaccccatctct

SEQ ID NO: 694193 - DNA, 103 bp, Homo sapiens
ttcactgatctagaggacccttctacagcacttcaggtagggtctcaggtgcaagggatctgcagagggagtgagggcaggctcattgcaacacggtctctca

SEQ ID NO: 694194 - DNA, 656 bp, Homo sapiens
  misc_feature (52)..(52): n is a, c, g, or t
  misc_feature (239)..(239): n is a, c, g, or t
  misc_feature (307)..(307): n is a, c, g, or t
gctaaaacactagatttaacatcaggatatagtgcaatccatacagcctgtnatgtgtggatttacgtacaaatttctacttaagacttaatatttattatcacttctacatttaaggatgcggagggtatacgagctacggacgtgaacatataaatacgtttatactggatattactacacttaaaacataatatacttttactaagtacgtattcataacatgtaaaccttccatncctgtgacagatcagcttactggaataggtgttatgtgttagaacctaaatgaacctatgatcgtttnctgtaggctttccatgatttccacatgtgtcacagcctttaacctgtgaagtagacattctgaatatactaaaaaccatcaaactgtttactttaaatgagtgcattgacgagtatgtgaattatgtctcaatagcactgttaaaaaatatagacatcagggctgggtgcgggtggtcagcctgtggtctctgtctttgggaggccaaggcaggtggatcactctgttgcccaggatgaagggcagtgcaatgtctcggtcaccgaacctctgcctcccgagtaagctgggaatacaggcgtgcaccatcagcccagctaatcctgtggattagagaaacacggttcac

SEQ ID NO: 694195 - DNA, 973 bp, Homo sapiens
  misc_feature (154)..(154): n is a, c, g, or t
  misc_feature (160)..(160): n is a, c, g, or t
  misc_feature (164)..(164): n is a, c, g, or t
  misc_feature (167)..(167): n is a, c, g, or t
  misc_feature (175)..(181): n is a, c, g, or t
  misc_feature (183)..(183): n is a, c, g, or t
agagaataaatgcgaaggccaatctccacgaaataataatgtaattccattcaagacaagaggtgaagaacagatattgcctctgcattttaactcctcccagtgccataaaatgacaacttggtaaatgttgatgtgagtgtgaatcttttanggactncaanacngaaggagnnnnnnnangcaagtaactggcagaagtttggtgataaagattttcggacaggtttagaaaatggaatcctcctctgcgagttgctgaatgctataaagccaggacttgttaaaaagatcaatagattgcctacccccattgcaggactggacaatattatcttattcttgagaggtgtaaagagctcggccttaaagaatctcaacttttgacccgagtgacctccaggatacatccaacagagtaacagtcaagagccttgattatagtaggaagctgaaaaatgtattagttaccatttactggctgggaaaagcagcaaacagctgcacatcctacagcggaacgacactaaacctgaaggagtttgaaggattgtggctcagatgcgaaaggacactgatgacattgaaagtcctaaacgcagtatccgagacagtggctacatcgactgctgggattccgagcgcagcgactccctctctcctcctcgccacggcagagatgattccttcgacagcctggattcctttggctctcgctctcggcagacgccttcaccagatgtagtcctcaggggaagcagcgatggtaggttggagacttaataaactatccatcttgaaattaaacatttgcaggggctgcattgcgcctggcagagggatgggcactgggaaagcaggctccatatccaccttgccggaacttagtaattctataaactggcagaaaaaagaagtctttgaatgttgtttttcatggtccttagaattttggttggctttgccagtagtt

SEQ ID NO: 694196 - DNA, 268 bp, Homo sapiens
ggcccccaaaaggcccgggtttttttttatttttatgcccccacccggtctgaattttcccctttggccaaaaagggggtccccgtgtcacggggtggtggaaaggattccaactggctaatgggggaaagggggaacccaaagggccaggggcccatttccccctttaaactgccccattaaggaggggggctatgggaagggggccccccctgcctttggttttttataccatttccttttaataaagccgggttaggtttttcca

SEQ ID NO: 694197 - DNA, 148 bp, Homo sapiens
caagtttggtttttttgtttgtttgtttttggcacagaaatcaatcatttttcattttagcttcaagtaattacatgagagctgttcaaacttgagcatgcatcagaatccccaaagggctggataaaactgagattgttgagctcca

SEQ ID NO: 694198 - DNA, 109 bp, Homo sapiens
ggtccctgcttgagcagtattgtgctattgcatactagtctttgctgctgcgagacatggtgggcctagccctactagtctcaatctccaacacatattgcctagtggt

SEQ ID NO: 694199 - DNA, 240 bp, Homo sapiens
tctcgtcgttctgagatcccgaaacctaattacgcatgagcaagtgtataagatgtttagagaggtatgccacagagggactcaacatgctgggaacagcacttatttcctacaacctgatactgccttgaggatgtggttagattccccaaggggcagaagagaaagttccttccattgatttatttcccccacattgctcctagttctgaatagaatcctctttaggcatagaagtcc

SEQ ID NO: 694200 - DNA, 265 bp, Homo sapiens
ctgagatagatctcaggtctgtactgcatcttacaataactgcaagaatgaaaaaagacatgttgatgcctgggatctatctcataggttccaactgaagtgttctagggtggggtctcagcaccagctgggtttatcaacagcttcccacgattatttaaagtatgcagccactgctgatgagccacaggccttattgctaatagtagcacttactccacactctcctggaggatccatctagagatcgaccatgcaggctatg

SEQ ID NO: 694201 - DNA, 697 bp, Homo sapiens
gtcttcgggtaaagatggtggagcgcgggtactgctttgcgctgactacattcagcccgtctgttaatcttgtccagatcgaatatgcttcggctgctgtagctggaggagccccgtccgtgggaattaaagcatgactaatggtgtgcgtattagcaatctgaggaataagacagtaatctccatggctgtagtgatgagctgaaggatgtacacataagctagagaccaaatataccaagcatataggtattggtgtacagttggcattggtgccccgatgtacatgatgtgtcgttgtggcaacagcaagctcgataaacatagactcaatcaaataactaatacttgtgctaccatggaaaccccattccatacaggctacagctgtgatacatgaggagctaggtcattctgtggtatgcattagaattattatcgtcaagtcccgtgttggctaggtttctggtcgctattttgagaagtatatcctatatgagctgtatatgtgttggggtatggggaactgcagggtagtgactcggatatttcaatgttcaagtcagaatccatcatggtagcgtataactttgtcctgggaaaatgctaacagacaatgggagaagaagctatgatgacatggggaagaagtttccgttggagaaaaaagatagtacatgaatgaatctgggaaact

SEQ ID NO: 694202 - DNA, 466 bp, Homo sapiens
atgagatcatgtacttcaatatctctgttctccctgtaccgttgttcgcagatatgctatgcatactttaagctgatacaaggaaatgcctttgacttctttattcttggtcctcttggttcccaaggtccgtcttcattacatacagatctattatatacactccccatttaccatctttcccattcatccctctatacaatggcttccacacaaaacactgcaccatactttctttaagacataataataaaagaacaactggtaaagctataaactttatagtcatacctaaaattcgaaatcttactgaaaactcactgtatccttaagtagcatgaaattcaaccagtatctttatcaaatacttcccagactcattctctatatgcatcacgtagaaagcattaaaaaccgcagactccctctttgccttctacggcttcgatcggtcaggataacgagc

SEQ ID NO: 694203 - DNA, 387 bp, Homo sapiens
  misc_feature (7)..(7): n is a, c, g, or t
cagcttntatgtgattgctgacatggtggccgacggcctgggctgggccatcctgccggtcaacattgccgagttcggcgatctgcgcccgcatctgcggcaacgcgcctgcgaggggctggcgctgccgccgctgaccgtgcgcatgctctggctggaagggctggcgcccggggccgaagcgctgtggatgcgccagcgcctggccgagctgctggccttgatggccacggcctgagcggtctgggctggcgcgggcgttgcggccgtgttcaggtgcaggcagcggctgcgtcttcggcaggcgggctctctttcgctcgtgcctggcgtgcggccagcacgcccagggcccacatggcgacaccggccagcagcgccaccacg

SEQ ID NO: 694204 - DNA, 904 bp, Homo sapiens
ggtttctggtgaggcctttcttcccagcttgcagaagacacctgctttgatgttctcacatagcttttccttgtgtatctgcattcctggtgtctcttcctttcctttttttttttttggttttttttgggtttttttttggttttggagacagagtctcactctgtggcccaggcttggagtgcagttgacatgtctcagctcactggcagcctcaacctccagacactcagtgatcctcccaggtaagcctcctgagtagctggagactacggtgtgtggaccaccatgcccagttgatttccatattctcttttaagagaaggggagttccgccatggttggcccaggctgggtcttgaactcctgagctcaaggtgatctggcctggcctcagcctcccaaaaggtggggattcacgggtgtgagccatgcacccgggcctcttcctcttcttataaaggaacaccagtcctatcagattagggcctcactatctataattcatttaatcccaagtgctccttaaaggggcctggcctccaaatacagtcactttggggctaagggctccaccatatgggattgagggggccccagtccagttcatagccattttttaacaaatttcacatttatgcgttccccattctcctggtgtgctccctcatgtttgatgcttgtcctgcctggtgtggacacttgtattgtgggccgggcatgaggggaattttcatcagcccctccaaaactggtcgctttggggtgcactttgcctggttcaaacgtccaacgactcaaaatcttgggagatcccatatatggaaggtgattagaacactcagtgtttcggggctcgtgagatagttcccgtttatacttttggaatccctctgagtagtat

SEQ ID NO: 694205 - DNA, 161 bp, Homo sapiens
tcttgtactcttttcccggactcttgttccacagcagagacattgagtataccattggcatcaactgtcaaaagtgacttaccctctgagagaacacctacggggtgcagcgtctagtgctctagcttgcgtacgggggaatcctactaagagctcgaccc

SEQ ID NO: 694206 - DNA, 122 bp, Homo sapiens
cacctccagtagcactcaacagttccagaatgagctcgcttcagtcgtcctagcatgtccccaacacctcttgcatcgctgcagatctacctgtgaatgcttgtaaccccttgggcagctcc

SEQ ID NO: 694207 - DNA, 150 bp, Homo sapiens
catattatgcaaatcagtttggtactagtgatgagacatctggctattactctcacagtcagtgtcagataactatctgtctagaaatcttaagtctgggccatgtgcaatctgcaggttgtaattgggttcagggtatgtggttgcgcc

SEQ ID NO: 694208 - DNA, 261 bp, Homo sapiens
gagatggagtcttgctctatcgcccaggctggagtgcagctgcgcgatctaggctcactgcaagctccgcctcctgggttcatgccattctcctgcctcagcctcccaagtagctgggactacaggcgcccatcaccacacccagataatttttttagtacagacagggtttcacatgttagtcaggatggtctcgatctctgactcgtgatcgcgcttggtctccaatggctggatacagctggacacacgctgctggat

SEQ ID NO: 694209 - DNA, 389 bp, Homo sapiens
tgggaaggcttttagctttttataaaataatgaagtatgcatgaaaagaaagcaaattttagttggttgcagtcagagaatatggaaagggttattattataattaggattttattattcacattggaaatcactgctatgtgttaaggaattgaaggtggcctctggctagcagccattaagaaaatgagcccctgagttcaacgaccctcaaatgaagtgaagtctaccaataaccactgaataagcttggaattagattccttcccagctgaatcttgacttcagccttgtgagacaccctgaagtagaggatgcagctaaattttgtccagactacacacccacagaaactgtatgataattaatatatgttgtttaaagttgta

SEQ ID NO: 694210 - DNA, 131 bp, Homo sapiens
gtatatctccagcccggcgctgaccccggagttcctgaggcactacttgcatctttggaacacgtcagtaatatgattgataacaggtggctatgtagggaccctgtgagttggtcatgtacagttactat

SEQ ID NO: 694211 - DNA, 90 bp, Homo sapiens
  misc_feature (11)..(11): n is a, c, g, or t
  misc_feature (19)..(19): n is a, c, g, or t
  misc_feature (42)..(42): n is a, c, g, or t
  misc_feature (58)..(58): n is a, c, g, or t
caaaaccatcntatttacntaaatatattctgtgaagctatnccaaattgttattttnaaaacatttatttttattaaaatgaatcccca

SEQ ID NO: 694212 - DNA, 871 bp, Homo sapiens
  misc_feature (335)..(335): n is a, c, g, or t
  misc_feature (609)..(609): n is a, c, g, or t
  misc_feature (763)..(763): n is a, c, g, or t
gcggtacgccgattcctcctccttggtcgccgcgtccttggctggcgtcagaaggaatggctacaaagctgtcctgagcacatgaggaagatcgtggttcgacaagcttcagaatatgacgacgcgagaccagcgagatttctacgacgcagatgaaacgtggccctgtgggcagagtgcctcccggcccacgggaagaacgggcgcgcagtgtgaatccctccgggtgacgatggcggaagagctcagcagaggaagcatacccatgaaggatcgcccgtgtgctgtgaaacggctcaagcgccgccgagaggacgcggtccgaggcgggacancgcgagtcgtgagaacccatcggctggaggcttgcgatcggtcccggcgattgaccaggtgctgggaaggatgcgacgacacgccacgaggtgctgcgggatggaacgatgggtaactaggcgagtctcgtccacgtcgaaggaccagttcacctatagacctgggaatggaccctgaggattggagaccgtcgctgtaggaaggacatgaggcgtcggctcttgggacccaccagagtgcacacctgggcgcgccaagcatagtatccacaanaggcagcagttaggtcccgtcgcacatcgacggccaagagtgggaaaggccaccgcgccaagacgcaaaagagatggcccaaggtcgatacaacccgaaggcgagaatgagactggcaaccgaaggtgaatcgaatcggcaacatttgggaagnctgggtatagggcagagtcgaccgaagtggacggacggcaggcgacaagaagtggagggctgggcaacagagccgtgcagggggagggaaggcggggctaacggggaa

SEQ ID NO: 694213 - DNA, 100 bp, Homo sapiens
gctctaaaatacactgtactgatctctgcattctgctcttcaagccagtaacgttatgttccccaggtctttgaaaggccgtttctctgggaatatggga

SEQ ID NO: 694214 - DNA, 335 bp, Homo sapiens
tgaatatatgtccaagagaaatgaatacacatccacataaaaacttatacatgggccgggcatggtagctcaggcctgtaatcccagcactttgggaggccgaggtgggcggatcacttgagtccaggagttcgagatcagcctgggcaatgtagcaacactgcacctctacaaaaaataaaagaattaactgggcgtggtggcgcatgcctgtagtcccagctactctggaggctgaggtgggaggatcccttgagcccaggagatggaggttgcagtgagctgagatggcaccactgcactccagtctgggtgacagagcaagacccagactc

SEQ ID NO: 694215 - DNA, 331 bp, Homo sapiens
cagagaatctgtagtcgtatatcaagaatacttaactaacactgaacggttgccatgtctatgagcactagatattactgaagtgacaatgctactgaccatctttggctgcagaacagaaactggcagaatccgaacccatcgacccaaaaatgtccccaacgcctgatgaccaatacccatctgtgacaaggaacaggggtccgcgatgttggccactgatttgggtgatgtgctcaatggcttggggtctagggtgaaacccctgggctctgggagggtcttaggctcctgaaacatggaattctaagtgccattcttggaacagcta

SEQ ID NO: 694216 - DNA, 1100 bp, Homo sapiens
  misc_feature (241)..(241): n is a, c, g, or t
  misc_feature (244)..(244): n is a, c, g, or t
  misc_feature (357)..(357): n is a, c, g, or t
  misc_feature (522)..(522): n is a, c, g, or t
ggtcctgagctcacagatggtcggccaacctcgagccccgacaatagagggagagatggcagacgagcaactcggatagtccttgtagcctcctaggctcggttgaatgactacagcagtcgcctgtccgatgtccgttggaggccaacaattaatattccgcggaactcatgagtaacacctacaaatgccgctgggaatagtctggtgacgatcattgcttagggcgtgggacattggnggngtactcctggtgtccaaacaccaaatgagaaaactggcccttacacatttgggtggggtgtacctagggggccgtgcacaccacaagcggtagagaattcaagtgtaccatgngcaccactggtctacccgcgcaggaacgttgtccatggtgtctgcgcacattcagttgtcgggtatgaggacatattaccatggttgtagatggcgccatatggaagttggtttcgtcccactgaagaggattcaaaaatgatgggtgctccttcaggcaagacncgatccaaaaggttgcgacctcttcaagggcatgccacgaagaaaccgggtctattgcactcggagaccgagtgtgtgactaggcgaggtattattgggacctacaagaaacacattaggcaaaaaaggaaagaaaaccgctcagggaccgaaacagcgagttaaaccccgtaagttgtgcttctccttagcgttaggagagtggcggccgatgggcgcctcaggttcggcgacctcgctaggaaaggcaatggcctacccaacgcgtaatagatttgtagggcacaactcgaatttgggcgaccattgggagctcgttgccgaaggcgtgaagctggtggaaaccgataatttccccttgagttgaccgtgtcactgtgagccataccctagtggtgcttaaaagattcgagaagttcttgaacatcagaaagccgccgagcgtcatattacctgttgccgctggggtggagtgttcaaacagcagaagggtttaaaaaggctacctggagcgacgcgggtcgttgcctggccaagctggtttgtcgctcgaacacatgagatctcacagttaatcc

SEQ ID NO: 694217 - DNA, 818 bp, Homo sapiens
  misc_feature (1)..(1): n is a, c, g, or t
  misc_feature (313)..(313): n is a, c, g, or t
ncctcaggcgtgacagtagaccctcactgaccaccaaggcacagaagtaaaaattaccagtccagaagaaaatgataacaaccaacagagcaggggctatgctgccgtggcttaaaagatttttaaaaagagagtatatggatcgcaagaaaaatgaagggttatcatacttgaaagataagcacatagttattgctgaatataatgtgacactatggtcgaatactactcattcatttatagcgggggggaagcctagtcggaaagaccacgataacatttaaatcggctacctaaaggataattacttacnttttattggcatagtggttttaaaaggtcatatatgaaatacttaaactaagacgggacagtaggagaattctgcacttggaagacaatttgccacttggatgttgtagaaggagtgaaaaataaggatcactctttattggaccgctttattaataaggttgagaaggcgagcttattctaaataattgttcttttaggaaggcggaagaattttaaagaactggtaattaggaaaggcatgtactagttttgttaaagcactaacctcttgaatgaaaaaacaaaaaaaattggcctctttggccttaaccggtggggccctgccggcgcttcccttgaatgaggggtaagtgatgaaactgggtcagtgattgcttggactcggtcgctgccttaagcgaagcgtagtctttccttaaggggggatacgggtgtccccgaatcaggggatccgcaagaagaacatgggacccaaaggccgtcaagcggcattagacttaaag

SEQ ID NO: 694218 - DNA, 245 bp, Homo sapiens
ggggggtttgtttaaaaaccccccccccctgggccccccctattttgggggggtggggcccggggggaaggcccctggggggaaaaaaatttggggcccgtttcccttgccccccccccccccccttttgggtttcccccccgggggccccaaatttcccaggccgaaacgggccttccccgccccccccccccccatttttttccccggttgggggaaataaaaaaaaataaccggttttggga

SEQ ID NO: 694219 - DNA, 807 bp, Homo sapiens
  misc_feature (121)..(121): n is a, c, g, or t
agcgggggttcgcgacgccgtggtgacggggccggtggcggatgtgcggactgtgcgccggtatctggtactccggcgggtatgagcgatgtgtgatgcggacagtggctggactactagncgtgtccccagtcggacgaacaggtagcccggcgtacgagctgcgcatgtggtgtggtacgcagtgtggtgagtacctggatggcccgtcagtggcgagtccggcatacaaggtcgagcagcgtcagggcggcttggggactgatccgcctcggtccccgctaactgcggacactttccagtatgcgtgagaagggacacatgacgaagtcgaaggggaggaggtgctattagcacattttaaagcaacacagatctcagtgagaactcagcgtcaccattaccgtgagaagatgatgcttaaagccattcagtgaaggagtctatcccgcatgattcaagtcaccgtcatctacctatgccccgaacttccaacaccggggggattacatattcaacagtgagactttgtgattggggacacagatacgaagtcgtgtccaagcgtgcatcgtaaggttacccgcaaaggctgtgaatttcagtatctttgtagtggcgtctatagtattccataagtgtggaatgtaccacagttgacgttgtagtcgaattccaggcatatggttgggcagcctatgttggtatctagtgtctttgctattgtgaatagtgctgcgagtgaaacatacaggatacgtgtgtctatatggggtagaaccaactacatagttctttggggtatac

SEQ ID NO: 694220 - DNA, 312 bp, Homo sapiens
  misc_feature (265)..(265): n is a, c, g, or t
tcttgtacttctactagacattagttcttctactcgggtgatcgcttggtccccttgggtgtgaggacgctcagtgatatttctgggatgtttaggtagcgggtgttgagcttgaacgctttctttattagtggctgcttctaggcctactatgggtgttccattttttactctctctacaaggttaaaacctagtgtccaaagagctgttcctctttggactaacagttaaatttactaggggatttagagagtcctgtgggcnaatttaaggttgaacaaaggttctatcttggtacaaccagctatcat

SEQ ID NO: 694221 - DNA, 268 bp, Homo sapiens
gtcgacgtcaatacccatcctaaacacatgccgggtaaacaatggctaggtgtgacattaaaagatgaaggaggaagaaagatcaactctttttgattcctacggtttccccccccagattttcacatttccccacatctactaaaccgtttttgaccaaaattggatcaaagatctactacagcatcaaacaagtacaagataacctttccactacatgtggtcaacactgtgtattctacctatgtcaaagagccagtggtcgacg

SEQ ID NO: 694222 - DNA, 788 bp, Homo sapiens
ggcaggtcctggtgcttgatggtctatgccatctcctggggccgcctggacggacatcgtggcttaacaggtactgctgggccgcaaggtggtggtcgtatgctagtgaaggcatcagcattgtctggcaatttctacagaaacgagttgaactatgctggccttttcgctcgcgaaacgcgggatatgatccatctcagatccacttcgccgagatgacgccttatgcaacgattctctggtgcgccgcgcagacccgtcatacttcgtgcgcggactctggtgcgacggtaatggatggcccacaaagaggacagaggcgagggccagggcctgcctcatggatccagtcgttcaagggtggattcggaaacgagacgagtcctcgaactccggggcgccttagcttagccaagggaaacacgagaagaccggatagaggttgtgttttcccatgtcatgacgcgcttaccaaacgggggtttcggattggaccggttcattggtaagggccccttaacccaaaaaggaaaaacaatgtttttagacccctttattttccttgcgtggggtcggcgctttgcggacttcaaccggaaaggctctcgtgtcgttggggacaccgtagcacaggcgcatgttgaacgaaggccatcccatggatgcgaagacacgacgtgacaatggacgaataagccggattattctcagcatatctcgcgacatgaaagaaatcatgctacatgaccgctaacggacaagaggccgagaagatacgtggagaatac

SEQ ID NO: 694223 - DNA, 531 bp, Homo sapiens
tcactgcagtcaatctgaacaacctgagctcatgggccggggtgtaagagtggtataaacctaaggccctgatcaaagcagacatgtagagctggtactccaggctgacagtctctccaggtgtacagctgctgtccctgccctgtcctgtccattgcacagtctcctatgtctgagcccagatgccttctgttcagggccctcctttggtgggaaagcagagccctgacccttgaatggttgtccttgactctgtgcatgctgccatctgcagagaggcacctaagctgtttaaagagcacagtgattatgactgctccacctagaggtggaaggggacaagaggcatccttgatcagtgtccatacattctgggcagagacatgattttattgttccaacaagtgacattctccgggctatcatagtatctttgtaatatgttgaagataatttgaattgactgattttgatagaactgtgtgtataagctatagacaattaaaaaagctttcttctaaaaaaaaaaaa

SEQ ID NO: 694224 - DNA, 254 bp, Homo sapiens
cggcacgagggtgattggtgtggtcagagcaggcatccagtggatctgtggcacagtcacgctgttggatgatgctgctatcatccatgaggtcaggggggccctgcaaggttatctccaggtgatgggattcacgtcagtcctcatgccaccagaggccatgtaccacgtcccagagcgacaggcagggaggttgcgtacttagcttcggggggatatctccgtgagacctgagccccaagacgtacggaccg

SEQ ID NO: 694225 - DNA, 409 bp, Homo sapiens
gcgcgaatatttccccgataccttttcgactgcggttcgacaaaaatcccgctggatcatcggcattgttttccaaggctttcccataaatggacctccagcctgacgctgaactactttctctggcgcgaccgcaaaggggcaatcagtaactttgtcagcttcctcgcgatgctggtgatgatccagcttttgctgttgctggcgtatgaaagtttgtggcccgatgcctggcatttcctttctattttcagcggcagcgcatggttaatgaccctgctgtggctctttggtttgatggttaaccgcatcgtgcagcgggtgattttcgttactggctactacggcctgacgcaggggctgctttccgtcctgcgtcttttctggggcaacctgattcttcatggcc

SEQ ID NO: 694226 - DNA, 341 bp, Homo sapiens
  misc_feature (123)..(123): n is a, c, g, or t
  misc_feature (125)..(125): n is a, c, g, or t
  misc_feature (141)..(142): n is a, c, g, or t
agatcagcggattcagagacacacataagagatcatatggtgactaatgcaagatgaaactctcagcttggaaagtatcaaggaataggatgaaagaaagatccctcgttccgagtgttatgnanggatgccccctcagannaatatgcaaaggggtaactggcttggaaatgggtatttatgcatagtaaatcccactcacgagttttgcctatttgaagcttctctcactgacagtgcatctgtgaatgttcgctggtgttgaaaatgatgcttttgaacggtgccctgccttccctgcgtgaaatgtcttttgctggtcgagatactagggtgttgct

SEQ ID NO: 694227 - DNA, 421 bp, Homo sapiens
  misc_feature (5)..(5): n is a, c, g, or t
  misc_feature (22)..(22): n is a, c, g, or t
  misc_feature (39)..(39): n is a, c, g, or t
  misc_feature (48)..(48): n is a, c, g, or t
  misc_feature (68)..(68): n is a, c, g, or t
  misc_feature (73)..(73): n is a, c, g, or t
  misc_feature (102)..(102): n is a, c, g, or t
  misc_feature (113)..(113): n is a, c, g, or t
  misc_feature (129)..(129): n is a, c, g, or t
gaagntaaaaaaggtgggcttnccccaaggcccttgggnaaggctctnggcccttgtgggaatttggncaaangtacaagcccccttttgtggcctgaattncaacaaggctnggtaatgaagtgtctngtggcttttcccaagatgcaacaaattcaaagctgtttggtggatctaccattctggggtcttaaaggatgatggccctcttctcactactgcactaagcagtgcctcagtgggggccctgtgtaggggctcccacccaacatttcccatctgcagtgccctagcagaggttctccatgagggctccacccctaaagttgacttttgcctggacatccaggtatttccatacatcctctgaaatctaggtgaaggcaggcctaacaccacatggaagccgccaactctctgt

SEQ ID NO: 694228 - DNA, 875 bp, Homo sapiens
aacgagggtgttcgatggtacagccgagtcgaagcgatgccatagacctcaacaggaacttgttgactgttcacggctcttctgggcagtgatttcttggagccgttgaggtcgactaaccaatcgttaaagacggagccatctgtctcttgtcgtctccgagaaaagacctgtagaggagaaacaagacccgactggtttacacgttcgatgagcccctgtaccttcttctcacactcgagcccgtcacgcggccagagactccatcccccttgctctcaggactggttcaacccccgacgtggtacgtaaccgtgtaccggagacttttagcaaggggcccaaggggctacttgctacttaggaagaactatatgagattggacctcctgcaccggctgacaactgaagcgccatgcgacgacaactgctatttgctttgacttctcagtaaacaactgggaggccaggctgattggaaccccgaatatcttgaccccttgctgcatgtgcgcgtactgcatcatacctgttaaaaagttcgaggcccatattatatgtaaatagcctggtacctggtcctatgctcagatctcgtcacgccgcgccttgtgaaccatgggccgttctgttgctcctcatggttgttcctgccgagctactaggtcttgttcggagttggccaggcatcttggtcccgacgggtcctcctctttctgcagagtgttgccttcttgccacaccttttgacgcgacgccttactgtcccgcttccgtccggcttactttgacttgcccagcgcctagtgtccggccacgctcacctcgccccactgtggcggctgccccctggcgaggctcttgcccctctgggg

SEQ ID NO: 694229 - DNA, 237 bp, Homo sapiens
ggctaaagcatggtggctcacgcttgtaatcccagcactttgggagccaggcaagaggattacttgagggcccaaggggggaaggtttttaaaaaaggaaaggaaaagccaggcccgggcaacacagcaagacctgtctctacaaaaaaattaaaaattagttagcgcactagtagtgcagccagctactgagaggctgaggaggaggatcacttgactccaggagtttggaggttt

SEQ ID NO: 694230 - DNA, 204 bp, Homo sapiens
ctgtgactctacaggagcttactcatttcagttctgtggctgtgaagtgtgaaattaaggagtttgtagggagattagtatagagaggtagagttttttcgtgatagtggttcagtggataagtggcgttggcttgcccatgattgtgaggggtaggagtcaggtagtaagtattcaggaggggggtttgttacggggggtccg

SEQ ID NO: 694231 - DNA, 197 bp, Homo sapiens
  misc_feature (141)..(141): n is a, c, g, or t
  misc_feature (174)..(174): n is a, c, g, or t
agtagagacggggtttcaccatgttagtcaggctggtctcgaactcctcacctcatgatctgcctgcctcggcctcccaaagtgctgggattacaggcatgagccaccgggcccggccgaaatgtctcacttttactaaangtctgctcttctgtattatttcaccttccttanaaaagcatgtattactttgtcat

SEQ ID NO: 694232 - DNA, 329 bp, Homo sapiens
gaaaaacggtgtttcaaaaaatatggtacacctgtcatagattctagtctcatccattgtttttgagttttttgtctgcaatttagactgaccttgcttctttctgtgaaccaaacagtcatctcttgactgcttctcgtcagaaacaagagggatggataacataaaaatctggatcagtatctaattctgagcatgtattggaatcgtctagcaactccgtatcagctcatctagcaattcctgtgactgagaatgcctaacctcctggggaatgcagcccagtaggtctcagcctcattttacccgataagtcacaggcattcttg

SEQ ID NO: 694233 - DNA, 909 bp, Homo sapiens
tgtggtggctcacgcctataatcccagcagcttgggaggctgaggtaggtggactgcccgagtccaggagtttgagaccagcctgcgcaacatggtgaaaccccatctccgctaaaataacaaagggaaaaaaaaaaaacaaactagcaggcatggtggtgcatgcctatagtcccagttacccgggaggctgaagtgggagaatcacccgagcccggaaggtcaaggctgcagagggccaagattgtaccaccgcactccaattgagtcaaccacagtgagaccctgttctcaaaaagagaaagctaccagttatcaagaacagctgttagaactcatgttcaatattaggcaacaccagattaccggggaccaaacagtctgctagagaagcagaccctataaacatacgctataacctgatttcacacaagggttaaaacggcacatccagctgttcgaacaagggatcggacaaagcatacgggtcctaaaaccaactgggatatccatattgccagaaaacaaattccatccatagctcctcacaatggtacaacaatacgcctagacctacattgtgaaccctaaaccttatgaaaccttgaatagccaggtgccggagtggtcatgcctgtaatcccagcactttgacgagtgacgagggcaggtggatcaccctgaggtcagaaatctgagaccagctgggccaacatggtaaaaccccatctcatataaagttccacaatttacccaggcgatgtggggtggaccctggtaaagtgtgccgatttcaacaaatgggggcacaatttcacagctctccaaaaatcgtaaccactgattggccataacgccaagaaaatcaacccgaaaacacttggaaccgcaacacaaaccactggttca

SEQ ID NO: 694234 - DNA, 886 bp, Homo sapiens
acagagagatgtatcacaggggaggccgcaccgtcgtttgtgtgctcgcgggtttgcgcgtgtcctgacgaagttgcgtctccagtggttttcgggcagggtcgagacgtcgaaggttcgtggccctgggaacgaatcccccggtgacgggtccctggtcaggggtggtggcctccgcctatgtcgccggctgcctgtatgggctccacccgtcgcacctgagcgacttttgttccgtcagaaagggttctcgccttcgtttaaaccgggagcgcgcccctatttgctagagcttgctgtaagcccccccgtctgatgtgcgtgctccgcccacccccgcggttggagagcttctcaagtcaggcgaccccagcggcacatttcggttctgcgacaattcagacccgagagtcccggggggcctgtttacaagaccacgaggtctaccaaggtctctggggcatcggtgaagagtcaccactagtatggtcccggatctctcatgagcgcgtcaaggagattattctatcccctgtagtgtgcgcgccccccgcctcttgcgaatccagtggtgtgagcaagaccgcttgcaaaacttgtatggatgtcccaatgcgccacctcaagacagtcaatgcggtctacaaacgtggttcaatggatgaccacaaggcgatggtcaccgctttccatagatacagatgaaccattagtggggcaccctggcgcgttttctatctgtgtgccgaggccgactatagttgatatgagtgttagaaacacccgcgacaggttttgtgactgggaagggagtagtgcccaccagatcttcgctgtcgaagacagtcggcgaaccccttcgaaaagtaacgggccacatgacaaa

SEQ ID NO: 694235 - DNA, 899 bp, Homo sapiens
acagtgctaatagatggatgtagtgtggggcacgcacttaggagcatggtgaataaacagacggaaggatggtgagatcaaatggagtagaagcccagttggaattaggctagtaaagaatgtgaaatgggctgtcacttggtggttttgccaaacactgacaaggtaggattctagagtggttccacgtagatactgtacttgtttggccagtgaatggagattaggcatactccattagtgttgtcgtatgtgagaccctgacttcaagatcgctggacgtggtctaagaagaatagggatattagtgggaaaggaactgtcgtgtagtgacctggctgtgcattgtttggtgcctagtatcaatagattgtgcgtggtcaggtcaaagcatgaaatcactttcggtaaccagtcaagtcacctggtaacacagattctaccagttcgttcattcatgtcccatgctgaaggtgagtgagtcgatccagagtcaaattcgtccctattgtatatattctaggttctacatagatgaagggtgctttggatagctaggaagcctcatgtggtttcgagaggtactgtaaatggtagatataatggcaatcatgttgggccaagcttattacgaaataatagatggtcgttgtgcatgtgtcttttgacatttttgccaatggcaagtttaacgacatgtttcctaagcaagtccggatattgggaaggcctgcctaaggattttcgtgcacgttgatataattgttaggcatccagggtggcgtgtacacaacttgggcttgttggggacctttgtgggactcgggttgacatcaggacaaagaggagttgtaaatgttgggggctaagagcgcgaaataggggggcatacacacggg

SEQ ID NO: 694236 - DNA, 351 bp, Homo sapiens
  misc_feature (1)..(1): n is a, c, g, or t
  misc_feature (84)..(84): n is a, c, g, or t
  misc_feature (328)..(328): n is a, c, g, or t
naattcggcacgagatgagttttaaacaaaccctgtcccgccgggcgcaagtcgtacgcctgtaatccccagcactttgggagnccgtgggcaggtggatgacctgagctcaggaatttgagaccagccctggccaaccctggcgaaaccccgtccctactaaaaatacaaaaattagccgggtgtggtggcacatgcctgtagtcccagctatttgggaggctgaggcaggagaattgcttgaacccgggagggagaggttgcagtgagccgaaatcacgccattgcactccagcctggacgacagagtgagctctgtctctaaacnacaataaaaacccaaactctgaa

SEQ ID NO: 694237 - DNA, 89 bp, Homo sapiens
tacagaaggcagagaggaaggtttaatgagccctgtccagggcccttcagtggggagcctccttcttcttgcccttctgtcgtcttctc

SEQ ID NO: 694238 - DNA, 179 bp, Homo sapiens
tgttgtaaaatagacatgatctcaggccagtgttattgcttctgagatactttttacctcctgttagtagtcagcggtcacatattaaatatgcagctatcacactgaaggatcagatcattagaactttgactgactaaatataactcttgctaagaatccttgagcttgtctcatgt

SEQ ID NO: 694239 - DNA, 198 bp, Homo sapiens
  misc_feature (138)..(138): n is a, c, g, or t
tacatttctttatacccatattgcatttcctaaatgggccagcaaaaaccagtggatccctgccaaagtaatgttaaagatgtgctgacagctttacaaaaaaattttctccaactaatttgcaaagatataaaatanaatgtagttcgtagttttcaagcattaatggaaagtgttcctattaaaaaattccccata

SEQ ID NO: 694240 - DNA, 506 bp, Homo sapiens
ggagcttatcctggagacgacgaactgacctatgcgtgttacacaagaaagtctcgtgctctaactacacacctacccacatcttgcacactttggctgccaacaggactgtttggtttatccctgtaatacatgccaaacagaatgtattagagactatgtcatataaatccaccattctaagacaaactgaccttgataaagtacttactgtaattcacatagcataccgtttcttaaactcagattctaagacagtgcctctaaccataaaggtgaatgcaagtgtacctttggaaaatctgggagtggcccaaagtagcccaacacacaaaactaggctgtatttttcaaactggccatattctattgtgtgcatgagtgtgaaagcaatagatagatggaaccactgaataaaagcaaagactcctcctggagcgttatgaacatattcccaaagtaaaacaacacttccttcatccatttattcaacaaacttttattga

SEQ ID NO: 694241 - DNA, 271 bp, Homo sapiens
  misc_feature (2)..(2): n is a, c, g, or t
gnggatcgagctcgtacccattgtttgaaggcgtgggatgtagagaaactcaaaggaaaacagggtgtgtttctgacaggtaaatggataaagctgggatataaagatgggctgaggtccccctctttaatttgttctaaagcagaagcatcgggcagactagaaaaccctgacttctttttttttttttttttttggagagggagttctcgctctgtcgcccaggcgggagtgcaggggcgcgatctcggctcacggccttcaaacatgg

SEQ ID NO: 694242 - DNA, 544 bp, Homo sapiens
  misc_feature (219)..(221): n is a, c, g, or t
  misc_feature (249)..(249): n is a, c, g, or t
  misc_feature (356)..(356): n is a, c, g, or t
  misc_feature (495)..(496): n is a, c, g, or t
  misc_feature (498)..(498): n is a, c, g, or t
cacaaggccgggcagggcacttggtgctttcttcgcaagggaaaagcttttttattggggttccccactttaaaacccccctaaacctgggggggagaaacacccccccccccccccagggggggccccccgccccccaaaggggggccccccctatattcccggggggggggggcccccccccctaggaaaaaccccccctttttttttttttgtggnnncccccccctttttttaaaccacccccanttttcccccaaatttttttttttttttgtcccttttcccccccccccccgcctttttgttctctaaaaaaaaaaggggggggggggggggtggcccccccccccccnggggggcgcgggccgcacaaaaaaaaattatttctcccttcctcctctctcaaagagaggagagaggggttgttttttttttttttcttcaaaaaaaagggggtggtggaagaaaagaaaaaaagaaaccccgcgcccnntnttttttttttttcccttccccctccttcgctcgtgcaggcgagaag

SEQ ID NO: 694243 - DNA, 406 bp, Homo sapiens
ccctagcaccttcctgtacagagtggtgtttgtgtttgtgtatctgtgtagtttatagtgtgtgttgttgatgggaacagctgttgggaaaagctggttacacaaggactggataaagaaatatatccttatcagaaatggaggtccaatgttgactcagaaatatatcatggtcaatacacaaagtctatgtgtcattaccgtctggtgtgtataaaaagccttacatgctttgattaaccctccatctagtccatatctcaatggagggttgagttcaattatgggtatcatattttaagagagacattaataagttgattgtgtccatagggaggtgaccagggttgtaaagggtctgatgatgcaagaacaagggagtagcttccctgaaggtacaggaagg

SEQ ID NO: 694244 - DNA, 143 bp, Homo sapiens
  misc_feature (17)..(17): n is a, c, g, or t
ttatgtggagagagaanctcctgctgggagagcatagaggaggacaagtagtataaatgatagtagatactataatataccactatagtacatgtaggtatatagacactagctagactagcctatgtacctagtctatacag

SEQ ID NO: 694245 - DNA, 240 bp, Homo sapiens
gattcggaacgaggagcctgggcaacacggtgaaacccaactctactaaaggtacaaaggttggccgggtgtggtggcacgtgcctgtagtcccagctacttgggtgggaggctgaggtgggaggattgcttgactccagaggtggaagttgcggtgagttgagatcacgccactgcactccagcctggcaatctgacaaaccgggtgacagagtgagattttgtctacaacaacaacaa

SEQ ID NO: 694246 - DNA, 444 bp, Homo sapiens
aaagtgagggagtaatatgcaaaaaaagcaacaaaaaactggtttttcagtgcggtcagtcgttgccacaggaattggggcagccgtattctttgtgctaatgaaatttattgctattccaacgggcgtaccaaataccaccattaacgtggcggaaggctggttggccttaatagcgagtttatttgggccggttgttggcctactggttggtattattgggcacaccttaaatgatgcggtcacttatggtgcgccgtggtggtcttgggtaattgctgatggtgtttttggtttcctattaggattgagtaaaagtcgcttgccttggaatatggcacattaacgactaaaaaaatcattcaatttaacatttggcaagcagtggccaatatcattgcttgggtgattatcgcccacttggtgacattttaatctacaaag

SEQ ID NO: 694247 - DNA, 793 bp, Homo sapiens
  misc_feature (680)..(680): n is a, c, g, or t
  misc_feature (712)..(712): n is a, c, g, or t
  misc_feature (724)..(724): n is a, c, g, or t
  misc_feature (728)..(728): n is a, c, g, or t
  misc_feature (730)..(730): n is a, c, g, or t
cccctttccttgtgtcctggtccatccgtcttccgcctcctgggcgtgtcccctgggtttcccttgtgccagcatttccttccctccttcttttttcccgttttgccctttctcccgtttttctaggccttcctcctctgcccggccttcagtgatgtcccttgacctctatgcgggattcccagcgtcctgggttcccttctgagctgcccatcgcttgttatctgcctatagaaccctctgaattctccggctttgtccttgaggtccttgttgtgctcttggtggcctagggcgttctctgcgctgtctccatctttcagtgccttttccctgtgtgcggctagttccgcacgccttgcttccatcttctgcatcggtttctctgccgtcatcggcttccgagtagtcagggtccgtgtgcctggcgtccgcgcttcccgtggcgtccgcgcttcccgtggcgtccgcgctttccttcgcgtccgcgctttccctggcgtccgcgcttgccctggcgtccgcgcttcccctggcgtccgcgctttccttggcgtccgcgcttcccttgccgtccgcgctttccctggcgtccgccctttccgtggcgtccgcgctttccctggcgtccgcgcctcccctggcgtccgcgccgaggcccgcgcgcgtcctcgtgccgncttcctgccgcccgcccgctccgctgtctctnccccaaccgccncgcntntacgatggtctcatgggggggggtcctgcaccgccggcccgccgtgccggccctcctctcggt

SEQ ID NO: 694248 - DNA, 228 bp, Homo sapiens
  misc_feature (13)..(13): n is a, c, g, or t
  misc_feature (59)..(59): n is a, c, g, or t
  misc_feature (62)..(62): n is a, c, g, or t
  misc_feature (92)..(92): n is a, c, g, or t
  misc_feature (99)..(99): n is a, c, g, or t
  misc_feature (110)..(110): n is a, c, g, or t
  misc_feature (113)..(113): n is a, c, g, or t
  misc_feature (132)..(133): n is a, c, g, or t
  misc_feature (150)..(150): n is a, c, g, or t
  misc_feature (158)..(158): n is a, c, g, or t
  misc_feature (161)..(161): n is a, c, g, or t
  misc_feature (182)..(182): n is a, c, g, or t
  misc_feature (191)..(191): n is a, c, g, or t
  misc_feature (202)..(202): n is a, c, g, or t
  misc_feature (207)..(207): n is a, c, g, or t
cggcacgagaganagagagagagagagagagagagagagagagagagagattatacccnagncaaccccttaaacacccctccccacatcangcccgantgatatttccnatncgcctacacaattctccgnnccggccctaacaaactngggggcgnccntgccctattactatccatccncatcctagnaataatccccntcccnccatatatccaaacaacaaag

SEQ ID NO: 694249 - DNA, 267 bp, Homo sapiens
ttcccaaaagggcctggatgcaaggttaccattttgatgttggagcggccccctccctgcaaccagggtggccctaggacaggaggagcttcgggcccagcttccccctgcggtgggggtgaggggtggccatttcctgccctggggcccctggcttcccattttgggctgactcataggggagtagggggggagtccccaaaaccagtgctgggacaaaaatggggaaggggtgtgaactttttaaaataaacccaaaaacccaga

SEQ ID NO: 694250 - DNA, 258 bp, Homo sapiens
  misc_feature (118)..(118): n is a, c, g, or t
aggtgagcgattccgcaatggctgcagtgcgttacattgtgctttgcgaaacacttcgcaatgttatcaaacacctgtcttgaacgcgccgggcgtgacattgcatgcgtgtagcccntttcagtggaggaacacgactgagcaactctgattgtggcgtgctggcctgggcgcgtcttgcacctgtgtgaaacagctgcttgctgcagggtggcggcggctgctgtcctgacgcagagcttgttggccatttatctt

SEQ ID NO: 694251 - DNA, 161 bp, Homo sapiens
tactgatacaatcgagctcgtgtaccctcgataagggccaaattaatgggtggaatgtggagatatgttatggttatggagacatatcatattaggtaatgctagtgctgagtggtagcgaagttcctgcataagaggtgtatgtgtataagcttatcgag

SEQ ID NO: 694252 - DNA, 109 bp, Homo sapiens
aggtatgtctttgtgaatggggtttccgatgaccaggacttacaggcaattctttctctgggtgtgttctcacattgggcatcatgcacgtgagtgctcccctgaagat

SEQ ID NO: 694253 - DNA, 582 bp, Homo sapiens
tggaattcggcttacgggaacaatcacttccaatatgatctagcacctttctagcagccagtaaatcggggctagtcttccatgccaaatagcaaatgtctaggagaggatactagtactatagggcttctatcagctagcttcaacagagtggcagcaaccaagctggagtccaagccccctgataaaaggcaggcaatcctatcagtactgtcatcaaacgtttctttacagcattattaaaaaggatcctgaggttgttcttcacagtatctatctcaaaatctggaaagagtaactccacatagtcatagagggcgtgcaggggttcatcctgacagtgatgatatttaaccatttccacggatgcaaatttgccataatggctttaaatccaaaacttcatagttgtccaggaagaaaaggcttccaattttaaaaagggagtcgcggagtgcttcaatgtaacaagaccttaaagctatctgaacatacagtcaacaatccatcttctgtccattgcttaaaacaaaggtctagactccatatagtatctctaaccaggaacatttctaattggca

SEQ ID NO: 694254 - DNA, 415 bp, Homo sapiens
  misc_feature (42)..(42): n is a, c, g, or t
actgtgacgttcctgagtcctgtagagaaatgtgctctctgnctgattgatagcagcgcgagctggaggtgttgggtcgggagaccagcctgttcgagcccgccgcatgtaggagctggtttccatcctggcaccagtggacacacctccagcctcgagcccggtgctgctgcccggggttctccttcaggctctttgacgccgttccagggggcacctatccaggcatcctctgggcctctagcgagaggattggctcccggcttcagcactcggtgctgcagtacgacgtgcccttaatcgctctgagccttgccaccatcctgtgaaccaccggaaaacctgttccagcgcgcacagcttgcccttgggactggacggatccaaaaaggctcaagctcggcccccccacaga

SEQ ID NO: 694255 - DNA, 116 bp, Homo sapiens
catgacgttgtagttcggaatgacacgctgcgaaccgttatagtgtcagcgtcagcatggatccgccatttgtcatcagttccgcagcgcggcttggcgatttccgtgaacgagaa

SEQ ID NO: 694256 - DNA, 528 bp, Homo sapiens
  misc_feature (26)..(26): n is a, c, g, or t
  misc_feature (78)..(78): n is a, c, g, or t
  misc_feature (100)..(100): n is a, c, g, or t
  misc_feature (130)..(130): n is a, c, g, or t
  misc_feature (173)..(173): n is a, c, g, or t
gacacgtggcgacaagaggagggaantggtgccactgtcgaacgtgtctagtctctagtccctgctgggaagatgganccgccggaatgtgtctagtccntagttcctgccgggaagatggaaccgcctntgaacgtgtctagtccctagttcctgccgggaagatggagccncctcttgaacgtgtctagtcccctagttcctgcccggaagatggagccgccatcttgaacgtgtctagtcgttagttcctcccgggaagatggagccgcctcttgaacgtgtctagtccctaggtcctcccgacttcacccgtacaagctcccagctggcttgtgtatgtctgcagctcgacttgacaggctgttcattgttagaaaatgacttggggctgcttttcgttaaggagaaaagctgccgggcgcagtggctcacacctgtcatcccagcacttttggaggctgaggcgggtggatcattaggtcaggggttcgagacgagcctgaccagtgaaaccgcgtctctact

SEQ ID NO: 694257 - DNA, 913 bp, Homo sapiens
  misc_feature (913)..(913): n is a, c, g, or t
ggcggggcataggagcccggtctgtgatcgccgaggggagtgagatcgtccagtcctaagagaaggcctctctcatcagtctttgattatacttcagatcaccagtccctcaacaccaaagttgcgactatggtgagatgacttcaaaataaggcagcccctttcaagttcggaccaagcaaaaaatcatttctcaggggagaccggatgcaacacactttgagggcaaaagaaggatgtcctcggtgtccgggcggccaagagagggaacagaggcatcgtttggctcgaataattcccaattaggtcaaggatggaaaatttataaaccaattctccctttaagcggcaacaggaagcaaggcaattagaggaggcttcgaggctttcacaccctcagaagtgtatcctccccgtgtgttacattcgtggtgttcactccacccaaggcagaaagtgcaggccatggtgtgacattaccttgatccagtttacaaataccagagttgtctgtgacattcccagaaacgcggacatttgtggtgcaggtcggagaatttgactgggcttgtggtgggcacattttcttttaagtttaaaacaaaagattgacggttataaaggtccctacattccttataaaggaaatgggagattaacttctacgccagttccatagaaagaacggttgacttaaaaaatttttgtcggacaacgcggttggccatgcgtgggtaccccagcacttttggaggtggaggggggaccctcactgtgggcttgggtttgcagacaaggctacacaaggaaccccggcttctacaagacagacaatactgtgtggggtggcgtcggttatccccgcggtggcgaggaccacatcaccagcaggggggcgcgcacaacacccgcn

SEQ ID NO: 694258 - DNA, 1129 bp, Homo sapiens
gtgacacgatctcgactcactgacaatttccacctctcaggttcaagtggttctcctgcctcagtcctctcaagtagctgggattacaggtgcacagcatctccccacgaactaatttcgatatttatacgtagagacgggatttcgccttgttggccaggctggtctcaagctcctggacctcaagtgatctcgtgccaccttggccttcccgagaacgtgctggggattgcatgacgtcgagtctacatgacagcgcacagccacattcctatgtctcttaagctctcagaatctcccctagctccctccgaggttgtcgtgcgagttggttggtcgccatcgaataggctgtcgtcaatctaccacttccttcgcgacggacccatttgtggtaattctccttccaagacgtacgcgctagagaccacaagacctcaggcatcgtagtctaagagtcaccgtcatatcatgacgggcggtgtaggacacatgcactgacgaccacgatacagaagatactgaaagacgtgaagtgagcagccgttcccctcgctgttgtggaactgtgcgggattacacacagcattcaactctaagcctctataatcatagtagactactacaccctaaccgagagaggatgagccagaccaatgaccagacgatgaaaacgagcgaaagaaatgccaaacgaaagagagcacaaaggcatggaggccatgaggagcaagagagaaacgaacgaagaggagcggaagagaataaaggataacagacgttgatcaccaacacatgggcgcatgcataacgaaatagggacatcagataataaacaatagccaaaaaagacagaccagagcaccccagaggacgagagacacgagagatacaacagccgaatgcaacagaagaccgaacaaacaaaagagaacgaacaacgaaagaaacgagagccaagataacacaacaaagggatgaacagcaagaagaaaaaaaaagtacagacaacgcggacaaccagagaaagcacaagacggaaggagcgagacgcccaacgacggaacaaagcgacacaatcaaaaaaacgcagaaaagatgaaaagcacagagaacagcggaacacaat

SEQ ID NO: 694259 - DNA, 107 bp, Homo sapiens
gtagaagcatcgaaagcgttggagaggtgttaccgcaacgcggcgacaagggtcgttcccgaactaagagtggggcatacataatcttgctgctatacttcgaagct

SEQ ID NO: 694260 - DNA, 898 bp, Homo sapiens
aattctcatgcgtgtaacacttgtggtgggactctgctcattgtatcggatgtttaccctggttcaccctttgccctcgtcccgcgtgcttgggttcctgcacggacctatgtgcgtcacaggtgaccttggtgccctgtgaattccgggcacacaaggaatctcggcgagggaccaagggacctgctcgttcccgcccccgtggtcccgcggccttaaattccccgactgttctctggtgtcccacctgtgtttgttcccccccccccgggcctcatctctttagctgggctgtggctccccccgtggtgtgctaggcccccgcgaattttggttacacctgtgtgcgttgcctcccggggccctgtccccgcctgttaggccaacatcatggggatgctttctttcacttggggtaatcctcccaggcgccccacagttggtgccccgcagaacaattctccggagtggtaggagtgattatgcgggcttctctccattctctccggccagggagattcccctgcgctgccatcgtgttgtatacgcgcgcccctttgggggcctcacactttttgagggtttcacgcggacaggaccttttgccgtctgtcgaggaagcgttctaaccaccaagcctttgtgaaagaacacccccatcggcctcccccctcggctgcggcgtgaagcccccgctgtgcagcccccccgtgggttaaccgccccctcgtggccacaatttttcccctgccatacatgcgtgtccttctcccgctgtctatcccggggcctggggcgccccctctccccaaagcgggcgggaaatcttttccccttcttttgggagccccacggggccatgcccccaaccccccgggcagtcaacaccccacataac

SEQ ID NO: 694261 - DNA, 428 bp, Homo sapiens
  misc_feature (373)..(373): n is a, c, g, or t
  misc_feature (399)..(399): n is a, c, g, or t
catgacggatcaatgggatgccgggcgactggacagtgacctcgagggtgtcggtttcgacaccctggcggtgcgcgccggtcaaaaccgtacaccggaaggcgaacacagcgaagcgctgttcctgacctccagctatgtgttccgcacagcggctgatgctgctgcgcgctttgccggcgaaacgccgggcaacgtctactcgcgctacaccaacccctcagtgcgtgccttcgaggagcgcctggctgcaatggaaggcgcggagcaggccgtgggtacgtccaccggtatggcggcaatcctggcagtggtcatgtcgctgtgcagcgccggtgaccatgtactggtgtcgcaaagcgtgtttggctcnaccatcaagcttgttcgagaagtacnttaagcccttttggcgtacaagtggacta

SEQ ID NO: 694262 - DNA, 275 bp, Homo sapiens
  misc_feature (30)..(30): n is a, c, g, or t
  misc_feature (55)..(56): n is a, c, g, or t
  misc_feature (220)..(220): n is a, c, g, or t
  misc_feature (226)..(226): n is a, c, g, or t
  misc_feature (242)..(242): n is a, c, g, or t
  misc_feature (258)..(258): n is a, c, g, or t
cataataggttcaccgctagcagaatatgngaaacaaagattagagtggaaatanntaagaaaaggaaaagaagagaatagataaattaaaagtttttttacaggtcagcaaaattgacaaatttttagctagattgactaaaaaaaaaaaaaaaatactcaattttccaaattcagaattgaaaattgagggctttaagctgggcccagttggctcacncctgtnatcccagcactttggnaggccaaggctggcgnatcacgaggggaattct

SEQ ID NO: 694263 - DNA, 443 bp, Homo sapiens
taccaaacttttttttttttattcgttggagttttttgggctgactgggcccggaccaattcaaatgggggctgggttcacacaggttacagggggaggcaaaaggggaaaaccccccacagcctccaaagcgcctccattggaaataaccccccatgcgctccttcgggccgaacccctgttaactgggggatcctggggatgctttgcacctggaagggcggggcatgaaagccccactcccggaaatgtttgtagtccccggaatggggatcgcattccagcacatactgaaatcctcggtagcccggaaactgggagcaaacccagttggaaaagaaaaaaggcaaacagttccttttcagagaccccagcttggggatcaacacaggggcaaagggatttatgcccacccccacaattccagccatcctggccttttt

SEQ ID NO: 694264 - DNA, 250 bp, Homo sapiens
ctgcattggacgtgaagccacagcaggtggctggactgctggcctgttcctaatgagctacgctgggctttgaggtagaggttggggtttatgaaccacatctctggctgaaagaccttgctgaggctctgtaatgttctgtggccttgggattaacctatttctcattaccgatctaattttctattctgtggatcagttatgccattagacactattgtttaccattgggccttatgaacgttgccta

SEQ ID NO: 694265 - DNA, 746 bp, Homo sapiens
tcgagttgatttgttcagttgttttaaactctcatttgagttactgaccaaaagacagggtaaatagagctctctcaagattctcagctttatgtttatggttccctctcaatacctttatgcaaagtgaaactgaacaccaccataagaaaatcctggcttagggggaaaagaggcaaaaagacctctaaatatatgtcaaggtataacccttagttctctcaattctccttacatcgtggtgacaaatggaggggcaggaatctcgtaccctaaatatgactgttggaggtatcgagtgcgtaaagaagtcattctccgtggttcactatcgttgtgggaaaggcaatgaaacagcttagcagaaggagctatcaccaggaacctcaagtgatggacaaggatagtctcttgcgacaaaacttagatgacaactttggaccggagaggcaagatccacacaatacctggacatggcgcgcatgtatcgaggaacacacgaattaatctatcaggatgtcttggcttaacaaaccctggggacaatcgctcgaaacaccaaagatagagcccctcgcgcgccgtgcgtcatgatttaaaagctatttcctaccccccactctttcagggaataccctttttacctctttgccacttatatttcctggacaaccctccaagtagtcggcaaaccagggccaggactgcttggaaaatgcccagtctactccccattatgtataaag

SEQ ID NO: 694266 - DNA, 962 bp, Homo sapiens
gccactccaccttactaccagacgaccttagccaataccatgtacccaagtaatgtataggcgatagaaattcgaaacctggtcgcaagtagatagtaggtaccgcaaggagaaagatgaaaaatgatagccaagcataatatagcgaaggactaaccccgtataccgttctgcgatagagtgaagttaactgagagagatacactgttgcaaggagagccagagctaggacccccgaaaccaggacgagctacctaagaacagctaaaagagcacacccgtcgtatgtagcacagaatagtgggacagatttataggtagaggcgacgaacctaccgagcctggtgatgatgctggttgtccaagatagaatctgtagttcgagcttgagagtacgcccacagaggcctctaaatccccttgtaaatctaactggtagtccaaagaggaacagctcttaggacactaggagaagaacctctgttgagagagtaaagaattcaagacccatatgtaggcccctgacgggctactacaacccttcgctgacgccataaaactcttcaacaaggagcccctacaacccgtcacatctagcatcaccctctacatcaccgcccgaccttagctctcaccatcgctcttctactatgaacccccctcttcttaagaacatacccatggacaacctcctactcctcaattgtacacattctaatcgcaatggcattcctaaatgttaccgaacgagaaatactaggctatatacaacctcacgcaaaggccaacggttcgtaggcccctaagggagctactaaaacccttacgcaaccaagcaaataaggaagacgtcaagctcaaccacaagttacctaaaatcccgaagttacctggatcctcaaccaagtgggccattcatagcgattgacaacaccgctctacgcaactgaaactctcccaag

SEQ ID NO: 694267 - DNA, 440 bp, Homo sapiens
cagaacaaagttcggatgtctgggctggggtgtccacattcatgtgtgtaaggccccttgactgtgaaaaaatggaaatggagatggagggaagaaggggcatgggcatgggtttaaagacagggaccaaccccccccccattccccacaggggccgggccgcgggttgcgtcacggcttgtaatcccagtactttgggaggccgaggcaggaggatcacctgaggttgggcgttcgagaccagactgaccaacatggagaaaccccatctctactaaaaatacaaaaaattagctgggtgtagtgacgcacgcctgtaatcccacctactcgggaggctgaggcaggagaatcgcttgaacccgggaggcagaggttgtggtgagccgagattgggccactgtactccagcccaggcaacaagagcgaaactccatctc

SEQ ID NO: 694268 - DNA, 590 bp, Homo sapiens
  misc_feature (45)..(45): n is a, c, g, or t
  misc_feature (68)..(68): n is a, c, g, or t
  misc_feature (171)..(172): n is a, c, g, or t
  misc_feature (180)..(180): n is a, c, g, or t
  misc_feature (188)..(188): n is a, c, g, or t
  misc_feature (191)..(191): n is a, c, g, or t
  misc_feature (214)..(215): n is a, c, g, or t
  misc_feature (217)..(217): n is a, c, g, or t
  misc_feature (220)..(220): n is a, c, g, or t
  misc_feature (238)..(238): n is a, c, g, or t
  misc_feature (240)..(240): n is a, c, g, or t
  misc_feature (256)..(256): n is a, c, g, or t
  misc_feature (295)..(295): n is a, c, g, or t
  misc_feature (297)..(297): n is a, c, g, or t
  misc_feature (302)..(302): n is a, c, g, or t
  misc_feature (338)..(338): n is a, c, g, or t
ggccgagccggggctatttctggcgctggcgcggtccaagaaggncatcccagccatcactcttccanctgctccttagagaagggaagatgagtgagtcgagctcgaagtccagccagcccttggcctccaagcaggaaaaggacggcactgagaagcggggccggggcnnggccggcnaagcgtcnganggagcccagcgaagtgccaacanncntangagacctcgggccgaccnanagggaagcaaaaacangggtgctgccaagacccggaaaacaccacaactccaggnanggaanccaaggggcagacccaaaaaactggagaaggaggangaggagggcatctcgcaggagtccatcgcgagcgaggagcagtgacccattgcgtgcacgccctgcatcctcaagctgggaggaggcaggcattcccatttctggggaactggaaccagggcattggcttcccgatatccaacaaagaggacacgacagaagagagcagacaaaccaaggaaaacaccacaaaaaaacaaccaaacagcaaacaagagacagacacaagaccaaaaacagaaagcgagtaag

SEQ ID NO: 694269 - DNA, 636 bp, Homo sapiens
  misc_feature (45)..(45): n is a, c, g, or t
  misc_feature (68)..(68): n is a, c, g, or t
  misc_feature (171)..(172): n is a, c, g, or t
  misc_feature (180)..(180): n is a, c, g, or t
  misc_feature (234)..(234): n is a, c, g, or t
  misc_feature (237)..(237): n is a, c, g, or t
  misc_feature (260)..(261): n is a, c, g, or t
  misc_feature (263)..(263): n is a, c, g, or t
  misc_feature (266)..(266): n is a, c, g, or t
  misc_feature (284)..(284): n is a, c, g, or t
  misc_feature (286)..(286): n is a, c, g, or t
  misc_feature (302)..(302): n is a, c, g, or t
  misc_feature (341)..(341): n is a, c, g, or t
  misc_feature (343)..(343): n is a, c, g, or t
  misc_feature (348)..(348): n is a, c, g, or t
  misc_feature (384)..(384): n is a, c, g, or t
ggccgagccggggctatttctggcgctggcgcggtccaagaaggncatcccagccatcactcttccanctgctccttagagaagggaagatgagtgagtcgagctcgaagtccagccagcccttggcctccaagcaggaaaaggacggcactgagaagcggggccggggcnnggccggcnaagccggcttcggcggtgagtcccggagcaacacgcgcgtgtgtaggggagtcnganggagcccagcgaagtgccaacanncntangagacctcgggccgaccnanagggaagcaaaaacangggtgctgccaagacccggaaaacaccacaactccaggnanggaanccaaggggcagacccaaaaaactggagaaggaggangaggagggcatctcgcaggagtccatcgcgagcgaggagcagtgacccattgcgtgcacgccctgcatcctcaagctgggaggaggcaggcattcccatttctggggaactggaaccagggcattggcttcccgatatccaacaaagaggacacgacagaagagagcagacaaaccaaggaaaacaccacaaaaaaacaaccaaacagcaaacaagagacagacacaagaccaaaaacagaaagcgagtaag

SEQ ID NO: 694270 - DNA, 1210 bp, Homo sapiens
gccttatgcacgcctgctgctctagtcagtttatgatgccccctcaatggcattaggacccgctgtagtacgtgtggaggctccgactacacattgggcccgtccgtagccctcagtgtcgcactactgccaaaggcttgcaggcttggccactgctacagtaggctgttggcactccttatgatgctgcgctggctgatcttcttctgaaccctgtatgctctcgagcagctgtctcatcgtgagaccactgttcgcctgcaggctaggcacattgctcggcgccttggcatttcttattgtcacgccaccgtatgactatgcccttgcccggtacttgacatctgtccctgcgtcatgaggccgcaggtcctgcggtcagccttgcgggcgttatccctccatctcatgggccaagcggggcacttgtcccgcaagactgctgacattgctagcggatctcgatttattccccacaggtgtccctttggaacccttggcacaccgagacgtagacacacttttggcggcttgtagccagctctatcgtaatttacacagcgagattcaatgtgcaactacggcttcgattgcagcacgtttccaccttgtagtccataggcgcttcgcttgactggcacaggcataacgtacctgaggcttgcggtacttaaaccactttcattaacacgagtacaacttggctatgaataacacgcttctattcttggtacaccgctcctgaaattctcaaaacagtcgggacgtgtgcaattcccatcattctgggcactttccgctcccttttgtgcgtggtcccccgagagagctcaaattctacacccaaggcgtggacccaaacggcttggggtgatagtataaccctgttgcccattcaatcgatgctgcgctagagcattttcgcgcgctgtacaatacggttttgtttacgcacccactttttgtgcgtctccgtctctcgcatctcattggtccgaactgtggctcagcccggaacggtcgttttcgcgcctttggggccctaaccgggccttgggacgtgtagccgctctccccttataggtcacccttacaggcgaccttttggttgcccccccgccttctgcatcgccccttttcgtttaagccgcataggcccccgtcgcattcccgttactccgtgaaccagatcgctttgccacggccattg

SEQ ID NO: 694271 - DNA, 456 bp, Homo sapiens
  misc_feature (430)..(430): n is a, c, g, or t
cgggttcttcgaccgggaacttctacccacctttcaaaactcagtggagggccgggcgcagtggctcacacctataatcccagcaccttgggagccgaggcaggcagatcacctgaggtcaggagtgggagaccagcctggccaacatggtgaaaccccatctctactaaaaatacaaaaattaactgggcatggtggcacatgcctgaagtcccagctactggggaggccaaggtgggagaatcatttgaacccgggaggcagaggttgcagtgagccgagatggtaccactgcactccagccggggtgacagagcaattggctcttgaaacaaacaaaatcgtgctgtcggtactctttggcagcttaactttttaaattaaatcggatctttggaaagagtttccttatcggcatcaagagaagggnttcaagaggggagagtcaggaagaga

SEQ ID NO: 694272 - DNA, 1041 bp, Homo sapiens
  misc_feature (341)..(341): n is a, c, g, or t
  misc_feature (382)..(382): n is a, c, g, or t
gccgaaacgcgaagaaggaagctcctgcccctcctatagctgaagcccatacgacgaagcgctttacaggtccaccgatagggctgtgtttatcggtgtccacagtccacaaaaagaagaagatccgtatcgtcaggcagcttccggcggccagaaagacactgcggactccggatacacgcccaattatcctcggaacgagcgctcccaggagaaacaaggcttgactcacgtatgctatcatccctgttttccgggttgaaccaagtgtgagtctgccagtagaagacatatagaacgataacaatcacaccttgctattcacttggtgtgatgttaanagccaagcaaagacaccaggattaaatcatggctagtgaangacagctgtatgacaattgactgtgggccatacggtcaagcaccactgattcgggcgctgatggagagaacgacaggcaatatcgttcggactaggctcctagattactgatcgcttagcgattgtttgccaaccaatacattgggcactcatctattgctcgatgtcctagtctgcctatattcttgaactactagtatagtatacttgtatcgttttcactcgaagtaatcagatagaatgcgacatccggatgacgagaagatcaccccgaggagcgtgttgcacccattcgtagcggaggggggataattgacgccttctcaccacaataggccgagtcccttgcggtctggaagcgtggcctggccacgggaagctgtactttgtacctacacctcaggtgaaggaattccgtcggcacgaaccagccgagataggcaaggctttcaaaacaaaccaacgtgaccagcatgcgcgggagaatcacgctgcgttttaacatttaacagggggaagaaagacctcgtgcttacggttcggtcccttgcgactttcagacgccaagagacatggaccactggttgcttccaggctcctcccctggtgatgaacgcagctacggaaccctgcctgaacggccatcggtccatcaccca

SEQ ID NO: 694273 - DNA, 205 bp, Homo sapiens
ggagaagatctgcagctgaggagagcgcaggaagagatgaattctcagcaggggagaggaatggaacagatgctcgctcgtccctgggccagtcagcgtcagagaacttagggggacacagtgtccgtatctaaaaaggagaaaaaccggaagcgtagggaccgcaagaggaagaaaaagccccagcgggtgccgaggggtgtcc

SEQ ID NO: 694274 - DNA, 491 bp, Homo sapiens
  misc_feature (4)..(4): n is a, c, g, or t
  misc_feature (7)..(7): n is a, c, g, or t
  misc_feature (130)..(130): n is a, c, g, or t
  misc_feature (174)..(174): n is a, c, g, or t
  misc_feature (176)..(176): n is a, c, g, or t
  misc_feature (195)..(195): n is a, c, g, or t
  misc_feature (197)..(197): n is a, c, g, or t
cccnccntccagtcatacgctgagtccggtggagaagtaccgattgcttgttggtgtcgctgttgatcacgtaggttgctagatcttacccgaccgttaagacccatcccaaggaactctagtcctcaantgtatggcttgtctgcaggtctcaaaaactctgctaagagtccntnattccccgctagtctttcnangtggtctcatctacgagctgggtggcccaaattcccgatttcctcaattcatcaatagacactctgctttttgacattccgaatctggttgaggccatggaggttcaaactggcatggtggggtgcgcaggccacggcgattccagtgcgcaggccccagcagccatagagcggggccaattctgctggccgcagggcccaggtgagcaatgttttcaatattcctaggctatgtagttcatctgttttccaaactgtaggaaatctccaaaatttttccaatttattttttgg

SEQ ID NO: 694275 - DNA, 348 bp, Homo sapiens
aaacccctgcccttttttccagtcccttccaagggtccccaggtgaaaacagcctgccctgcatcccagggtttggtttcagggtccagggccctgcgctgccccctccctcgtgcttcaaccaaaaaaatgggggtgcaaatagggtgttttgggtcccaaaaacccaggccccccggcgcgatttttctgggcaagagggcagggctcccccaccttccttaaccggggtgggggtccaggtcccccccttgcccttgtgggaaaatccctgtttcaacaaaatgggccaaggtcccccaggtttcccccgcccgtgtttatttggttaataaaactttgggtcca

SEQ ID NO: 694276 - DNA, 212 bp, Homo sapiens
agctgcacaggaaggtttgtcagcagcatttgggtggatgcctccctgtgctctgaggccctgggggcacttctaaacaggcaccatgtccctggggaaaacccaacaatccaaaccgccttccgctttgtgaaacaagagaaccaaagctcaggacacataaaagctaaagttggcacggcagggccttttttaaggccccgaaggtaact

SEQ ID NO: 694277 - DNA, 445 bp, Homo sapiens
  misc_feature (8)..(8): n is a, c, g, or t
  misc_feature (35)..(35): n is a, c, g, or t
  misc_feature (90)..(90): n is a, c, g, or t
  misc_feature (116)..(116): n is a, c, g, or t
cggcgggnccgcgggagggtgggggtgtcacgtgnccgtgccctggcgaacttggcctgcgagcccgacggtgcggtcagggccacgcgnggcagccccttctcggagccaccgcngcggccagccaacagccggcttctttcggtttgtcaggagaggccatgggtcagcgtctttataatgtaaatccgcccttggctttcgttaaagccgcagaactcaaagatgagggccgatcttactttaaaaaaagaaaacaactcagagagttaaaaatcccaactacctaccaggttaaatacataacaaagttaatattcccaactcggcacaggctttcggttcctctcggctccgtgtgttataaaatatttaagggcagattttagtaggaagctggtaactttgtaagttaccgaataaaatgaaaatcggttttaccttt

SEQ ID NO: 694278 - DNA, 752 bp, Homo sapiens
  misc_feature (529)..(529): n is a, c, g, or t
  misc_feature (534)..(534): n is a, c, g, or t
  misc_feature (545)..(545): n is a, c, g, or t
tggtacaggcccggaatcgttaaggatatcgtggcacgccgtctcgaggcgccgaaatgcagagagaggagaagcagcttgaggcatcatgagatgcactgctgagtcaagtggctgatctgaaaaactctctggggagtgtcattggcgatgtgggagaacgagtatggctcggctgacctgggcatctgtcctggacagtgtgttgcctctgtctttctgagacagcatggaagctagcgtctgaatcgagaggtccttggatagcactgaagagagagatcatccgcgtgatatccgatacagccgagggtcactcattaccatcgtggctgttgatctccgagagccgatgatgaagatctcatgcggcagactgaaggacgggtgcctgttttcagccatgaggtagtccctgaccatctgagaaccaagcctgaccctgaagtggaagaacaggagaagcaactgacgacagatgctgcccgcattggtgcagatgcagcccagaagcagatccagagcttgnataanatgtgttcaanccttctggagaaaatcagcaaagaggagcgagaatcagagagtggaggtctccggccgaacaagcagacctttaaccctacagacactaatgccttggtggcagctgttgcctttgggaaaggactatctaattggagaccttcaggcagcagtggtcctggccaggcaggccagccaggagctgggacgatccttgcaggaacctc

SEQ ID NO: 694279 - DNA, 200 bp, Homo sapiens
  misc_feature (84)..(84): n is a, c, g, or t
  misc_feature (88)..(88): n is a, c, g, or t
tcattttggggaaactttccagagatcccaattaagtttgaccttaccggtgtggtgggggggtacttctgttaccgaagatgnaganctaccggcaaggaaactcggtactttcggttcaatcgtgtgctggcgcgtgaaaacctgaaggaatacctagatcagatctgcccccacgaagtcgctcattacattgcacg

SEQ ID NO: 694280 - DNA, 115 bp, Homo sapiens
ccatcgcttccatgccggctcattctgccttttctatcatccttcatctccttttcattcccctaactcttccatctctccccctacatgaaacccaaggtgccgatgcatagcg

SEQ ID NO: 694281 - DNA, 250 bp, Homo sapiens
atctcgagctctgacattcggcggacgacgcgtatcgattggcagtgaggggcgcaatgatctaggctataatatcggagatacgtagcggtactgtaacacctgactctagaatatagtagcatggcaaattaaaggcgtgatatcgatcgcgcgcagatctgtcatgatgatcattgcaatttggatccatatataggggccggggtaataattacctcaggtcgacttcccatgaccattcgaattc

SEQ ID NO: 694282 - DNA, 111 bp, Homo sapiens
tttgtgcgcgtgggttgtgggcgcctgggttgtgggcgcgtgggttgtgggcgcatgggttgtgggcgcgttaccgcactggacgcctcgcggcgcccatctccgccacaa

SEQ ID NO: 694283 - DNA, 369 bp, Homo sapiens
ctctcatctccacacggttatgtgagtgttgtttaatcagagatgatacatgatagccaatcagcatttcttaccagtgtgagcgcacacgttacgatgcaattctagccaaaaaaagaaatttttttgtttttggcttttccctagtctttgggaaagcaaatatacaaggatttccggtgggcttcgggaagtaggaacgggggttggaacgagccccacgtgccaccttttagtggagtggccgcttttgaaacagaatcccgggcctcggtcaccggagacccaacccctagcggggccaactccagtgaattcacccatttttctccttcaaagggcctttccaggggggagagagggagagag

SEQ ID NO: 694284 - DNA, 343 bp, Homo sapiens
  misc_feature (17)..(17): n is a, c, g, or t
  misc_feature (145)..(145): n is a, c, g, or t
  misc_feature (147)..(147): n is a, c, g, or t
  misc_feature (195)..(195): n is a, c, g, or t
  misc_feature (218)..(218): n is a, c, g, or t
  misc_feature (294)..(294): n is a, c, g, or t
  misc_feature (316)..(316): n is a, c, g, or t
tagagtatgtatgtttnggtttgtgtatgtggagtgtatgtgtggattgtgtgcctgtgtgtatggggtgtgtgtggcgtgtgtgtagagtgtatgttgggatgtgtgtgtggagcgtgtgtgtgcacgtgtgtgtatgtttgtntntgtgtagtatgtgtgtagtttgtgtgtgtgtatttttggatgtgtgtntatgggtatgtgtgtaatgtgtntgcatggagcgtatgggtgtgtgtgtatatttatatttgggagtctgtgtctgtggagtgcatgtgtgtagagtangtggaacccaccatggtacttntctcctgccgacaagaccaacgtcaaa

SEQ ID NO: 694285 - DNA, 327 bp, Homo sapiens
  misc_feature (13)..(14): n is a, c, g, or t
  misc_feature (79)..(79): n is a, c, g, or t
tgagatggagtcnnactctgtcacccaggctggagtgcagtggtgcaaactcagcacactgcaacctctgcctcccggnttcaagcaattctcctgcctcagcctcccgagtagctgggattacaagcgtgcaccaccacgccaggccaatttttgtattttcagtagagacggggtttcaccacattggccaggctggtcgcaagctcctgaccttgtgattcgcccgccccggcctcccaaagtgctgggattacaggcgtgacacttgcgcccagccgcaggccttcattttgcacaggagaaaagaagtcattcattttaaga

SEQ ID NO: 694286 - DNA, 886 bp, Homo sapiens
  misc_feature (809)..(809): n is a, c, g, or t
  misc_feature (816)..(816): n is a, c, g, or t
  misc_feature (823)..(823): n is a, c, g, or t
  misc_feature (825)..(825): n is a, c, g, or t
  misc_feature (827)..(827): n is a, c, g, or t
  misc_feature (829)..(831): n is a, c, g, or t
  misc_feature (834)..(835): n is a, c, g, or t
  misc_feature (839)..(839): n is a, c, g, or t
  misc_feature (842)..(842): n is a, c, g, or t
agacagagtttttttctgttgcccaggctgcagtgcaatggtgtgatctcagctcacttaacctctgcctcccagattcaagtgattctcctgcctcagcctcccaagtagctggcactacaggcacccgcctccatgcccggctaatttttgtattttttagtagagactaaatgtagtagagaagtctctttagtagagacttcaccatgttggtcaggctggtattgaacccctgacctcaagtgatctgccctcctcggcctcccaaagtgcttggattataggtgtgagccaccgggcccgccctagcccaggaatttgaggcagcagggagctatgatcatgccactgcactccatcctaggagacagagtgagccctaactctaattaaaaaaaaaaaaaagggaaactcagaaaggcccattgccaaaaatagattcttaaaacctcagaatcagatgtctcttagaacatcctctgagtttgtagatcctgagtcattaatgtggcaatcatcaagatattccccaagcccctgctctgtgctaagtactgtaccgggctggaaatcaaggggaatgaagtgctgagcaaatacaagcccttcctcatctggtcccttccgagcttactatgagccacatgcctcaggtacaccacagtcatcacaagtctctaagcactcagtgctatttcttacctcttacctctgcacacactgttgcctcttggaattctttccttctatctgcctaatgaacttgtacttaatcttaagactcaagctaagcatcactttctttngtcaccntcactcntnancnnnctnnaganccncaaagttggtcacactcccttcatagctaaggacagtgttttat

SEQ ID NO: 694287 - DNA, 477 bp, Homo sapiens
tcttgtgtctctgaatactgtggacagcatagagagtatgtgaggctgaccataaacagtggccatggggatactgtgtagcagggctatacagtctctgaaatggccagagaaaaccctcattgacctctatgcacaggttgtcctggaatggatagagctccgtgaattgggtgctgccaggtcacttttgagacagactgatcccatgatcatgttcaaccaaacacagccagagcgatatattcatctggagaaccttttggccaggtcttactttgatcctcgtgaggcatacccagatgtacgtcaccacgaaccgagcagagcagcaatagcccaggccttagctggcgaagtcagtgtggtgcctccatctcgtctcatggcattgctgggacaggcactgacgttgcagcagcatcagggctggcttcctcctggtatgaccatagcattgttccgaggccaggcacg

SEQ ID NO: 694288 - DNA, 434 bp, Homo sapiens
gtttccctttttcccctttttccccccccttaggggttttttcccttgggttaaaatttttggtttttcccccctttccccctttgtttggggtcccatttttccaggccccggggggggaatttgggatttggagttttccccgggggggattaaaagggtttggtttccctttccaaaatttttttaaattttttggaaattttggggttggtttgggttggttttttttttggccccccccccattttcccttcgccttccctttccgttgggttttgtttgccctttttggggttgggcttttttttgctttttcccaattttccccaaaaacccgggttttttccccctttttttaaggggttttttttttttttttaaggggtttttttttttttcttttttttttttttttaagggcttaaatttga

SEQ ID NO: 694289 - DNA, 139 bp, Homo sapiens
aaaaggttaaattttccggtatttgggaaaaggtttgtttaaaggagggcaaaacccgtttaaggggttttcttttaaaaaattaagggttttgggccctaaaaatttggtttttttaaaaaaaaggtttggattttga

SEQ ID NO: 694290 - DNA, 310 bp, Homo sapiens
  misc_feature (5)..(5): n is a, c, g, or t
  misc_feature (17)..(17): n is a, c, g, or t
  misc_feature (62)..(62): n is a, c, g, or t
  misc_feature (308)..(308): n is a, c, g, or t
aatanttaaaaattgtnagaatttaaaaattcaacagcaggccagatgtagtggctcactcntgctgggaggccaaggtgggtggatccgttgaagccaggagtttgagatcagcctggccaacacagtgaaaccccatctctactaaaaatacaaaaattatccaggcacggtggcatgtatctgtaatcccagctactgggaaggctgaggcacgaaaaccactcaaacctgggaggtgcaagttgcagtggagctgcagtggcaccagtgcattccaagcctgggcaacagagcaagacactgtntc

SEQ ID NO: 694291 - DNA, 354 bp, Homo sapiens
ggcggaggtgcatggctgcagtgagctgtaaccacaccgttgccctccagactgggcacagagtgagactgtgtctcttagaaagaaaaatgctgactgggcgtggtggctgacacctgtaatcccagcactttgggaagcagaggcaggaggactcttgagcccgggagtttgacaccagcctgggtaacatagcaagaccctgtctctacaaaaagtaaaaagtaaaaaagttagctgggcatggtggtgtgcacctatagttccagctacttgggaggctgaggtgggagaatcacttgagctgggaggtagaggctgcagggagccatggttgtaccaactgcactccgg

SEQ ID NO: 694292 - DNA, 256 bp, Homo sapiens
  misc_feature (11)..(11): n is a, c, g, or t
  misc_feature (15)..(15): n is a, c, g, or t
  misc_feature (25)..(25): n is a, c, g, or t
  misc_feature (33)..(33): n is a, c, g, or t
  misc_feature (37)..(37): n is a, c, g, or t
  misc_feature (64)..(64): n is a, c, g, or t
  misc_feature (97)..(97): n is a, c, g, or t
  misc_feature (115)..(115): n is a, c, g, or t
  misc_feature (120)..(120): n is a, c, g, or t
  misc_feature (123)..(123): n is a, c, g, or t
  misc_feature (127)..(127): n is a, c, g, or t
  misc_feature (135)..(135): n is a, c, g, or t
  misc_feature (137)..(137): n is a, c, g, or t
  misc_feature (142)..(142): n is a, c, g, or t
  misc_feature (158)..(158): n is a, c, g, or t
  misc_feature (170)..(170): n is a, c, g, or t
  misc_feature (175)..(175): n is a, c, g, or t
  misc_feature (181)..(181): n is a, c, g, or t
  misc_feature (201)..(201): n is a, c, g, or t
  misc_feature (204)..(204): n is a, c, g, or t
  misc_feature (208)..(208): n is a, c, g, or t
  misc_feature (210)..(210): n is a, c, g, or t
  misc_feature (226)..(227): n is a, c, g, or t
  misc_feature (250)..(250): n is a, c, g, or t
tcttgctgtgntggnggagcccccnccgatgancctncctggtgctggcctgagttcccagganctgtctggtggccctggtgatggcccctgaggntggagcccccatggccancccanccnggcnctgttctntntcctntcaccccatccccacncccctggtggcntgacncccacnccctggtggccccatccccnagntccncncgatatggtttttacnnctgtggatttaataaaaacttcnccagtt

SEQ ID NO: 694293 - DNA, 184 bp, Homo sapiens
caagcagtaagctctttggcccgtaaaaatactcattcaagttgataattgccagaggaaagaagaaatatttgagctagacagtgtagttaccctttagagtcattatgttaactccagcaaattgcaaagctagggcgggctcggtggctgacaccgtgtatccccgcacgttgagaagctt

SEQ ID NO: 694294 - DNA, 237 bp, Homo sapiens
aatggaatggaactgaagacacagctgccgtggagcagggtttatcctagatgatgtaagtatgaatcttcacccttagcgtgaaaaatccaccaacggcccataaaaccaaatgtgtaaaagactcagaaactcaactgggaaaaaagaacctgacaaaagccgttagtttagtgacgagatgagtagtctccatccaaagctgccaggagaccatgaatttaaaacttgcggccg

SEQ ID NO: 694295 - DNA, 503 bp, Homo sapiens
acagggtttctccatgttgcacaggctggtctcgaacttctcacttcaggtgatccgcccacttcggcctcccaaagtgctgggattacaggcatgagccaccgcgcccggccgccttggcctctcaaagtgctgggattacaggcgtgagccaccatgcccagcctaaaccatatattttttttttttttggagacagagtctcgctctattgcccaggctggagtgtagtggcacgatctcggctcacggcaagctctgcctcccgggttcatgctattctcctgcctcagcctcccgagtagctgggactacaggcgcccgccaccatgcccagctaattttttgtgtttttagtagagacggggtttcaccatgttagccaggatggtctcgatcttctgaccttgtgatccgcccgcctcggcctcccaaagtgctgggattacaggcgtgagccaccgtgcccggcctaaaccatattttttaagtgaaaatttgga

SEQ ID NO: 694296 - DNA, 138 bp, Homo sapiens
agaaggtgctgtgcacaatcgaggcgacacctactggatgcatgcgcaagctgctgaataggcattcaggaccacctaccccttatgccccacctgggattcaaatgaaagtgaaacatgttagatagaactctgtga

SEQ ID NO: 694297 - DNA, 147 bp, Homo sapiens
cgcttacccacggacacaccacgctctacccacggacacacccgctatacccacggacaaccacgctatacccgggacaacccgctactacccaggacaccacgctttacccacggacaccagctattacccacggaaaccagctat

SEQ ID NO: 694298 - DNA, 968 bp, Homo sapiens
ggagaagcagaagatagcagaaggaaatgtttaagagaactatgaacagaataatagtcctactctggtagcgaagcgttaacggaagtctgaggacaatcatccgggagatgctgatggctcgaagggcccagtagggagacctcgtctgggaagctacttcctcctgccaccttcccattcctggtgggggcagaggagtgtctgcagggaaacaagtttctcctctggccccgatggatgctttattcggatggcctggcaacaatcacgatttaaactcgcatcaccggctggagaccctcattgtgcgttcccaggcgcctggcaggttatttaccgcggtctcttgcccgtgactcacgcatacgtgtcccagggacacttcttctcctctcggagatgtgtgatgaactcccaggagaggggcagatgggagccagggcaagactacggcaagctctgcctgagcctttccactaaggcacgccaggccagaccaactagccacagcgtctgtcccacatctgctaagccctggctccccttgagccacacggcgactggaacagaccggctgacgaagagcgcagctgccccgctcctccaaactccagcgttctgctcgcctctgacatcagaggcccttccatctcatgaacgcgactgcggcctacgcacatcttctcctcacccccttccctgaaacccttgcaacataacggctccaacctctcccacaccccttaccatgcccaataacaccagaacgagccaaccaaaacaaccccaatgtctccaccacacctcaccacctcccaaccacaaccgcaaaatcaatccgcatccccattgcgcatgacccagatctgccttcaaaaaaattaccttttccccctgccctcctccccaataaaattccccacacagcgacagctcccacacaacacacaccacctctcacacaa

SEQ ID NO: 694299 - DNA, 968 bp, Homo sapiens
  misc_feature (408)..(408): n is a, c, g, or t
ctcataatccccccctccccccacaccaaaaaaccaccctaacccaaactgcacctggttcctgtctacattcagatttagatgaaagccacaccatcggaggcagcccagaggcccatgcggagatgttctggattcttcagacgcatagcttccatcgtgatgcaaactctttgactaactgcgcaacagcgacaccgggtacgcacactcatcacctatcaaatcccccctcccgcttcccatctgacccctccgccactcctactctacttccaaccctccacccacacttgaacgcccgaacttccgcccccgcccccgctgacacccatcgcctcatcttaccacacgcatcccgccccacccgcacacccttatttagtgctctcctactttaggccacanctaattcccaatcctatctccccccacttcccctacctccccgccgcctacactccctaccacgatactagctctctcgtccaccgaaccccacgctgcacacgactactgacccgcccaccgcgccctcgatgacccctctctcttcttgatctacctaactgctgtcccatccaccctcgccctcgcacgcttgcacacgctacatccgtccgcgcatccaccgccatcccacgcaccgacaccgcgcatcctacaacccaacgtccgccctctctgcgatttcctcctatgactcttgatactgctcacctcaacacatcccataccagacatatccacccgcactccccgctcgacacgcgatttatcgccgttcgcgcgcgctaactgctcgcgacgaatcgagattcatatcacgccccgctcccgctctttgaaccgcacacctttccctccttcccgccctactccatcccgcaccaacacatacactcttattatcgccacaccccgacatcgccacttttcaccattccacgctccacatccctcctccg

SEQ ID NO: 694300 - DNA, 144 bp, Homo sapiens
tgttaacattcgtcccaatatgtccagctgtcaaagccatcatatatcagtatatggaagagatttatcatagaattcccgactcagacccatcttctagcaaaacaatgcagatcatctccaccatccggacacgaatgttca

SEQ ID NO: 694301 - DNA, 263 bp, Homo sapiens
gacgggcgcgtgtccactgattatgaggggccttgtaggccatggcatgctgttaggacttatactaagctcggcgcgagccatatgaggtgttttaacagatgattgatgggactgacttccagctgagtggcatccaggaggtctacgtatcactgctcatggacagcagggaggtacgagaggaccttcgtctccctgagggagaccttgacatggagattgagcagacgtacgactgcggagacgagatcctgatcacg

SEQ ID NO: 694302 - DNA, 621 bp, Homo sapiens
gacctcccaaaaaggaagtttacaaataagcccagataatacagactacaataaatacctatctcttcaatgctcagacaccaaagaacatctactagcaccaacaccatcttggaaaacatgacctcaaccaacaaattaaataaggcaccagagaccaatcctggagaaacagatatgtgacccttcagagagagaattcaagatagttgtgttgaaggaactcaaataaatttatgatatcatagagaagaagtccagaattctatcagataaattgaggaagaatattaaaataataaaaagaattaagcagaaattctaaagctggaaagatgcaactggcatactgaagaatgtgtgattcctttaatagcagaatttatcaagcagaagaactagtgagcttgaagacagtctatttgaaaatacacagtcagaggagacaaaacaaataaaacaataaagcatgcccacacaatctagaaaatattttcaaaagagtaaatctaagagttactggaatttaagaagatgtagagaaagtgctatgggtagaatgttttttagagggataataatagagaacttccaaaacctagagaaagatgtcaatatcca

SEQ ID NO: 694303 - DNA, 159 bp, Homo sapiens
gaccagctttgagctccatcaagggtattttaagtaatgtcatttgagcaggactggattttaggccgaggcaaatatctacgtgtttttccccctcctctgctgttttatcatggtttcaaaacaaaaattttttttgggcattcccccctctggggt

SEQ ID NO: 694304 - DNA, 331 bp, Homo sapiens
gaatattgtaaacactgccggattttctgaggggaataaactatgtttcatgcagggggccaaacccataaactattttgctatcaattaaatcaacaatattaattaaaaacaataaaaaggtctgcagggttagctttgttaagcttccagaagtattcgttgtgacgatgttcctctgaaacagtgtcagtgttctcaggtctttctacacttaccaaatcacctgcatgtaccatgctttaaagaagtaacgctcagataacatgccacacggggaatccaaacgttagtacggggaaaggtcagtttagaattacagctaaggtca

SEQ ID NO: 694305 - DNA, 640 bp, Homo sapiens
cacctggctttctcgttgtagcgcacgtccccacggtgcctacccaaatagggccctgaattcccaccataacgggggctccatcccgcggaggtgcccgcagtttgccagccgacaccccctaggcccaacacttactgcgcggacatccctcttccatttaccaaaattctcccggcgcggtaatatgtaacgctgtcgtggccacccaacgacacttttctcggcggtcatcccggcatctgccccccgacagtggtaattgcgggttacccgccggttccgcgtacgcgccccctgggaccatcctcattcactcgttagggcctccacattacactttctctgaacacgcccgcgataatgattcaaaaatttccactgaattttagaaaaccccttcgtctttcgacgccgcaaatattccttaaatatatagaaatcccctcccccactaaccctcgggtgagagactatatttgagagcccccccgccctcatccaccaccacatgtcgcgacaaaccccctaattgacacttaatatccttcgacccacaataaaggagaagaatatctgaaccccccccaacgggttttaacccaccccctgggccccctaattttccccacaaaaagaa

SEQ ID NO: 694306 - DNA, 209 bp, Homo sapiens
gtactagggagacatgtcaaagaggagccagtcgaaactacgacagggtcaattgaagtagaaccatgactttctgccggtagaaaagactatggggaagaagttacctgcaaggtacagcaactccagagtcatcaaaaacagaaagtggacagcaggacaaagagcaaggattactgcaaagtaatatttccatatgagacacgcga

SEQ ID NO: 694307 - DNA, 1175 bp, Homo sapiens
gtctccctccccgttgtgttatgatcggggttaacaaatgttgaataccactgtacccctgttagttgtgtattcaaggacacccagtctccggaagtttttatgggggggaccaccgctttagttgagagtatctttttgaaaggggtattgccccaccacagagatttgtggttcaccccaagattagacgaccgaaagggccttttgtgttttgaaaccgtgttccggagtcccacatgttgaaacgttgattgatatccggggttctccttgataaaggggttattaccgggagcgcccttttggggggtggcccccgatatttttctcgggccatccagattggtgcccgggcgccctaatggggctattaatgaggcccctatgtgcgccactcgggggggttctttggtcatgggcgggccccccccccgggggggctttgggaagtgcatggtccctctcgtggctcaagataaagctctgtcgcgcgcttttgctgcgccgtggtaaaagaaaaagagttgcttgggagctcaccctggatgtgttgaatttggaaaccttgtttactcgagaaacttggggcgacaacaagaggctggggcgtgggcgcgcggcgcggcgattatgtggtacaccccgcgacagggtgtttctcaaggaatctcttgtgtggagcacctgcggtggaagacttgtaaccgtggccctccgcgtctgcccgttttctcccagaatgcttctcaagatctctcaaagtggttgcccgggccagaagagcgttgagtcggagctggagcctcccaggacccctgccggcccggtggtcttcttgccccacagtctgagctgttgtctctcgtagaaccccgagaggagataaacacaaagagccagacccttgtctcctctggggggagccaattggccccttgtgctggtaacaccagccagctcccgaagagatctccacccagaagagattcccacagcccagctcccagcgctactccagagcttgcccaagagggggcgggccttgtggaagaactccttacacactggggccaccacactagagatggggcagaaacttgtttgcatctttgtcccccagcaaaggctacaagttacctccttccaattgataattaaccctttttgaaatg

SEQ ID NO: 694308 - DNA, 265 bp, Homo sapiens
  misc_feature (91)..(91): n is a, c, g, or t
  misc_feature (177)..(177): n is a, c, g, or t
  misc_feature (224)..(224): n is a, c, g, or t
  misc_feature (245)..(245): n is a, c, g, or t
cttactcccaacactttggaatgcttcggcaggattgcttgagcccaggagtttgagaccagcctgggcaacaaagcgagacccccatctntacaaaaaaaaaagtttttaagttagctgagcatggtgacttactgggcccctgtagtgctagctgctgggaagctgaagcaggangatcatgtgagcccaggagtttgaaactgcagtgagctgtgattgtnccactgcattctagctttggngacaaaacaaaaccctatct

SEQ ID NO: 694309 - DNA, 725 bp, Homo sapiens
  misc_feature (275)..(275): n is a, c, g, or t
agggagatgaaaggtgactgcagtgaggatttgccctgtgtactcgcctctgcaagatccacatctcagctgcacaactggctggcttgtgtgtgagcctcagttttatcatcagtaaaatgggggaataatcatatccagctcagaggtttaacttcagcctagtgcacggaagacatggtaaatggtcatcgcttctcccttgaatggaccgagggcccccgactcccatagcactaccccataaagtctaggctcccgacttcggcattcangccttcagtgataaatccaggcccaccatccgtccccacaccacctttcacacaccccctgcccccaccctcgcaggcctcttattttagctgcacatgctctccctgcctccgaaatgcttgcggcctttcctttccatttattgacgcccttgtgttctctctgagcagcccttccctgtgtccctagctggagttcctcactccctcctcagtgtcctgaagcttcttgttagagctgctgcagccacttggttgtgtctggaagcaagtctgcagcctctggcttccttgcgggactgcaggtgacttgaaagcacagctggtttccaggaagctggctttcgtgccaatgggcccaggggttaaagcaggcacagttccagcaactggtgagtctccaaattcataatgtcaagacctcagagaatttaaccatgacccactggg

SEQ ID NO: 694310 - DNA, 246 bp, Homo sapiens
tcctgatcgcatttagaccacatgcatttaaaatttttttaaaagtataaaaacagattcaaaccaaaatcatacaggctaccttccctgatcaaataccatatgataaagatattaactataaggatgaagccaaaagagtattatttgaaaagattaataaaacagttaaacccttcacaaggctgatcaaggaaaaaagagaaaaaacaccaaacacaaattaccaatgtctaaatgcaatca

SEQ ID NO: 694311 - DNA, 229 bp, Homo sapiens
acatctcctggaggagcatggagcatagcactgcggcaggagctgattgacaatcagacacgcatcactcaggaggccggcagtgtatctcctgcgtattcaagccaggtggcagcaactcatatcattctcctgctggacactgggtcagaagcgtaccaggcatgtctggcagcaagcagttgccagcaagtttcatggttgtacccgtgcaagcgccatgcaactc

SEQ ID NO: 694312 - DNA, 301 bp, Homo sapiens
ccccccccccccgggggtttaaacgggcttccccttttttggggttttttttcccccgtttaccccaaaggggaaacccccccccgggtttccggggtcccggccaacccccccggggggggcttgggttaaaaaagggggttttgggggttgccgggggaccccccccccttttttcccccccccccccccaaaggggggtttttttttttttttttgggaaaacccagggggttaaaaatttttttttctggtggggggcccaaaccggaaaaaaaaccgggggggggggtttttttta

SEQ ID NO: 694313 - DNA, 82 bp, Homo sapiens
  misc_feature (75)..(75): n is a, c, g, or t
  misc_feature (77)..(77): n is a, c, g, or t
tggaagccaacccaggcaagttcaagctcccagccggggaccatgcaggagagaaaggtgttcgtggagcggatnangaggc

SEQ ID NO: 694314 - DNA, 254 bp, Homo sapiens
aaggactcccgtgaatgtgcagccacgccatgatgctggacggcgccaacaagtcgatcaaccgcatcaccatcgacggtgatacctcacaccaaacgactgctgacatgctgcatcgccaccggaccaggccaattctgccgagcaatcacttccaccgacaggtccattgttcgcgagcgttgaaacatggcagtgtttgacaatgtgcatggcacgtggcccaggccatcgtgcgtgacggcgagggcgcg

SEQ ID NO: 694315 - DNA, 662 bp, Homo sapiens
cgtggtttgtgtggtgggaagggttttttttgtagtggggggtgttgtggttgttgggtggttggttttgtggttttgttgttggcggggtggggttgttgtgttttggtggggttgtttgggtggtggttttgttgttaggggggggtacttgtgttagtgttctgggtgtttttgggggagttgtttttgtcgaggtttttgtgtttggtgttttttctcgggggtgtttttgggtgtgttgttttttttttttttgtgtgaagggggttgtttttgttttgcttggtttttgcgtttgttggggggggttgtttgtttgggtgtcttgcggctctgttgggggggtgggttattttggtgcgggggggggttgtgttggtttttttttgggggtgtgggggggggccccgtggttgtagacgaggggtttgttgtggtgttgtgtgttttttgtgggggggtggtttatttggtctgggtggggtttgggggtgttggggtttgatggggagttgttgaggaggagtggggtgtagaggaagaggggtaaggtatagtaattaaagggatggggaggaggagttaatgagagtataaatattgaggaaaaatttataaaaaaaaattaacatgtcgaacgcctcggcccagtcgactct

SEQ ID NO: 694316 - DNA, 88 bp, Homo sapiens
cctcggtttctcggctgctgggtcggtcccgaccacagctggggcggcctatgtcgagtggcgcccatgggaagagggctcagctcgc

SEQ ID NO: 694317 - DNA, 144 bp, Homo sapiens
tctgccccagcctcccgagagctggccgagtgcaccaccacgcccggtctactcaagggttcttgagttaggcattctaagaaagagaatttagtacttcaggacagtcagcaagagaactcgatattgcgtggccagaaggca

SEQ ID NO: 694318 - DNA, 238 bp, Homo sapiens
gcatattagagatctgtagagaacatcaggaaattgcagccactttatccagatctgattacatcttgcagtagactcacttggtgatatttctgaaatgtggtgggttcatgattgattttggattctgtggtgtttcctgctttgtctctcaatttgatggttatgtcccctcttcttacattcttgtaccatgttataatatccacaaagtaatgatacatgcagaatgggctct

SEQ ID NO: 694319 - DNA, 693 bp, Homo sapiens
taacataagaggctggggctggcatatctgaccaaagtgaagaagcagagaaggaggtggatgtgaggcgacccacgcaaggactttgggaccagaacacagcatgactctgacccatggcttttcatggagacacacagggacaagagacatggcaagagtatattattgttaaagggcagtattaagagtgaatcatacacaggatgtattgaacgtttactatatgatcagagctgcaccagtatcagctcatctaaacctcgcaaccctatgagaggcactgttactatgcccattttatagacaaggaaactgaggacagagaggttgagtaatttgctcaaagttacacagcagaaaagtggcaaaccaatcttgcctggggctgctgacccgggagcccctacttttgactgctggccatgctacattgccgcagctccctgtgagcaaggagatcccatgtaccgtcctagtttgggccactggagagaaaagagtaatgaagatttagatttattcagtaaaggaagacaaaggggaagaagataatttgcatttatgtgtcacatactgggtatgaatggttcttcatttaatgtttacatcatcttcgttttatcaatgctgaaactgaaaatagaggaagttagaggacttgttactctacgctgcttccaagtggtctga

SEQ ID NO: 694320 - DNA, 202 bp, Homo sapiens
aaagtttcaacattctccccagacgatctagaagggtcttcctcctcatccaggtgtctttgaaaatttaacctgagagacagtttcacggccatgagtgggaagtggaggtcggacattacttgttatacctctctgacattaacattaacataaactttaagtccgatgagaaacgttttactaccacggtgctataacg

SEQ ID NO: 694321 - DNA, 411 bp, Homo sapiens
tgtcctttgggcatcccctgtgcactccagagctcctgtcccttctgggccggcccacatctgtgtacaagccttgttttgtcccagtgccattttctacacttagagttcctctgctgcctctcatatttccatttaaggccctctcgagaggttctgttctcctgcccagcagccattcccttcctagtttaactagaactccatttctcatcctgccaggaatccagccgtggagtgagcttcagcaagcctctctgcagtctcttgtctgctccaaaactgtggcctctggttgtgagaaatgggcatcctgagtcagtgagagcagtagttagcttgcagcagcttccccctctcccccctgagttgagccttttcttctgagctacaatcaatcgctctccctgt

SEQ ID NO: 694322 - DNA, 281 bp, Homo sapiens
ttttgatggataactaccgatttgcacatacgacatgttgagtctctggtgaacgagtatgatgatcatggagaggttatcatcttatttcgtccttacacatctcactaaccacgttagaggaccagactgtggcatatacagagccaaacaatgaccagtggcaaaattaaaaagtttctccaggaaaacattaatggtatctgccctcacatgaccagaagacaataaagcttcgatacagggcaaggacttatttatagcttactatacatgtggac

SEQ ID NO: 694323 - DNA, 756 bp, Homo sapiens
  misc_feature (167)..(167): n is a, c, g, or t
  misc_feature (171)..(171): n is a, c, g, or t
  misc_feature (175)..(175): n is a, c, g, or t
  misc_feature (179)..(180): n is a, c, g, or t
cttagtctgtaggagcagcgagctggcttgaggacccggggagaccctcaagaatcgacccatcaggacgccagagctgcttcagcggtgaccaccttctccctctaacacattcttcccttcttcacaaacggcccatgtcagacgaaggctcaagggggagccgnctgncccngtgnngctgcccccgtgcctcccagtggttgctcttcagtggggctggctgtgctggctggctcctctggctgggtggctcggtgcaattccctggcccccacgcaacctccaatggtcttgctgcagatggccatcacctgcttgtggctctgaagagccagaccctcctccagaacctgatgagtgaggatgatgtgcgtcagtgtgctgcatggaggccatgtcggctgccttcctgaggccagcggtgaggcaggttggagcagatgaatgatgctgcctccgagtgctgtcacagcccatgccccccactgctggggaggcctgatgcaggctggccgaccatgcaatgagcgatgagggggccctgtgtgctgctggccgacctgtgtgagaacatggacaattgcccgcagacttctgccagctgtctggcatgcacctgctggtgggccggtacctggcggcggggggctgcgggactgcgggtggctgggcggccagcctcatcggcacgtgcagtcagaacgtgcagccatccaggagcaggtgctgggcctgggtgcctgcgtaacctgc

SEQ ID NO: 694324 - DNA, 882 bp, Homo sapiens
attaatcccctggcccaacccgtcatctactctaccatctttgcaggcacactcatcacagcgctaagctcggactgattttttacctgagtaggcctagaaataaacatgctagccgttttagttccagttctaaaccaaaaaagatagggacgcctcgtcccgacagaagctgccatcaagtatttacctcacgcgagcaaacggcgatccataatccttctaatagcatatcctcttcgaagcaatatactctccggacaatgaagcataaccaatattaccaatcaatactcatcattaaataatcagtaaagtggctatagcaattaagaatctaggaatagcccccgtttttcacttctgaggtcccagaggttacccaaggcacccctctgtacactccggcctgctttgcttcatcacatgagaaaaaagctagacccccatctcaagtcatataccaaatctctgcccctcagtaaacgtaagccttctcctcacgtctctcaagtcttatccatgcatagcaggcagtttgaggtggattaaaccagaaccagtacgcaaaatcttaaggatacgcctcaattagccacataggatgaataataagcaggctctacgtaataaacctaaaataaccattcttaatttgaccctatttatatgaatcctaaactacaacggattctagtaatcaatttcactccgcgaccagaccttataatatctcggccctgaacagtaaaatgagtaaaccttattccatcacctcttttctagagagggcggcccgtaaccgcgtttggcccaggcgcttagagaacaaaaaaggttttcccaataggaaaccctgaaattataggaatccgcaaaaca

SEQ ID NO: 694325 - DNA, 805 bp, Homo sapiens
  misc_feature (167)..(167): n is a, c, g, or t
  misc_feature (171)..(171): n is a, c, g, or t
  misc_feature (175)..(175): n is a, c, g, or t
  misc_feature (179)..(180): n is a, c, g, or t
  misc_feature (205)..(205): n is a, c, g, or t
  misc_feature (274)..(274): n is a, c, g, or t
cttagtctgtaggagcagcgagctggcttgaggacccggggagaccctcaagaatcgacccatcaggacgccagagctgcttcagcggtgaccaccttctccctctaacacattcttcccttcttcacaaacggcccatgtcagacgaaggctcaagggggagccgnctgncccngtgnngctgcccccgtgcctcacctagggngttgtcatcgtatctagggaggcggcaggactggactggacggacgcgcggcgtccagtcgcgtcgtgnggggcatcgtgcgcagatttccgcggcccaccacacgtcgaaccgtccgaaggtgttgcatgcaagtatgggcatcgaccggcagggcctctgagaggagcgcagacacgctgcctccaggaacgcgatgagttgtaggagcaggcggtctaggtgggcatgcatggaggccatgtcggctgccttcctgaggccagcggtgaggcaggttggagcagatgaatgatgctgcctccgagtgctgtcacagcccatgccccccactgctggggaggcctgatgcaggctggccgaccatgcaatgagcgatgagggggccctgtgtgctgctggccgacctgtgtgagaacatggacaattgcccgcagacttctgccagctgtctggcatgcacctgctggtgggccggtacctggcggcggggggctgcgggactgcgggtggctgggcggccagcctcatcggcacgtgcagtcagaacgtgcagccatccaggagcaggtgctgggcctgggtgcctgcgtaacctgc

SEQ ID NO: 694326 - DNA, 1491 bp, Homo sapiens
  misc_feature (1463)..(1463): n is a, c, g, or t
ggctagaaatatttcccctacttgcagttggttctgtaatagcctataatacattgtggacacatagtttatgcttattatagataataggttagctttctttgccaaaaataagtagtaaactagtgtttcaacacttgatatatcttaaccttataaactatatatactttttaacttaccagaaaatgtcataattatacaaacagcaaagtctaaagagcaatacttactagagctcagcagccttcaataataataggggttgatacagacactgtggggtactaatattcttcatacgttccacatgtgaattattaggcacaggcaaccccaaagacaaagtccgtgatgagccatccgtggaagtgtgccagagttgaccaaagtgaacctgggaacaagaaggccccaatagcgatggggcttatttaagcattttagatgggaccaacaacaaaagatgtttaggactaaatcttatcctgcattagaaccctccctttggccctgggacttactaaaaatctacaataataaactgggggtcactgagcagatgggtttatggaaggttaaattacgattccttatcacaacgggttttaacagactcttaccttgagggcacaagattatacacccacttatttatcagcacgaaacatgttctggctacgcaggttagagaggaaaatcaccagaagaaaatccagacatacaagggggttaaaacaatatatgaggagaaagaaccagggtggggctcatataaatacccccagtaatccaacgacgtcctgagggccatatattaagtgggttacgcagttttagttcttccagccaagagaattaatgttgtcgggaccgcccgttaaaactcaaagcaacacatataacgtgcgcggtaacactacacaaacaaagttctgatgccacccaatttttggtaaccaatcttggactatgcggcaacacacgactttctgtgcacactgcattaaatgctcaaccacacagacgcaggggaaataggggcacgatagaggacaacaaatcaaaagcacaacggcggacaaccttggacacacacgccacataagcaaacagaacgatgataaataagggggaagcgaaagacaccacaagcaagacaaattgtggtgatccattcccataagaccactggagccccctctctgacacatacctcaacagactaaattacatgtgataagatagtaaaaagaattgtgtagacagacaggtcggactaccaaacatctatttatacctttgagtaagtgagatcaaaggtatcgtacactttgataaatacacgcaatacagagaatgatagatcatctatctgtatacacaaaaacgtgtggacatgtagtagacgcacaagaagctgatcagaacacaatctatcatatgagtgcgccacatagatncaacatacgtcatttttaacatacaaca

SEQ ID NO: 694327 - DNA, 345 bp, Homo sapiens
caaacccactccaccttactaccagacaaccttaagctaaaccatttacccaaataaaggttaggcgattagaaatttgaaacctggcgcaaatagatataggtacccgcaagggaaaagattgaaaattttataacccaagcataattatagcacggactaacccctatacctcctgcataatgatttaactagagatacctttgcaaggagagccaaagctaagaccccagagaccagacgagctacctaagaacagctaaaagagcacacccgtctatatagcaaaatagtgggagatttatagatagaggcgacacacctaccgcgcctcgtgatagctgg

SEQ ID NO: 694328 - DNA, 920 bp, Homo sapiens
agcggagtcacacagctacctggtaggtgactggaggtgttgatcagtgcttgtgtgggattttgctgatgtggccccaagcccgccgtccctccccagccctgccgatggcagaagaaacctcgacaaagtgaaattgggaggagtcaagagaaagttaaaagaaatattggtcatgatgaatagcagcccatggtgtttccgaagcccgtgagcctgtgatggaaacaggaaatacaaatggcccagcatctcatgagacctgaccacattctggtgcgttgcgcacatcaccttggagatttagcaacaggtaattcgacaggggagacgccctgcatcatctgcatacctcgtgaaggatctggatagcccgtgccaagaactaacagtcagtcccagactcggaggttcctgttacaagagttcagtggcaactggaatgcaacaccgatcaagtactttggtaatagcaatggaatgaaacgagtggaacatttagcatgtggtacgatagttaacatcgatttacttagtctatgttcgcgacatgtagtgcttcggttcgtggtggacagttcagtatgtgtgaggacccgagtctcgtgtcacccattcccaggcttgggggtaaagaggatcacccctcggaggaagtccaccgcatcacacgacagggagcgctgaataagccggtcctagggagtgggtccgatccgaggacatgagacgaggcgccactgcggggacacgttctgatcggtaacacatgtctgactcggcggggagaaacgtgcgatacctcgactgaagaagagaacgagacaaagaacaagcaaccgcaggaggaaagatcaaggaccaggactgaaaagaaccacggagaacaacagataacgatagaaaaagaacgaccacaa

SEQ ID NO: 694329 - DNA, 225 bp, Homo sapiens
  misc_feature (65)..(67): n is a, c, g, or t
ggttatacacagatagatgttattaaaggcatatggattaatgagattactatatattattactnnntgataaggagcaatttttgagcaccttctatgttccaaggacattttctaaggccttacatgtatcagatatttaattttcccaacaaggctacgaagagggtacagattattacccttatttttttcagaggatgagactgagacacacagaggcta

SEQ ID NO: 694330 - DNA, 915 bp, Homo sapiens
  misc_feature (44)..(44): n is a, c, g, or t
tcacaatccgtattacactcaaagacataagtcagtgtcacacnacccaaatgccttggtaaatttgttgtgcataacatatattgaagataccatagccacagcctgacatacgactacgtcccataatcacaactggaaggaaagtcatgacctaattggacaaaacaattcttaaagcttatatcagctgaaaacaaacttctgtcatgtcgctgcctttatccatcattaaaagatcgttaggattcaaaggtgctactctaataaaatacttcatgagcgcaattctgctttggtgatgaatctttcaaggcaatctcaacttacttctttaataaacatttaatatcaatggatctgagattaaaaggtctggggctgttttgcctcaagaagtgtgaactaatggcctttttccttatctggaggcaaaatcgttatccccaccacggaaaataacaccactaaccttgatggttgagtggaaagtcacattcacctgaaaggatgaatcccgattctcacacaattttggagaaaataccgcataagatcatgtgaccaaacgcccattaattggcaacagacctcaagagacccctgtattattaagcttccctcgatagtgatcccatccattgctgaaaacataaaaatgactaccacttatggaaagcggtggcataccctcccagattttacaactcacatgttacgctccaaaacccttattcacttttctctaatatcccaccgctacactgaccttcacctttatttattggaacaattggatctttatataacaatcgttccttttcctgtagactttacaccctcaatctgtatatgattaaaccccatgccaaaaagacaaacgtgcttaagttgtctgtgagcctctgtgtcaat

SEQ ID NO: 694331 - DNA, 463 bp, Homo sapiens
aggtagggtgtcactatgtcacccaggcgggagcgcagtggtgtgatcacagctcactgcagcctcgactccctgggctcaaatgatcctcccacctcagcctctcgagtggctgggacctgaggcatgagccgtcaggcccagctaattttttttttattatttgtagagataaggtctcgctatgttgcccaggctggtctcaaactcccaggctcaagtgatcctcctgccttggcctcccaaagggctgggattacaggtgtgagccactgcactggcccagcattcaactttttgtgtgtgtgtgacagggtctcattctgtcacccaggctggagtataatggcatgatcttggctcacttccacctgggcaacagagtgagactccttctcaagtaaactgggcttgaaaaaaaatttaaaactctgctctctggaagacagtggttagaaagtaa

SEQ ID NO: 694332 - DNA, 1136 bp, Homo sapiens
  misc_feature (229)..(229): n is a, c, g, or t
tggtttgtttgttttgttttccctcttcatcttgctatagagttcctctactagtaaattatttgcaattagccaggccttcgttgaacgtggggggtctgtcccattttgcaggggttcttcacgttcactttcagatagggggcaaattcggtgtgtagccaccttcggttataaacctcgccacagcgccaacttccaaatagcttagcggcaggggcaaagggcntgtggataggggtctcggctgtgtgtgttacaccctgtgccaattaaccggttccactgtgttaagcggcttgtcaggggcttgcagcaaggcggtgtggcttggcggttgtgacagtatagccaggtcttgtgtgcattattcttgttagggcttgacattattccacccataataagaggtctcagcaccctataaaatatccgttcgcgtggttaaaccaacaccgtggattaggcggaggattggctgtgttgtgggggttcaccggcttcggaccttgccacccatttttcttgttccggcccctctctgtgcccctttcaaatgtggggcctcttctgtgaaagcggtttgccgtgggtatgcgcatgccaaataagggggctacaggggagaacgccccggggaatgtgcatcttaaaggggacattgtttaccgttgttttagattaccccccccttcattcccgtgaaataggggggccaatgattgccattaagtgtggccattagggggaccacattcgtgttgtggaaaagacatggggaaatggcgtgaattattaaacctcccgggacccattaatacaggcctccaaaactttacgggggggctataaatttcccaaacccatttgtgcctttttctgtgtggtggacccattgtttctatattaggggccaattataccaccggtgtcttggtatgcattgtttttccccctctgagttttaacagggggcccctatttcaccaggtagcccgggggtaaatttcataccccggggagacccatggtgttgatgtactaagagagtttatttgtttgtgaaaattattgaaaaccgcagaaacccattttgagagcccggtatatgacaggaagagtttttgtataccgag

SEQ ID NO: 694333 - DNA, 241 bp, Homo sapiens
gagagaatcgggagtagaagtagagtgacctataattcttcttcaggccggatggtgaaccgcatctttcgggtggtgagaactaaagggaattggttgtggaggttagggaggggaatgaggattcttgcccgtttggcagggcgatccttaagccactttggaagaagctggctaccacatttaatccagtgaaccaacttttggaggtcggtgtggccatcaggggatccagtttaag

SEQ ID NO: 694334 - DNA, 969 bp, Homo sapiens
cgctaacggaagataccttgcgaattgctaggataaaaatcgccccttcctacactaacatacgtagcgagataacagaagtccaaactatgtagtatgcgagtccttatagaatcagataataaccacctactaaaacaaaaacaattaacattacaatattaaaaacaaaaacatataaaaatataaaaatatatcattaatcactactattatattataaataatttatataaaataaatacaacacaatatatcaatcactctacattataatatcccccatcactcatctaacatatctatcaccataccacatatacaaaacataaatacaccaacataacaacataaaacaacataaaaacacaacaacaaaaacactaatacacaacaaaaagatacgaacacaaatacgacaaaacagcacaatcatcaattgagatatcaatagtaagaaacatcccgacaaaaccacgcaaaaattaaacagaaaattcagatataccagaaaaatgagaagacacaagactacagaaccactattctcgcactatttaacaacaaatctcatcctcaaccatataacaaactatcacgcaatctcagcacacatacacattcatcaccaacaccatatttatatcatctacatataaaacaaaaacaaaacacacaacacacccaaccccactaacctctatacccctccacccctaccccctccttctcccattctcctccctcccattcaacttcaccctccgtactcaacaaaccactcatcacactagaaacacatatcatcccttcaccctcttcctttcaattaatatactctactacatctcacctctcatctagctccatatcaatacaatacacacacaaccatctcattcccccttctattcaccactaccaatactgtacataacaccacactcacacttcaaaacaccaccacac

SEQ ID NO: 694335 - DNA, 152 bp, Homo sapiens
gtactggtgtctgatgcaggcttctaagggactgcataggagttctctggcagatggttggggaaacttgtcaggctgaggaaatatctcaatgcatgacatgtcagaggtatgaaatgacacagtggcagacggtgccgcgggcgatggca

SEQ ID NO: 694336 - DNA, 942 bp, Homo sapiens
  misc_feature (3)..(3): n is a, c, g, or t
  misc_feature (188)..(189): n is a, c, g, or t
  misc_feature (205)..(205): n is a, c, g, or t
  misc_feature (209)..(209): n is a, c, g, or t
  misc_feature (232)..(232): n is a, c, g, or t
  misc_feature (236)..(236): n is a, c, g, or t
  misc_feature (250)..(250): n is a, c, g, or t
  misc_feature (298)..(298): n is a, c, g, or t
  misc_feature (301)..(301): n is a, c, g, or t
  misc_feature (311)..(311): n is a, c, g, or t
  misc_feature (322)..(322): n is a, c, g, or t
  misc_feature (326)..(326): n is a, c, g, or t
  misc_feature (339)..(339): n is a, c, g, or t
  misc_feature (350)..(350): n is a, c, g, or t
  misc_feature (355)..(355): n is a, c, g, or t
  misc_feature (364)..(364): n is a, c, g, or t
  misc_feature (366)..(366): n is a, c, g, or t
  misc_feature (379)..(379): n is a, c, g, or t
  misc_feature (393)..(393): n is a, c, g, or t
  misc_feature (400)..(400): n is a, c, g, or t
  misc_feature (402)..(403): n is a, c, g, or t
  misc_feature (410)..(410): n is a, c, g, or t
  misc_feature (414)..(414): n is a, c, g, or t
  misc_feature (416)..(416): n is a, c, g, or t
  misc_feature (419)..(419): n is a, c, g, or t
  misc_feature (430)..(430): n is a, c, g, or t
  misc_feature (437)..(437): n is a, c, g, or t
  misc_feature (439)..(439): n is a, c, g, or t
  misc_feature (442)..(442): n is a, c, g, or t
  misc_feature (450)..(450): n is a, c, g, or t
  misc_feature (462)..(462): n is a, c, g, or t
  misc_feature (479)..(479): n is a, c, g, or t
  misc_feature (492)..(492): n is a, c, g, or t
  misc_feature (500)..(500): n is a, c, g, or t
  misc_feature (503)..(503): n is a, c, g, or t
  misc_feature (511)..(511): n is a, c, g, or t
  misc_feature (514)..(514): n is a, c, g, or t
  misc_feature (517)..(517): n is a, c, g, or t
  misc_feature (523)..(523): n is a, c, g, or t
  misc_feature (536)..(536): n is a, c, g, or t
  misc_feature (538)..(538): n is a, c, g, or t
  misc_feature (540)..(540): n is a, c, g, or t
  misc_feature (567)..(567): n is a, c, g, or t
  misc_feature (850)..(850): n is a, c, g, or t
  misc_feature (912)..(912): n is a, c, g, or t
ggnatttaatattacatgctataatgatatttatctcacagtttatatttcattcatttatattatttttttaaaaggtttctttatcagctactaaacatctcagcaatttggtgtgcatagctctagattaagcaacaaagaattgtactgataacaaaccacaggggaaatggtggttagtaagnntcagccttataaaacncccntccacactgtttcacagcaagantgcnctctccaaaacgtngccatcaaaagcagcaaacaaaccctatattacatccatttgacatanttncagccaaacntatattttgcngggnatgattaaatggngggtgtgtganatccntcttttttnanattcttttttttnaaaaagggtgattntgatttngnngtctctntatntnggnggggggggggnggcactncngcncttttgcnggtataacttantcttggcagtgtctcantactgggcatgcnttgttgtngtnctgttgtngtngcngttgtnttgtgtgtgtgtntntngtctcatcagtatgctactgtcatggnaagtttttgtttaagtaggaatctaaaaatctatttagttctcatgcataaatgcataaatcacatcacttttagtgcaatgcctgttatgtaattccacattgtctaatcatgaaatcataaagacagataacagccatgaggaaccaaagacggcacattttgagagattcagagcctgacactcaaaggaccgtggcagtaactctgtggaatgtcacagttttacaagaacaatactgtggatgaaagaatcaacagcacattgagcattcctaaattngttgttattcagcaaatgccaccgaggagagaaatcaaaaatgaaactcaagacatcaaggngttagagccaccaatgaccctatgtacaac

SEQ ID NO: 694337 - DNA, 137 bp, Homo sapiens
  misc_feature (133)..(133): n is a, c, g, or t
  misc_feature (136)..(137): n is a, c, g, or t
atctggcatggccttcgtgtcccactgccaacgtgtcagtggtggactgactgccgtctagaaaaactgccaaatatgatgacatcaagaaggtggtgaagcaggcgtctggagggccccctcaatgtggtgncann

SEQ ID NO: 694338 - DNA, 949 bp, Homo sapiens
gggggggcctctttttccggctggaaccatggaggtgtgctataagagatgacaccatggaggtctcctgctggtgtgccggaaacccttaatatcaaacgctagggaactttcgcacacctgaatactcagggcgccttgagaaatactgtttgcccatgaatgcattgtcttctgacgaggcgcagtcaggcaagctgtatctattgggaaaaagcaagaagcactgatcgctgagggaatatagggcagaatggttccgtacctgctatgttcgtaatgtgctggaggattggacatggaaaacgtctggccatagcttcgtagtgtatcctgccaatagaccctcatactcttggtgttagtcatgcagaactcagagggtactcatgtggacgttgagcccagatggttcaaaaggtgtagcacgtcttctttcgccttctgtctaaatcttcacatggaaccgtttgtgtagtgctcgaaccaagggtctgtcgattgactcgatagctgagcgatttgtagaaggccttattatttgccattggaggtgtaccccgaatcgtgaagctctgctcacattgaggctattctacaagcgtggtttatggccataatcagataagaatgcgaaattgtgttgtaccgatgaggcctttgattgcgtccatcctcttgtgtcaatacggggtcatctgcagtggaaggaatttggattctatgaagaatcgtattctgttgggagaaaacgctctcagccagatgggtcgacataaactttcccgtgtgtggccctgtttcgaacttggtcgtttgcccagtgagggtgggaactgaagcacaatgggaccacacaatttgggtagaacaggtggagaattgcttggcaccggcggaaggcccacaattcagcaggggtagttcgaggaatgaccaagggggttac

SEQ ID NO: 694339 - DNA, 570 bp, Homo sapiens
  misc_feature (20)..(20): n is a, c, g, or t
  misc_feature (119)..(119): n is a, c, g, or t
ccaagaaagggctccaaganagccgtgacaagacgccggcaaaggaggaaagaaacgcaagaggcccaggaaggagagctacgccatctacgtctacaaagtgctgaagcaggtccacnccgacactggaatctcctccaaggcgatgggcatcatgaactcgttcgtcaacgacatcttcgagcgcatcgccggtgaggcgtctcgtcttgctcactacaacaagcgctccaccatctcatctagggagatccagaccgccgtgcgtctgttgctgcctggagagctggccaaacacgccgtgtccgagggcacaaaggccgtcaccaagtacaccagctccaagtaaagcgttgaatttcattcagctaccccaaaggctcttttaagagccacccatactatctgttaaagaacatgctgcgtcttgatatatatattttttaagtaaccttgttaatgacgtttatctgaaaggtgaagtagctatgtttaattaaagcaggattgttttgtggctattctacagtgcaacaataaaaaaataattaaaagcagacttaacttata

SEQ ID NO: 694340 - DNA, 923 bp, Homo sapiens
  misc_feature (79)..(79): n is a, c, g, or t
  misc_feature (85)..(85): n is a, c, g, or t
  misc_feature (89)..(89): n is a, c, g, or t
  misc_feature (92)..(95): n is a, c, g, or t
  misc_feature (104)..(104): n is a, c, g, or t
  misc_feature (107)..(107): n is a, c, g, or t
  misc_feature (126)..(129): n is a, c, g, or t
  misc_feature (138)..(139): n is a, c, g, or t
  misc_feature (141)..(141): n is a, c, g, or t
  misc_feature (143)..(143): n is a, c, g, or t
  misc_feature (148)..(148): n is a, c, g, or t
  misc_feature (180)..(180): n is a, c, g, or t
  misc_feature (188)..(188): n is a, c, g, or t
  misc_feature (193)..(193): n is a, c, g, or t
  misc_feature (197)..(197): n is a, c, g, or t
  misc_feature (201)..(201): n is a, c, g, or t
  misc_feature (211)..(211): n is a, c, g, or t
  misc_feature (234)..(234): n is a, c, g, or t
  misc_feature (237)..(237): n is a, c, g, or t
  misc_feature (687)..(687): n is a, c, g, or t
  misc_feature (741)..(741): n is a, c, g, or t
  misc_feature (746)..(746): n is a, c, g, or t
tcagacagtctcactctgtcacccaggctggagtgcaatggcatggtctccactcactgcaacctccacctcccgggtncaagcnattntcnnnnctcagcctnccnagtagctgggactacaggnnnntgccaccanncncngctanttttgtatttttagtagagatggggtttcacnatgttggncaggntggnctcnaactcctganctcatgatccacctgcctcggcntcncaaagtgctgggattacaggcgtgagccaccgcacctggctagatatgattttattaacatttgtaatgtgcagtattctgggtgtatgcctgcatcccaccaggcatttaggaggcattatgagaagggcaggcagttgaagaatagtcctgactccttcctggctggggaatgtcatgtgagagctggcattgctctgtggctgttggtttctttagcccaggttaaagcccgtctctaaagagggagacacaatcttagacctgccaagtggctagactggtgtgatccaatccctgtgccttattgtgactcttgtaccataatgacagccctgtgcttgggctgctgagtgtgtgctgtgggtgagatggttaagcaccaacagaatgggctctgaggcctatagccatcctggctttccccagcagactttgaggagagcatcnggttacatctgtataatttcgaacttgcttctaggacagagggcttcctaccanctaancatgctccctctccccaccaataaaacaagcgaataaaaaaaattttgtgggaacatcttccctggttcttgggacctgcgccaagctgtaaagggcttgtgacctcgttcctgtggtccagtgggtccttggctgggaatgtgctggctccttgccttgggtggatgggaatcaaa

SEQ ID NO: 694341 - DNA, 351 bp, Homo sapiens
  misc_feature (251)..(251): n is a, c, g, or t
gcttacctttagtaatcacgatatctgaggggtacatgggaatgcaggaccagcaggtggtggctagtctatctgtaggacttacggaccggactgctgatattaactgaactctctgacttcttctacagctgctcatagacaatccaccagatcactgcatgtctcacgacgtcacgagggacgaagcttacagcatgttctagtagttgacagccacttctggttgagctactcataagactgccagnctgtattcttgcatattcagcagtcctgcacgatgtgggcccctctctgcatattctacccgtgctttcccacagtgtcctcttgcatcagctggccatc

SEQ ID NO: 694342 - DNA, 120 bp, Homo sapiens
  misc_feature (12)..(12): n is a, c, g, or t
gagctcggtacngttcttttccatagcaacaggatatctgaaagcctggtgcagtgatgtggttctggtcccatattacagtcctgagcttagtgttgatctgcacgtgctattgaaact

SEQ ID NO: 694343 - DNA, 271 bp, Homo sapiens
tccagcttgtacagcaacagccatgaccgcagcaattgcgaaaaccagaggcttgattgccatcgagggtttcatggtgattctccgtactctattaggttaagtgtcgttcttaactgaagggtcaatccgcgacccggatgctcaaggtgttggccatgcggtttcccaccccggcactctggttcaactggatcacgccacggctaccggtgaaggcctgatcactggtggtgacctggcgatagccggctggaatgtcagttgctcc

SEQ ID NO: 694344 - DNA, 247 bp, Homo sapiens
caagtaaatcgagctcggtccgcgaagagttagcgttgatgaatagagagtcctttcccctatgcttatattatgtcaggcttggtgaagatcagatgcctgtaggtgtgcggcttaatatctaggttctcatgttctattccataggtctattagtctagtttgaataccacaagcatgctgtcttggatactgtagccttatagtatagtttgaagtcaggtaatgtgattcctcaggcttagtt

SEQ ID NO: 694345 - DNA, 893 bp, Homo sapiens
  misc_feature (1)..(1): n is a, c, g, or t
nctcgtggctttccgagtgtcgcaagtgtcctccaggaagcggtgtcttgtgtgtttctgcccaaatgggttcttccctcggtgtagaggaacgatgattgtccaggcccccttcatccacgcggggcgccccccccccgacagtcttgacaggcccagagtcccccctgtgactgggggaacccacaagaacaggggtaacggggaccctggcaaaatcctctccggacctggttctattcctttttgtccaacccctcctttttcgcttaatcgggctgtatactcccttcagggcaacaggggatgcttgaaatcataggtcccctgatccagaaccaatggtctccccccagtgaagtggacaaagctgtcaatgaaagcctctggattccagaagaatcccgcccgagtccccctggccgtcattatacgtcccgccagacaccttagggcggcttaccccagaaaacgtgctgcagcgtaaacctgctggaggggagatcgcactgtaagcgcccgacccccgcgctgggccgtccccgaaaaaagggggtccacccaaagcgcttctccaggctgacagggttttacagaaaccacagcttggcggatatcaagtccccctgggcgcatccccccgtgacgggggacacatttcgccataccccccagctgcctttttcaagttggctcaataagcacgtgcgcctggcccctcccatatacatctcctccccggtgtaggcccagatgggaattgtgaccatatcccaaggaagttggaagatgaactgttgaacgaagtaggacacacctgtgacgctcccttggtgacttggcggcaaaaacagaaggaaaaaccgaaattgtaacttaaaaaccccataaag

SEQ ID NO: 694346 - DNA, 302 bp, Homo sapiens
gggtctcgtctggggatctccgatctctcctctgctaaggtcagaggtactggtgcgtaggcgttccctgagccggccagtctgagaatggaaaggtcctggagctgagcatttaggttaaaaccggtaaacagctgaaagtacagattctctctccccgctctagctcatgcactattccaaaaattcaaaacgctgatatcggtagcatctctgtgccctcctagtgtatgtctgcaccggatgcttacccttaaaacagtctcggcatacacttagtgattccctactccaaacatgta

SEQ ID NO: 694347 - DNA, 271 bp, Homo sapiens
gtcaattctagaggatcccggcgtctggaaaaggggagatgttgagcactgttcagcagctgtggcttcgctggcgtcccacatttgtctccagtcttgtatcagctagcacttcactctagaaccatcataatagtgaggagcagtaaacacctgattggacaaccagccaaatccatgtcacactaaatagcagctccccattatgacctgggttagtcacacgtgcaagatcaaggtccgactcacctaggatttcaattggtgcccc

SEQ ID NO: 694348 - DNA, 146 bp, Homo sapiens
ggcgttctagaggatccctcgtaatatgtcgaggtcaacttataatcccagacagctttggaagtgcgaggcaggtggatcacgaggtcaggagttcgagacccgcctgaccaacataggtgaacacctgtctctactaaaaatac

SEQ ID NO: 694349 - DNA, 121 bp, Homo sapiens
cactggattcggtattgatgcactggatctgaacaaaatgcctccatgagcacattcttcgaaaaatcattctcattaatttttttattagaaaaacaatgtaaccattatactgaacaag

SEQ ID NO: 694350 - DNA, 304 bp, Homo sapiens
  misc_feature (42)..(42): n is a, c, g, or t
  misc_feature (53)..(53): n is a, c, g, or t
  misc_feature (86)..(86): n is a, c, g, or t
  misc_feature (111)..(111): n is a, c, g, or t
  misc_feature (136)..(136): n is a, c, g, or t
  misc_feature (181)..(181): n is a, c, g, or t
  misc_feature (192)..(192): n is a, c, g, or t
  misc_feature (269)..(269): n is a, c, g, or t
ggaagtttgagactagtctgggcaacaaagtgagaccctgtntctaaaaaaanaatttaagaactaggccaggcacagtgactcantgcctgtaatcccagcactttgggnggctgaggtgagtagattgcttgantccaggagttcgagaccagcctggaaaacatggtgggaacctgtntctacaaaaantataaaatttagctgtgcgtggtggcacacacttgtagtctcagctacccaggaggctgaggcgggcggttcaaatnagcccatgagattgcggctgcagtttagccattga

SEQ ID NO: 694351 - DNA, 1551 bp, Homo sapiens
gaaaacccacgaggggacgcggccgaggagggtcgctggtccaccctgggggcgtggggagtgaggtaccagagttcagcctccttttggccccagacgcctctgtgctcggaatccgtggtgctgcggattgaggtcccggtatcctaagcggactgcaaggatggatggaagtgctgggaatccttaggagggctcgtgattgagcgatggtccatctaacttggtctttgtcagggtgcctggggcattgcaacatgtgaggtgaccttcgatctacagggcgttccgtgcattttcctgatagccctttccctccgatataccttcggactagtgcagagcaaactcttccccttctacttccacggtctccatgggctgtgccgttcatcaacctctgcatcttggccttcacaagcatgctttgggcgtcagctcacattctgtgcagggccagccagctttacctggctgtccttgagccttacgctgtgccacttgtcaacgcacgcttggctgggaaacacctggacctaagttgccatgtgggcctgcaaccgttggagaaaggacgaggctggagtggggaggaccagggagcaccagggtgccggaacctacggcagtgcaagaaaaggatcccaggtacgcagcttccgcagaattcttccgcgagcatggctgggccaccttggacctgtggtggtccgagacaggctgtctaaggcgtgcccggaaatagagcctataattgcgcggcacaaaacagtctcgcggagaacacaaaaaaattgcgtcgccgaataaacaatggcgccactaggtatggtcatcgtaggggtatcacacgtcttgtgtttagccagccgtgcccctgtcgtagcagcagaaggcgaggcagcggaggacgaaacagagggaacgaacgggcaagaggcagcaggcaggcagcgcggagagacgcgcaacgagcaagaagacgagacagacagagaggaagaagagaagaggaggacgagaaagagtgcagagaggacgcgacaggagagaagagtgacgcaaagacaggggagcgaagcaaaacggcgagaagcgaagcagcagacagaagagaagagaaggaagagacaggcgagcagggagacggggaaagacgagagagaaggaagaaccgagcagaccgagaaaaaaaacaagaaagaagagagcacgagacaagacaagagacagagcacaacagaaacagcaagggcagagaacgaccaaagaagaagaacacaaaaactagcaagcaaacaagacagacacagaaaagagaacaacagcacgcacggaaagacacagagaagacacgcgaacagggaagacagagaagaacggcagcagagcagaagccatcacagaaaacgaacggaaggaaaaagagacaaaagcagacagagacagcacagaagaaaagagcgaagcaggacaacagacagccaaacagaacaaaacaaacaagacacgaacgaaggaaagaagagcagaacgagcccgaacaagaaa

SEQ ID NO: 694352 - DNA, 892 bp, Homo sapiens
gtggcggaactgctgctccggctgggctggagtgctgtctgatggcggcctggacagctgcctgagttggctggctgagctgggcatggagcaccaggcggtgtgtgggcgccgtgaagagccttcaggctgctgggcgaggtcatcgaggctgaacttcggtccaccaagcactggtgagcttacttgctgtgagtgtgctgaaggaggattgccctgggatgggcatgccatgatggccctgtgtgtttctgaagcattcccccatgatgtggcctggcccagagctgagcttatgcgactgcccagtggcaaatgtgggcttcagcaatggccatgtccaacaagtggattcgggtggacaagagtgctggctgacgggccccgggtgttcctgagtggtggacagcatggaggatgagtgtgcagcggctggctccagctggtcctgtgttgggtgacatgggctgagaagcttgggggagaccggagaggagcgagctgaggaagaggaacgctgttggctgaagtgaactctgaagacctactggtgtgagcaaaggcaagtgcctttagtaccagcatctgcaagcaagagacagagctgagcccagagatgatctccagtggctcttggcgggacctggccctttcaatggccctacacactttcttggcccacggtgtctcccgatagggccacttcagccgtgctcaaggtccgctccccagttccgacagatcttcctggcgctgggggttccaccgagatgccgctgttacttcattgggagtctttctgacttgacgcctcttcccgccagagccccacgccgtgacaggacgacactttttctggattccgcggaggctgggtccagggtttgccggg

SEQ ID NO: 694353 - DNA, 109 bp, Homo sapiens
atgcagctgtagctattcagctagcagctgctgttcgctgctgctgtatctgttgctcgattttgatgatgccatttacttagatgctagctgctagctgctgctgcag

SEQ ID NO: 694354 - DNA, 410 bp, Homo sapiens
tatatataactgcattttattacacattgaagctctgtggcaactgtgtcaaggaggtctattgtcaccattttttttaacaccttgtgctcaattcctgtttctatcacattttggtaattctcggtgaatcttaatgatactattggaattggtttgggacaccatgaaccatgctcatataatatagcaaacttaattggtaaatattggggtctgactacttcaccaactggctggttttttatctctttctctctaaatgaggtttcctgtgtccctgagacacaacaatattgaaattaagccacgtaataacctaattaattggcttgagtcaattaagcctctatactaatgaggaagggctctaactatttaagagggaagagattcacatctctcctttt

SEQ ID NO: 694355 - DNA, 1628 bp, Homo sapiens
agcaaatacagcgagtctagagtggagccttttaaaaatgtgactgtaaaccgcccacctgtgtcctcccattggcgatggatttctttggtgtcatgacatcagagaagaaatcgagcatgggagcgtgtgatagaggtccaggactgggcgtgtcggggaagcgaccctggatgtctccgacctcatcaaattactgcggtgtcttttctttagaaagcgcaggctaccactcaagagcactctatagatcatcgcaaattttccgagagagggttagtatccagaaactggtaaggcgtcgacataactagactagcagtgtcatacttggacgtcagcatagggagggcgtgcagcttcgtgcgggtggttagtgcagaagtagccacaagatgctatcgggccgtgcacatagtcaaaaccaccatctgttagcatagttaagaagagcaatggagcatcagttggagttaatggttcaagagtatatattacatccatacacatcgtatcgtgttgacgtagggcagggagcaggtcatacagcgtgcataaccgcatttacaggggcttgattcccaagacaccaacagcattccagggccggatatggggggcaacaagaacagtatgccaaccatattacgtggacgaggccggtaaggccaaggatcaacattgcaaactaaggggcacagccaaggcacgcgggaagagagatacagccacagacgaagagggggagacattttcccacggggcacgaaacgtacattaccacatacaattcccaaattcggacaccagatcaccttggcacagaaagaccgtacccaaagcaggagcacaatcgaggagaccgttgggcacaaaggagcaccatggtaatggggacaaacacagtggctatctcactccgacggattgggtactagtacccctgtgagaaaggaccatctggtatgccaatggagagacgaccaagacaacaggaggcacacagatccaggacagagagtaccaaaagcgggaacacactcttgggcattgggggaaagacaccgccagacacagtgggacaggacccaccagtattaccacacgcgggaagcgaagtttagtacacaccaggacaccagacaagagttcaacgagaatagatcgactaacccgaattacacaagagggcgacatgactgtgacaaggggagtattccacagaatcgcagtgggagaacagcagaagatagtaagagagcaacaagccgagataacattcgaaacgaacagcggactaagaggaggggaaacgcaacattccacacatgtggactatggagagatccgcacgacaaggaccatggggacaacccaccgatggtgtgcccaccacagcagtatgggtttaggagtgaaaaacgaagcaaagagcacaccagcagtgaaacaggcagacaccccacggcgaggaccaacaaacaggggcaaactgcataagccacgttgaaacacaaacgccacgcagggtaacggaagcacacagagaacgaggagagccaaggagatgaacaacccggtgaacagtgcagaagcagataaagagacgacgacaaaagaagaaacgg

SEQ ID NO: 694356 - DNA, 548 bp, Homo sapiens
cgtctgccctgacattatttctttataccactaggacatgggattatgcagaatgttggttgagtggctttttatttggtagagacagggtctgtctctgttacccagcctagtctctaacttctggtctcaagtggtctttccagctcggtcttcctagtgttgggattgcaggcgtgaggcagcgcacgggccagatggcgattgtaaagaataatgtgaggaaaataattagatttgtgcaagtgacgatagttgagatgttagctaaaatgatgacctagaggcagctcgttttggtaaatatctatagtcagtttaggctgctataaacaaagtaccgatagatatgggagtttatgacacgacagaaagcttacttctcacaattcttaaagtctgggacatccaagaataacatgcctttagacgcgaggttgcatgtaccagcttgggcgatagtggcgagtagcctcctattccatgttgtcctagcaagcatggttccctttactattattttggtctctatatatgttcatgtgtca

SEQ ID NO: 694357 - DNA, 213 bp, Homo sapiens
tcatcgagctcggccctatttaccgaccaccgctttggcctcccaaagtttaggattatagacgtgaggcactgcgctcagccttgtctttgttttcagatgtttgactattatgtgtcgatgtaggtttcatcgggtttatgctgtttggggtttgttcagctttttgaatctgtaggtttatgtcttttgccaaacttggggtggtatcag

SEQ ID NO: 694358 - DNA, 813 bp, Homo sapiens
  misc_feature (594)..(594): n is a, c, g, or t
agcggagaagggttgctgtggtagcgctcgggcgccatgttaggacgaaggggaaggaggagaagcgcttaaagcggcgggagcaggctgctgggagaggggttgagcctcgagggcgtagaggcaggccctccccgtctcgtcgcagcctcgaggtggcatccatgccccagggcggcaagatggcgagcgggtgctcgggaggcgcaagtgactgcggcggcgccaggcagctggggacacgatgcctgctttgcgagtgactaccactaggggatcacagaaacaaaagcaataaccgagcaagcgtagaggcacttagtgggccctctacttgtcatcatcgagacattgagactgggcgcccgaaggagagacatgtgacgtgccgctacgtgtgacatccgaggacaagttcaattttgcatttacgagtcaggaagaggcccttaggaggctgcttatccgaagaggaagggtaaaagaagggagaccttgggaaggagcggtcagggagttgccacaagtattggggagggggaaataacgttcagatgtaacaccctgtgggatcaaaagatggatgtgggcatnaccgggagcgaaaaatgcaagttggatagagagtgacggaattgtatttctcagcgaaattgctggttagagttgaagcacactggtacgcgtcgtggaagagaactgttgtgaaacacttttgagatggtataccagagtatactgacgctgtcatgacataagaggggggtgtggagtatgggatggcgattggtgctgttggtacccaaggtactt

SEQ ID NO: 694359 - DNA, 133 bp, Homo sapiens
  misc_feature (3)..(3): n is a, c, g, or t
  misc_feature (6)..(6): n is a, c, g, or t
  misc_feature (45)..(45): n is a, c, g, or t
  misc_feature (73)..(73): n is a, c, g, or t
cangancagcaacaggatcatgatcaggcatctgcctttggccantttcatgtcatgggataccatgtactcngtgggggggtaacttatcacattggagcggcagcgtcacgatagggtcagtcagctgtac

SEQ ID NO: 694360 - DNA, 817 bp, Homo sapiens
gtgagccgcagggccgtagtgcagccatggcagcccagcctggaatggcatggtcttgaagccccacttccacaatggacttggcatgcggcgctgtggccacagtggttcaaccatgcctggccctgtaagatccgcagactgtaatgtgccctggcaatgccaatggctgcagcctgcgatctgccaccggctgccccagcagtcagaggtccacatcctgtgcaccactctgtagcagctgcacccaacggattctgtgtaaccacacagaatgtgtgctgctgccttgtgccagcgtgcattcatgccatgtgagtgatgctcaagtggtttggcctggcaacttcacaacgacaggtgtaggcccgagaaccatctgtgccatttcttggtggatcacgacggacgtgctggaacacatgtccaactggaggtccacttgcaatgtgccaactggttgcatgcggtgctagaacggcagtaccagcctccaaaacatcatcgctcttccccagtgaacgcacctcggcacccacaagaaagggaggaccagttcatgcgtgacagacactgaaacctggcacacccaagcgtgacctggaccgtgtcatgccctgtccgtgaacgtctataacgacaggagaccacgctcgaggtcactcactgaggacagagacagaatctcacagccttcgctaggtctccgtatggcccgtgcaacgctcggatctacggcatccgggcaaaaagacgccaacgcaaggccgcgcacacgcgctgttgcaacgccacactcacgccctcctggcacctt

SEQ ID NO: 694361 - DNA, 179 bp, Homo sapiens
  misc_feature (66)..(66): n is a, c, g, or t
  misc_feature (80)..(80): n is a, c, g, or t
  misc_feature (149)..(149): n is a, c, g, or t
  misc_feature (163)..(163): n is a, c, g, or t
  misc_feature (175)..(175): n is a, c, g, or t
agaggatcccctgtgagattctggcccatcttctctgcccgctctcggaggaagctctctcagggngtgccttgggtttngtccacaggcatctctccatacttgttacagatgctgacaagggacacattctggaaggggaccacccngaactcgaacccangtgtggggtacncgag

SEQ ID NO: 694362 - DNA, 105 bp, Homo sapiens
ctcggctctaccttgttcggctctaccttgtctcggctctaccttgtctcggctctaccttgtctcggctctaccttgtctcggctctaccttgtctcaagattt

SEQ ID NO: 694363 - DNA, 298 bp, Homo sapiens
cctttatttaaagttccaaaaaaaatgttctcctctaaaaggaacccccatcccattaagcagatactctccattccttccttcctccagcccccagcaaccaccaatctgctttctgtctctatggatttatctattcttgctattttatataaatcgaattgtatgagaccttttgtgtctggcttctttcacttagtacaagtttttgagatttatttacatagtagcatgtatcaacacttcatttttatggccaaataaaattgtattatgtgtttatagcacaaaaaaaaaa

SEQ ID NO: 694364 - DNA, 190 bp, Homo sapiens
agggtcgtaagacactgcttttccacatcacaggcgacttaggttatcagaattaggcggagtctgacgcttggtactgtaatttttatagcttgtttaacacatttacccattccactaggtccgctgatcataggcttgtaggaagtacttcctcattcctgcattcataacaaaacagaacaccgcg

SEQ ID NO: 694365 - DNA, 515 bp, Homo sapiens
ttcataagggcgatcgtagtattcttggggtagaaaatgtagccatttcttgcagctcatgagttacaccttgatctaacgtctttacgtgtggacttgcgcttactttgtaggccttcatcaggggtttgctgaagatggcggtatataggctaagccagaggtggtgaggttgatcggggtttatcgattacagaacaggctccctctagagggatatgaagcaccgccaggtcctttgagttttaagctgtgggtcgtagtgttctggcgagcagttttgtttgatttaactgttgaggtaagggctaaggcataagtgggtatctaatcccagtttgggtctaagctattgtgtgttcagatatgttaaagccactttcgtagtctatataggtgtcaactggagttttttacaactcaggtgagttaaagctaaataggggagggggggtgtctaaaacactctttacggccggttctatagacttgggtaatcgggtgaccggggtggg

SEQ ID NO: 694366 - DNA, 185 bp, Homo sapiens
tcggtccaggttactagggttatggaacgtgaagggtgtggataggtaggggagcattcagccgtgaggggggagcattcagtcgggaggagcattcagccgtagaggagcattcagccgggaggagcattcagccgggtaggagggagcattcagtcgtggaggagatgcattcagccgggatg

SEQ ID NO: 694367 - DNA, 129 bp, Homo sapiens
ctttatcagtagaggtatggcgggcaggaggtgggatgcggtggtgatgtgctggggctgggaagcctggctttgtacaatggtggcacacactgatgtactgcattccatgctcttgtgaagcttggc

SEQ ID NO: 694368 - DNA, 102 bp, Homo sapiens
  misc_feature (48)..(48): n is a, c, g, or t
gagacagtctcgctcagttgcccaggctggagtgcagtgagccgagancctaccactgtactccagcctatgcggcagagcgagactctgtccccccccccc

SEQ ID NO: 694369 - DNA, 343 bp, Homo sapiens
  misc_feature (9)..(9): n is a, c, g, or t
  misc_feature (11)..(11): n is a, c, g, or t
  misc_feature (149)..(149): n is a, c, g, or t
agtggctgnancctcccgatttcgattacgccttcaacctggcctacggcaaaaaacacacagatgcccaacccttgttcgaagcgttgcgagcactgatcgatcaagcgacagagcaaaggctccacgccgcagagtgacgggtgtgntcacaccgccctggccgcaatcgcctccacctccaccaacgcccccggcaacggcaacgccactacttgcaacgcggtgcgcgccggtttgtttggctgttcgggcgtgccaaagaactgggtatagccgcgctgcaacccggcaaaatccagcttgccatcggtctcttcggcgccgaccagaaacacccgta

SEQ ID NO: 694370 - DNA, 340 bp, Homo sapiens
tgaggacagtgttacacagctcatttcacccttggggcaggtgcacctgggaagcctggatgggccagcagacccaatgggaccagcaggacccacgggacccacacttccatcactgccacggtgcaccagactgggccagtgggcaccaacgatgtcctctcgtcaccagtgaagcccacggtgctccgtgttttgaccatggatgttcctattttcaccaaggtggcaccatggttcaccacttcacaccatggagcacctggtgctgtcccattcacatcacatccatgacctattgttgtccccataagtgcctcttgaatgccatggaatgtcc

SEQ ID NO: 694371 - DNA, 145 bp, Homo sapiens
gaagtcgtcaagtacctgttagggggctggccgggctgggagctacagttatttgtaccagcacctggtcactggtgcaacagaaccggatgcagttgagcggtgcaaggggccaacgagtcgacgagtacaaaaccgagcttcc

SEQ ID NO: 694372 - DNA, 261 bp, Homo sapiens
  misc_feature (94)..(94): n is a, c, g, or t
  misc_feature (154)..(154): n is a, c, g, or t
  misc_feature (158)..(159): n is a, c, g, or t
gctaggaagcagcatctgggctcgctgttcgacatccactcctgagaaggctgcagcccctgccagagcatacccccctggcatgatgggattngtgatccctccagccacgatgccctcaggatgataaagagagagtctccccaaagaggcncccnntagcagctccatagacaaagtgggcatgagtacccggcaggcatggggtggtggtggcagatcagcatccagacttcataccaggagaggcagggtcccaag

SEQ ID NO: 694373 - DNA, 492 bp, Homo sapiens
tcttgttatccagtggcatgccaaaggagaactgaattagcttctgaggcttctgctgtaaatcagaagtgtatgttagtcaagagtaaacaagatgcacccagtatggtgggagggttttgctgtcagtagctcaaagtatggtgtagaaatggcctcctccctccatcctgggaagtcccagtcccatcttggtgtgagaatcaaccagggctttcctggctccacctgagaataaccaactccctctccgtaatcaggaggcccaaattgtcaccttcccaaagaaatttatattttcacggtagcctgaaggtgcaaacacatagatcgactcatttttaaataaggcacatatcacaattttttaaccaccagaaatgtcttacaaagaattaatagctcttaacaaaaatacacaccaattttatataccttcaaaaaatatttgcaacctctaaataaatataattttcttaaaataaaaaaaca

SEQ ID NO: 694374 - DNA, 171 bp, Homo sapiens
  misc_feature (33)..(33): n is a, c, g, or t
ctacccacgagtgaaaactgtcttccacagaanctgttccttgtgcacaaaggttggtgacactgctgtagagagatcacagaagcaagaatgaggcgagccttgagtttggtgagtggggagacccttgttgaactggtagggcgttagccccgggttgcatttgagctg

SEQ ID NO: 694375 - DNA, 425 bp, Homo sapiens
ccattatgggcgggggttcagaggcctactgtttttgcgtgcgaaagcctgaaccaccatccagcggggcgttttgcatcatagatacaacagctggcaaacactgtaatatgctacaatctcatctgatcccggactgagagcaaatatttgcactctaaccaaatggccaaacgctcagttgtcttacatgagaggataattagagtacttctctaatggaatcctttcctgcttttaattactggtagagacagggtcttactatgctgcccaggatggcattgaacctctggccttaatagatcctcctactgcacctgtaagtgctggaattcaggcatatccaatgtccctgtctctaattggatgttcgtaggattatagagttaatcgctggggatttgaagaccttgaggcccttc

SEQ ID NO: 694376 - DNA, 588 bp, Homo sapiens
tcccggcgggaatgcggctgtacacatgagcacaggaaggtccttgacacagtcgcgaacaaacacaaggacttgaagacacacggtttcacactggagtcctgccgaagcatgatcgcactcatggatacagatgtctctggtacggttaaccggcaggagatcgagcacctttgggacaagattaatggctggcagaatatctgcagacgctatgagacaggccagtgcggctccatcgacagctacgagatgcgaaatgcagtgaacgacgctgtattccacctcaacaaccagctctatgacatcattaccatgcggcacgcagacaaacacatgaacatcgactttgacagtttgatctgctgcttggttaggctggagggcatgttcagagcttttcatgcatttgacaaggatggagatggtatcatcaagctcaacgttctggagtggctgcagctcaccatgtatgcctgaaccaggctggcctcatccaaagccatgcaggatcactcaggatttcagtttcaccctctatttccaaagccatttacctcaaaggacccagcagctacacccctacag

SEQ ID NO: 694377 - DNA, 248 bp, Homo sapiens
aagtcaaggtctgcggtacatctgagtacacaatggtctttcacagaagagggagcaaagtatgacggaaagttcatagggcttcaggagtctgagagaaaggggtcaaatcctgaatacgttccttatctgtgtgatcttcagactcatcattctaatattctgaggtcagtctcctcctctataaaacaagaatcagacggggcacagcggcgtcacgccagtgcctctccgccaccggcgcccgg

SEQ ID NO: 694378 - DNA, 605 bp, Homo sapiens
agtccaacatccggtaggtcaagcatcagtactaccttttttaaaaacttccggtaatctttagggtccactcaaatatatttatacacggtccgggggtttcttttatatggtaatttaaggttacaggggcttttattttggggcagggctctggttcctctaactacatggtaagccactcaaaggccaaaatacggtgttacatatttttaacattctcccagggttggcagttggtagggactcagtaaatattggtagaataagggatgggatagcagtagatatggaagaaaaaaataagggggcatgatccttaaggtccagcagtttacaaccaatcggtggtagaaaatacaggtggaaaaaaacttggatttatgtgactggctttttttttaaatttaaagggcctcgggggatctgaaaatcataatatggagatcagtattgtagacaagaaacacagatttctcccaatagatggttaaccgattagaacagggcggcgggatagaactttcggtgattatgaaatggtcccgagccaggcgcgggggctcaggcttgtaatcccagcactgtgggaggccagatggggg

SEQ ID NO: 694379 - DNA, 160 bp, Homo sapiens
ctgatatagaggatccttatctgaactgctgatttctctctttaatgaaaaagacatgaggccggatgcggtggttcaccgctgtaatcccaacactttgggaggcgaggcaggtggattgcttaagttcaggagttcaagaccagtctgaccgcggcct

SEQ ID NO: 694380 - DNA, 731 bp, Homo sapiens
ctgtggctgggtgcgaaccccgcacggctagtggcgggggctgctcccagcttctggcggtcacggacctgccgcctcctcctactccgcatgcgtcgagcctgcccgggtccgggcgcttgtctatgggcaccagcggggatccagccaaggtcgtcgaaaccgtaattcctgggcacacatggcagctcagaaatgttgccgtgacctactttgaggagatgatttgagcgaaacaccgcattctagcctggatgacatgaacatctccgtatggctttgtgcttagactcaagaacctggagcttaagcttgctgtgagaggatcaagatgtcctgtgtgaagatgctggcggccctatcaatccatctgacataaatatgatccaaggaaactacggactccttcctgaatctgcctgctgttggacgggaacgaacggtgttgcacacggtggctacgcggtgggcagcacctgtgaccgggctgaacgccatggcagacctggcgtgattccagcaaatgctggtttaggaacctggcggaccggaggctgtgttcacgctgaggcaagctctgatcctaagttccgatgtgcacatccctcttcagagcgctgcttcctgggtgtccatccctgttactgccctaccggctgttgcatggactttcgagcaacctgcatgccagggcactctgtcttcagaatgcatccaacagcggcagtgcg

SEQ ID NO: 694381 - DNA, 1035 bp, Homo sapiens
aggtccgctccgtggtcccttctccttcgtataccttggctcgcgcttcttctcgcgcaggtgtcgctgtgtggttccctgttgtctgtgtaccccctttggagcgtgttgtgcatttcttgttgtccgcagtcgcgtcgtcccgattctgcttttgtcgtaggcgtggtctcgttgtttccgtttttgacaacccacttcccctagcccttggactgctctgtgtctacgactaatgctattcccgctaacaacttaatgaatacaggaatgccaatggtagtctaggggggctcaggcccactgcgatgtagcctggtcctgtagccatgccgcaatctcggtctctttacgctttcctagcctctagtcctgtgttactcgtaccaacggcccttttgaccgtctctcctccaactctgtccgctggcttccctcgttctctgattggcacgcatcacaattcttggcttccactgcatgactcatgcgccgagtccaatcaggcattgttggacgagactcaagctggataggctgctcctggaactgtaagcactgcaaatattggccccttcaccggttgaattgctgcaggatactcatgaacatacagttgtacccattcattgtgtctgcaccagggttaacgagtaaattacagaaaggcttccctctcccgacgccggccagagtccagctctacaacgtagtgcttcagcgctcaccagaacttcctgctgttcggtgcagacgttgtctataaatgaaggcaccaggggtgaccgggggccatgtccgagcgcaccttgttcgctagatgggctgtggggcaccggcatgcctcttccccagggatatcctctccagatcgtaaccaagagccccttgcaaacttcttcgactcagattcagaaatgatctaaacacgaggaaacatctattcattggaaaagtgccatcggtgtgtattttaagggattatgagcttctctaaagggctaaggctgcagagatatttcctccagtacgccc

SEQ ID NO: 694382 - DNA, 425 bp, Homo sapiens
ccaggacccaggtctttctctcaattatgttttactagtcatagtgttggacagtattatgcatcactgagactgcatcagagtttgcattttgtatgtttcctggccaagaagttatggttgtggctgtagtatagtcagctttctgtagcataagatttgttttcccatacttacttcacttgttatacatcactgattatttgggttaaactggactcatttcaagcagtttgcttttgttcaaatcgtgatgagaaacctaatactgtaatttgatttgagccataaaacacattttaatattagcttgtattatagttattaagcttgtttttgtggaaaaaaacttactaaaacctaggtaactctagattaggccagttcaggtgtattttgtatcttagtaatggatcatatcgtaa

SEQ ID NO: 694383 - DNA, 138 bp, Homo sapiens
cccgttcgctactgtgttcatgctctgcatattaaggttcctatacaggcaaatccgtacgcagcatctcgtaaagtggagtgcacacgttgtccggggctgggaagacgccaggcagtactttgtgcatttgcctgt

SEQ ID NO: 694384 - DNA, 322 bp, Homo sapiens
aacaggatcttctcatgctgtatcccagcactttgggagactgaggcggtggatcacctgaggttgagagttcaagaccagtctgaccaacatggggaaaccccatctctactaaaaatacaaaattagctgggcatgatggtgcatgcctgtagtcccagctactcgggaggctgaggcaggagaatcgcttgaacccgggaggcggaggtttcagtgagccgagatcgcaccattgcactccagcctgggcaacaagagtgaaactctgactcaaaaaagaaaagatgctattgaaggattgctaggtatgattggcaaa

SEQ ID NO: 694385 - DNA, 166 bp, Homo sapiens
ccggtccacctcacagtcttcctgggatacaggctggcataactcacatcgtgcgggaagtcgacaggccgggatccaaggcgaacaagaacgaggtggtagaggctgtgaccattgtagagacaccacccaatgtggttatgggcattgtgggctacgtggaaac

SEQ ID NO: 694386 - DNA, 785 bp, Homo sapiens
  misc_feature (20)..(20): n is a, c, g, or t
  misc_feature (65)..(65): n is a, c, g, or t
  misc_feature (69)..(69): n is a, c, g, or t
  misc_feature (72)..(72): n is a, c, g, or t
  misc_feature (119)..(119): n is a, c, g, or t
  misc_feature (132)..(132): n is a, c, g, or t
  misc_feature (177)..(177): n is a, c, g, or t
  misc_feature (183)..(183): n is a, c, g, or t
  misc_feature (185)..(186): n is a, c, g, or t
  misc_feature (189)..(189): n is a, c, g, or t
  misc_feature (193)..(193): n is a, c, g, or t
  misc_feature (206)..(206): n is a, c, g, or t
  misc_feature (219)..(219): n is a, c, g, or t
  misc_feature (236)..(236): n is a, c, g, or t
  misc_feature (240)..(240): n is a, c, g, or t
  misc_feature (254)..(254): n is a, c, g, or t
  misc_feature (258)..(259): n is a, c, g, or t
  misc_feature (267)..(267): n is a, c, g, or t
  misc_feature (441)..(441): n is a, c, g, or t
  misc_feature (680)..(680): n is a, c, g, or t
  misc_feature (742)..(742): n is a, c, g, or t
cttttttctcattatattcncttccccgttgtgccatccccgggccacgtcttcattggtctgcnaccnggntaacctggtctgttttttcagtggcgtgtctttttttagggtacttntttctttttggcnctctgtgttggtggaagggccagggttttctttgttttgggtgcnttgttntnngtnttgngtgtggttctttnctgcctgctgggnttttttaagatgtggtntttnggtctgtgcttttngtgnntggtgtcntgcacattttgaaatttaccaactagaatgttctcctaatggaaaaagaaaaaagaaaagttatgacagtttttgtttaagacagatgtttaaatagcactcttctttttgaccatttaaaaataatttggcagctgtaaccacctatggtcataacacataatcacttacaanagacaagcaacagatacagaattaacgatatacttttaatatttttacaaccctctttaagttggtgcctaatggcatttaacaagatttttatattcagtgaaaaagatttagaacataaactgacatgaagtaaggaatataatttctctgtgccatgcaaaagagaagtcaactttttacacatcaatcactcctaaacagttctaattaaaatccaaactgttcccatttttgcntcattgtcattctttggcaaaagatctaaatagccatgggttagggaacaactgttcactcntggtcttcattttttttttttttgcacaatacatgtgttttgt

SEQ ID NO: 694387 - DNA, 1599 bp, Homo sapiens
  misc_feature (713)..(713): n is a, c, g, or t
  misc_feature (928)..(928): n is a, c, g, or t
  misc_feature (1154)..(1154): n is a, c, g, or t
  misc_feature (1163)..(1163): n is a, c, g, or t
  misc_feature (1336)..(1336): n is a, c, g, or t
tgccgtgtctcttgctgctgtgacgttgtcgctgtggtgtctctcgtgctactctttgtggtggggtggtcgcctcttcttgtagtcggcgttcgtgatcgcctgctggtgagtttggttgttgtggctggctgtttagaggtcccatgatggcttctgctgtcatggtgcaggtgtcttatgtacgcatgggtcgtgtcacagatggtgtcttctcgcgcgccgggttgtggtgcccttctcttgtgtgttcgcgattgggtgcgtttttttccagagccaagggtcttttttcgtctgccccagtgtggtcggggccgccagttaccgctctttgtgtgtgtgctcgcggcgtttggggcgacactgtttcctgccttagggcacccctttcctcccttggtctctcacccatcctcatacccccaaccccgttgggtggctcctgtttcgcacccgacagagggggtgtttcccacgcgcccccattgtgcctcgttgtccgaagcccgcttgtgtgtgtttgtgtttgttggccctcttggtggccccgttccatcgacacctcgtggtgggggttggtgtcgccccaccgctccccttttgggggggaccacagcagtgttgtggtggtcacgcaacgtgatgagtcctcacacggatgggttgggtccgctcccacgcgtgggggggtgaacaccctttccacgagnggggcactatactttgtggggaatttctccaggaagcttatagcccccggcgttctttttcccctctgggggccctcgggggaagaagtttcttggaccgtcttttaaattcctttgttcattgtgtgaagacaaatttcgcccggccccaaggtctcgcgcctggagtgatgtgtttgaaatctctcacggttcttgtcccatttgggcccccncgggggccacagaggggttttaaaacactgctttttccgggccccctcgacactttgcgctgaccactgtctctgtgggtcctggtaaccagccgcttttcttataagccacgccgcttgttcccacggagagaggcccaccccgctcgtgtggttctcttctggggtaaaaaatgttgtgtgaccacggggtccacttccctcgttctcccctcggtaccctccnctcggtganaagtgtggggaccccctcgctcgtttctcggtgtcccccctcgtgaggcctcgttgagattgagttgccctcttgggtcccacgctaaatggcgctttccgcgagtccaccacccacggcacccgatgtgggcctctggaacgcctcttggtcacagctgttcttcacgtagnccctcggagtttgtagaatgtgactccactcccctcgctcgtgaggcactccccgggagccctctgaggagaggtttatccatagactatgagaactggccaacagtccacccccaggattaccggtccagccttattccccttccacctccccagtggaccgctcaagaagtttccagaccagccgagagctctatttttagaagaaatatgttaccctccgaaatgatgaaaccccatcttatatttaaaggccaagatga

SEQ ID NO: 694388 - DNA, 959 bp, Homo sapiens
atcattctgtctaaaaatagaatcgaatagctacactctgtacgtttattctaaagtgactaatacgattctcaggcttcgttggctcgtctcgattgagtgccgctgttgtaaccgtgggtatattacccctcagcagctgtgatttcacgtgtcctgtgataacaacgggatttgttaatgtttgttaccaactttggggatatacatcgtccagtgtctggtaacgaatctggttcctaaagcgaaacagtgtcgtttttcaacgggaacgctctgcttcttttttaaggagcccccccttttctattcccaccacactatttttatgtgggatacccccgtaattttgcccaaaaaaaaatgggtggttatatgcgaccttaacctataattatgacttccctcacaggaaaactgttcaagagactcctcgtctctgaacaaatatttccattggtcaatgggcaccaaaaatgcctccatacatgtattcgaggcaaagactccctttctgggaggatctattgtcaactaataaacaagattttaggttggtattatacaaaccgtttttccccacgccaccacggggaaccctatctaacaagagcggctttgtacgccgggagctatgacatgaggcgagggagtaacgggtagctgggatcgcagctcaatgtttacacaccaccgtcggcggaatccgccgggcgagaaggattactcgcctcgacacatgggcaatgaatatcttgtggaaaaaatacgggagaacatagactctttagggagtatgttagtaggtgattcctctagatatgaatcccactacataccactgggcgacataaatgttttctatctttatggttgcgcggagttactattcttattttttttttcccatcccaaaaacgtttgaccccagggggcccaacaaattcttcaacataaca

SEQ ID NO: 694389 - DNA, 312 bp, Homo sapiens
caggagtctatgaatacaccgcgcaaacccgaggctattcctgcgcgtagcagtagccgaactctgcgaatttgtccttccgcctcggaggaggcccgggtcagaaagctacaggaagtgacctcgtagaacacacccaaagccaggtcattcctttctgggcctaggtcattcctttctgggcctctccgcccggcctccagaggacacctgggctgtgatgccaagagcccaagaaggcgctggtgtggaatgtgcccagatgttttttttccttcggaaaacattgtgtcctgtccgcgggttattccg

SEQ ID NO: 694390 - DNA, 885 bp, Homo sapiens
atgagccaccaatcacatgcctatcatatagtaaaatccagcccagttgacccctaacaggggccctctcagtcctcctaatgacctccggcctaagccatgtgatttcacgttccactccataatcgctccgtcatactaggcctacgtaaccaacaacacgtaaccagtatagccaagtgattggcgcgatgtaagcatcgaagaaagcactattagccaagggccgaccatcacacgcacacttgctctcaatagaaggccttcggatgacgggataaattccgtactgttagtttatccctgcaggataggtattgtctctttacctgtgcgacaaggactatatttgtcttgaggccttgtttgtagacccaaacctttcgccaagcccgtaggtacacccgcattaacaccacaccaaatatcagagtacgagggtcaaaacttggggcacacgcgcgacaccgagggcgaattcaaacgcgcgacgtaaaacttcggcacccctgaggaatagggttccccccaagcgtcccgtcaaatgaacgacacaccgtcccgcacaaatcgcactgccgcgactgaaggccagctcactccgacgagcccacccggggagtccttctcacccaaactgagatcttcaacctcacgaaagatcacccatacccggccatacgccacacatcagcactccacgccagccacgggcgcacaaagtactagcacgcacaacctaccccggggcgccctccgtacatccaccaaaccccgacgcgttaccaaagcccgtccaagggagctcacgcgaccagaaggtcgtccgcggaccacccattccaccggaccggccactctaaccaggctcccacaagacccgcg

SEQ ID NO: 694391 - DNA, 228 bp, Homo sapiens
tgctgccgtcctcgtacttgtcttatcccttaagtaccctctcaactaccaggtggctactgaggtgcctgtccacccccacccccagctcaatggactggaactgggaatgggacacacaatgaatgaacgggcaccctatgttctacctacagtgcagctcaatgcatgcagtgatggaatatgcatgcatgtggggtacctgatgctacgacattctgtaataca

SEQ ID NO: 694392 - DNA, 808 bp, Homo sapiens
ggacttcggtggtggccactgtgcagaccagacttcgctcgtactcgtgcgcttcgttagttatcctaccgcaaccatgttgacaaacccgatatggctgagatcgagaactgtcgataagatcgagaacctgaagaaggacagacacgcaggagacaaatccacctgtccttcctaaagaaagacgtatggaacatggtagcacgctaactcgaggcgatatcgctaatgaggcgctgtcggccgccaaaggatggctctgtacattctcacatgcattgcctatcttatgttacttctagataggctgtctaacttggtaagatgcaaagaggtgggatcaaggttcaagatgactgtgctgccgccttttctacatcgaaagaactactgtactaactgaatggccgggcctgtgctttcccatctgtcttatctatcgtgggctggcagggaaggaaagaacttgcatgtgggtgaaggaagaagtggcggtggaagaagtggggtgggacgacagtgaaatctagagtaaaaccaagctggcccaaggtgtcctgcaggctgtaatgcagtttaatcagagctgccattttggttcctggttgcaactgatttctagcttatgcggcactggcacagatttttgttcaatggtgccgattagaccagcgtttcacacaagctccacacgtgataaaaacacaaaaacaatactagacgagtggctcccggccctggacgcccggaacacggtggattacacaacacctccctggagctcgcgcgacccccaggagtacgtgcc

SEQ ID NO: 694393 - DNA, 153 bp, Homo sapiens
cgggaagtagaccggcttgtgaggatagaccgaagctagtagggttgaccgtggctagtagggttgaccgttgtctagtgggtagaccgtggctagtagggtagagcgtagataagtgggttagaccgtagctaagagggtagaccgttgcta

SEQ ID NO: 694394 - DNA, 1284 bp, Homo sapiens
  misc_feature (1284)..(1284): n is a, c, g, or t
gagtgggcctgatcgggggcgcgtgggcggggtcggctgacgcgtcgctccgggcctcggatcccggagcgcggggaggcagacgcgactgtgagctgctatgtccccgatccctgcggccggtcgcgtggggacacaagagcccatcgggggtgcccggggattgggattggagcgcaggacactgcacgtatcgcatcgcgtctgcgcaccatggcccagtgggcacctccacaaggcaccgtgagagccacaagcgcgggaagaaccagagccgcgatgcgtcttcggactcagagcgatggagcggcatggcggtagccagtggctggcgggtccgccatgcgactgtggcgcctgggacgtgccgctggggtgccacatcctggggcatcacatgggcgcggacaagtgcccttgtcatgcattgaggacgtcgcgtcgtggcgactggcacgtgtgcatgacctacagtcgggtccaacggtcggcagcagaagccagctaagacctaacaatggggtaagcggaggaaagtggaggactccagtgggccctctcgaggagccagggctgtacaaccgtcgcggggtggacaagctgtggcagaagtggggaccaggagcgactccttcgagattccggaccgggtatctccacagggcctcaaggggcaagaagatacactataacacctggatgcgggccaatagggggcagcacgttggtgaccccttggggaagattctcgaggacacttgggacgttgccagcagggctagccaaagttgagcgacaggagtacggcaggatgagccacgggggggcacaaggaaccaaggcctttggaaccccgagggaggcaattccttttgtcatttgggccggaggagggaaactggcaggcactttggtgaggagagggagcggctcgagacccctagagaaaacgggcacctccaagtggtggaccccggagggatgggttcagggacttggggagccccgtggcctggggaggcagtagcgcctggcgaatcgcaagggggaaaaatgcccaccgacgaaggatcaacccctcaaccgaccagccacacaccggggcagagtcgccgctatgtgggagagaaaacaggaaaccacgaaaggatatagcgctacaccagcgacagccgttgcaggaagggggaagagggcccccgcgatgagcaagggggccataggaaggcgcataggaagagatgtcaacgatgcagtccgcatctgcgcactggaacagagtgn

SEQ ID NO: 694395 - DNA, 985 bp, Homo sapiens
tttgtcgaagctagaggaccggcaggcgggcagcagcaactacgtgacggacggtggcagaacccagcagtgatgtggaggtggagacccacagtgagccccgagacttcacctgagctacctcagtggtcaccaagagtggcaagataaatgaaaacccatgaggtttgtgtgctgtggaccatgtgatgcctgacctggtgacaatgctatgccaagctggtacctgttgaggcatgctgtgtggatgtgcccatgtgatgcgtggttggcatgcatggattgatgtgacatgtggtggtgcatgtggtgtatgtggcaagatgcgcgtgaggccatgcttcacgatgccatcttgtagcagaactttactatgacgagaaatgtgtgacaaagcagatggccaacgcctgctatggccgacatatactggccaactcgagaacaatggacgacgagggtgataccagacacttttggcgtgagtgagcctcgggcaaccgaggtttcaactctcatacattgcacactgcactttacctcgaaaaccaagggaagtcgtccgcccgacccacacgttgcactgttttaccaataccaaagttgtcttcccaactcggaacgcgactggcagtgattgtgcatataccagcaccgcaccatggatgaatgcctacccaccacaaacgtcattgattgccaagacacagcttagccacgacctgggccccctatggcgcaacaccgagcacgggcatgaccccgtaacgccaaacgtgacaacagggacggccatgatccccctaatcatggccggcgttacattcatcccaggcgctgaaccgccaccgccaagcgcaccaacgactcacaaaacccgaccgccgtgcaatcgggaactagaccaaagaaagaacgccagacgcaaagagacccagcgggaggcacacagcaacccgaccccacccgacaaacaaaaccaaga

SEQ ID NO: 694396 - DNA, 370 bp, Homo sapiens
tcacgtgatttgcatagtggcaggtactggcaatctgtgctcgtatgtactgcgctgctgcagtctggatccaggacacttctggtacttcttggggtggcacctgtgggctctgactttgccctggcacgggtagtccttttcactggccaggccgctgtcgttagaggacagttatgaacgcgtcccagacgaagccaacgtggacgacatccccacagcggacacaatcaaacagttcctgcacggagacgtccacaaaatcccagaaactgatgcgccacagggtctctatgttgactgccgctgacatggaccagcagcagttgcagtctttctggtccttgatgggtgagatggagccggacaa

SEQ ID NO: 694397 - DNA, 435 bp, Homo sapiens
  misc_feature (273)..(273): n is a, c, g, or t
  misc_feature (337)..(337): n is a, c, g, or t
  misc_feature (399)..(399): n is a, c, g, or t
  misc_feature (402)..(402): n is a, c, g, or t
ccgatggccttctgccacttagttaatgtgcacctggcagcttaggtggccgcggagaaagcaactttggctgcaccaaggtccggcacaagtctggagaagcttcagccagttccagctttggtatcaggatgacgctggcctcataaaatgagttagggaggattccatctctttctattgattggaataagtttcagaaggaatgggtaccaagctactccttgtacctctggtagaattcggctgcagtctgctggcctggactttttngggtgatggctggagtcagctggcaatacagaagcaggaaacattcactgaactcagaaatatntcccaaatgaagcatagaaataaagtcttcttgcctctttctcagaattgattatgttcagntcnggtgagacaccacatgctgtctagattcatctt

SEQ ID NO: 694398 - DNA, 793 bp, Homo sapiens
gacagagacgctcagagctgtgttctcaggatgaccgagtggcgagacagcaggcaccagcggggcgcacgagaccccagacatcaagctctttgggaagtggagcaccgatggatgtgcaagatcaaatgacatttccctgcatggattacattgcatgtgaaggagaagtatgccaagtacctgccctcacagtgcagggcgggtatgccgccaaatgcttccgtaaagctcagtgtcccattgttggagcgcctcacctaactccatgatgatgcacgggccgtaacaagcggcaagaagctcatgactgtgcgcatcgtctagcgtgccttcgagatcatacacctgctcacgggcgaggaaccctctgcaggtcctggtgaacgccatcatctaccggtggtccccgtggaggatctcctgcggcgcattgggcgcgccgggactgtgagacgagcgggctgtgggtgtgtcccccctgcggccgtgtgtagcctggccatcgggtctggtgtggcacaggcgctcgtggaagtctgccttccgggagacttttggaccattgctgaagttgcctggcagatgagctctctcgagtgctggccatgggctcctcgtactcctatgccaatttggaagaatgacgagctgggagcgtgtggccgaggtctaaccgctgatttcccagggtggtggccaattgactgtctggccttgggggggtccggcctaacaaagggaaatcggggcgctcttggggggccagggtttccggggggtccgttttcgc

SEQ ID NO: 694399 - DNA, 246 bp, Homo sapiens
  misc_feature (78)..(78): n is a, c, g, or t
  misc_feature (148)..(148): n is a, c, g, or t
  misc_feature (210)..(210): n is a, c, g, or t
  misc_feature (221)..(221): n is a, c, g, or t
  misc_feature (230)..(230): n is a, c, g, or t
atgtgagtccgctctgttgccaggcccattccactatttttgtaatgttattggccttttctttttgtctctcttcantttccctaatcccacttgggggaatgaggcgggggaagaattgttatttttatttctatactgattatgntactatactgtcttcaaggaaaaaattctctaggacttcctacgttttgggttttttacatngtttctgaganaaatactanaaacatacttagctga

SEQ ID NO: 694400 - DNA, 546 bp, Homo sapiens
ggcagggcctttgctatctccatgggcctggcagaacatcgcggaatccacaaaggggaatgaccctactcttgccttgactgtggcaagagctaccgctccttctccaacctttggaagcacggcaagacccatcagcagcagcatcaggcagctgtgcggcagcagttggcagaggcggaggctgccgttggcctggccgtcatggagactgctgtggaggcgctacccctggtggaagccattgagatttaccctttggccgaggttgagggggtccagatcagtggttgactttgcccgacttcctttttggcacctccattccctgttgttgaaggccctccagcatccccttaagcatttgtacaaaatgtgtcccttccttttcccatccccaccaccttgtaagttttaaattggatttattttttcgtgaggggggtgttttggggtccttgacacacataaaggtgccccccccccttcccctttttagcattggtgaccccaaaaatgaaaccatcaataaagattgagttgcca

SEQ ID NO: 694401 - DNA, 723 bp, Homo sapiens
ggcgagctgtgacgaatgcccacaagatgaaattcagtgatctcttctccctgtgcgtgaggactatgaggactcttccaccaatgccacccaatgagccggctgaaaatgcatgctctgtccaagccctcgacagtcgaaacgacatgccacacatgccccccaactgccgaacgactgagtcgtggctccagcaagtgcttcatgaatgaggaatgacatctgacaaccgaatgcctaccaaatacggaaacgacaaaccgggtcctctcgcacgcttggagctcgtgacacgatgaactcgatgtgcccctgcacttccaccattccacacaccaccggactagcgacctgacctactaccctcactattgcggtgatttccaacaggcttcaattcacgcagcgctgcagcgaaggatcgccaccggcgcaacaccacccctctgactgccatccccacaaagcctccacacgacctgctagccaccgcagcgcagctctcccatcccctctcgagctcgacagcttcttgccgcacacgcctccaccacataccacaacacccctccacccccacctctcacctacccctccctctcgccaactaccaaacacccctctcccacccatgcaccttcccccccaccgcagcaatcacagccaccatacaaaaccccgccccacacccaccacctcccataacaacacacacctaacacc

SEQ ID NO: 694402 - DNA, 110 bp, Homo sapiens
tacttttcccagggaatcatttattgtcaatagagattatctgtgtgcgtcaaatagggaattcaacaaaataaagaacgaggacaaccagttgaaatgcactggtatct

SEQ ID NO: 694403 - DNA, 520 bp, Homo sapiens
gcgtcgaccttgagctcaggagttcaagaccagcctgggcaacatagtgagaccctgtccccacaaaaaattgaaaaattaacttggcatggtgtcacgcgtgtgtagtcccagctacttgggaggctgaagtgggaggatggtgtgagcatgggagggcaaggctgcagtgagccatgatcacgccactgcactccagcctgggcaacagagtgagaccctgtctcaaaaaataaataaataaaataaaacaaagcgttgccacttagtttgctaaatacagattcctttcttcactattcatgttgaagggggaaatatttcagttataaatgtgaagagaatcccaagttgtttttgttttgtttgtctgattggtttgttttgtttgttttggtttgagaagtctcgctgatgtcacccgggcggacaagtctcgactcctgatctccagagtgcgggattaaaggcgtgcacctgtgctccgccgaggatccaagttttttgaaagtttatcttg

SEQ ID NO: 694404 - DNA, 129 bp, Homo sapiens
aaggcgcagtgcacagatttcgagctctgaattcgcggcgcattacgcgtatcgatgcgcagtgaggggcgcaatcatccaggccatatatccgagtatagtagccgtaacgtacaacggtactctaaa

SEQ ID NO: 694405 - DNA, 346 bp, Homo sapiens
aaggacctatgacctggttagcacctgcaccaaggcctggtggcgatgccgaacaacgacacgcccagcacatgggcatgcgtgcggcgtgcagccagcgcattggcgacgttatggttacccagcaggttcagctgtacgtgctcgtcaccttgcggggtatgcagggtgaaggacgggcaaccacgggcgtcggccttgatattcgaggcatggaaatcggcagcggcgtttgtgcaaccgcgaagctcaagaccttgcgaccggcggcacgtacacgccaggtttcgaaggccttgtcgtcgaggttcagcacggcagtgccggatgcgtcgaggccttcgat

SEQ ID NO: 694406 - DNA, 956 bp, Homo sapiens
  misc_feature (42)..(42): n is a, c, g, or t
  misc_feature (134)..(134): n is a, c, g, or t
  misc_feature (141)..(141): n is a, c, g, or t
  misc_feature (224)..(224): n is a, c, g, or t
  misc_feature (313)..(313): n is a, c, g, or t
  misc_feature (327)..(327): n is a, c, g, or t
  misc_feature (379)..(379): n is a, c, g, or t
  misc_feature (502)..(502): n is a, c, g, or t
  misc_feature (516)..(516): n is a, c, g, or t
  misc_feature (546)..(546): n is a, c, g, or t
  misc_feature (596)..(596): n is a, c, g, or t
  misc_feature (620)..(620): n is a, c, g, or t
  misc_feature (649)..(649): n is a, c, g, or t
  misc_feature (663)..(663): n is a, c, g, or t
  misc_feature (700)..(700): n is a, c, g, or t
  misc_feature (731)..(731): n is a, c, g, or t
  misc_feature (756)..(756): n is a, c, g, or t
  misc_feature (791)..(791): n is a, c, g, or t
  misc_feature (810)..(810): n is a, c, g, or t
  misc_feature (870)..(870): n is a, c, g, or t
  misc_feature (874)..(874): n is a, c, g, or t
  misc_feature (882)..(882): n is a, c, g, or t
  misc_feature (923)..(923): n is a, c, g, or t
cctgtctctctgggacagagcctaaaagatgatgttcatgtnttgtgtgaatgaaactcaaacactcttcagtttttagagtaattttctggtatcgagcgaccacaccgaggagcacaccctgcttccaaggntgcggcnttctgcacacagtgggggatccccacccaccctggctcccctcaagggctgcgtgcacagtgcccgctttccagtaacctganccaccctgagttcctattccattttgctcggggaagaaaaaagaaatgccctgtggctcagctctgccactactcagaacaccagcttnagcttccctatgtnccccagattcagcagcccagcagggattgggggaaatgctcccacatcaggngggtggtggcctggtccctgcagattggactggcttttcagccatctccaggaagcaacaactagcagaaaactgttccttaaccccaagggtgatgcacacttctcccctggtctttctgcnccccgatgcccctncatttacacagcagttcgcagacccttgcngcaacctgcttgtgttgctgagcctgctgtgggagcgcctaaactgagtncgcgtgtccgctccaaaggcagcnggcttgaattctgtgggaacgtgcccttnaccctttgccagcngttgctggggagttttttcggcccctttctcagactnaccacctaccttcaacctgcgcagaacaatnagcgttctgaccacttgctagaganggctttaggccgaccactccatcctcactgcaggncttcattccttctggcttncatcactgcatggccccctaagaggtccccctcctggcccttgttactgttccttaaganagcnactccgcnctaagcttttggaggccagggacaaagtttcgttcactgtnctttccgctgcatgagttcagtttctgggcagg

SEQ ID NO: 694407 - DNA, 103 bp, Homo sapiens
aggtacgaggagggcgtgggatactggtgattggagcttggggttcaaggagcagttgggcaacgaaacatgagagagagagcgagtcaagagttctcagaga

SEQ ID NO: 694408 - DNA, 322 bp, Homo sapiens
ggcgggggggggaaaaaagggggcctttcccccccccccccccccttggggttttgggggtccaggtcccccccccccccggggggccccccccccggggccccttttttttttttttttttttttgggggggggcccagggaaaaaccccccccgggggggggggttttggggggggggggggtttttttttttttttaaaattttgggaagggggggtcccccccccttttttccccttttggggctttttttcccccttttgggggaaatttttttgggggggggcctttttttttttctttttaccccggccccccca

SEQ ID NO: 694409 - DNA, 95 bp, Homo sapiens
  misc_feature (33)..(33): n is a, c, g, or t
  misc_feature (53)..(53): n is a, c, g, or t
caagtttaaaggaattctctgaaaaagttatanaattattctaggaaacatanccataatagtgttttaagggactttcacctggggattttata

SEQ ID NO: 694410 - DNA, 656 bp, Homo sapiens
tcgggagacgtgcgccttgagctatttcggtttcctgtggctacgagagcgggtccttggcgggcgtgaggcgcctagccggatgtgctcatgccagatggcatcgtctctgctggctaagcctcacttgccgctccgcccgggtgctctctagagcccggtttatcgagtggcagtctccagggactgccgacatacaagcaagcgtatgtggagaagcgtgctagccgcggtccctacaggacgaacgaaccgtccacggtgaatgtccagtgagacgacagtcaccgagggggctgccaaaatcgcctttcccagtgccaacgaggtcttttataacccggtgcaggaattcaagtcgggacctgacatgtgctgtgatcaccgagatttagctgcgcattcagcttggggccaaaggagtccagatcaaggttccaggagagaaggacacgcaagaaatgtggtcgtggacttgtcatgagcacgaggcggacgaggttgagctgaaagacagtgaaaacctggtcctcacgtgagaccaacctcgcgacagcggccgttgggggacatctgtgaggaaggcctgctgtgtgctggaagtgcctggagcttcaggcctacgttccattcgattagccctagacgtgctgggc

SEQ ID NO: 694411 - DNA, 102 bp, Homo sapiens
  misc_feature (72)..(72): n is a, c, g, or t
ggatttgctggtgcagtacaactaggcttaatagggacatgtctcaattctttgtatatgcattcttttcangatgtattaaacaaacaaaaacccttcaca

SEQ ID NO: 694412 - DNA, 606 bp, Homo sapiens
  misc_feature (293)..(293): n is a, c, g, or t
  misc_feature (295)..(296): n is a, c, g, or t
  misc_feature (559)..(559): n is a, c, g, or t
  misc_feature (603)..(603): n is a, c, g, or t
gaacatctggctttcaagggaacaaagaatcggcctggcaatgccttagagaaggaggtagagagtattggggctcatcttaatgcctacagcactcgagagcacactgcttacctcatcaaggcactgtccaaggacctgccaaaagttgtggagctcctggcagatatcgtgcagaacagtagtctggaagactcacagatcgagaaggaacgagatgtgatcctgcgggagatgcaggaaaatgacgcctccatgcagaacgtggtctttgattacctgcatgcgacacntnnccaagggcacacctctagcccaggctgtggaggggcccagtgagaacgtcaggaggctgtcgcgcacagacttgactgactacctcaacagacattacaaagccccccggatggtgctggctgcagctggaggtgtggaacaccaagcaagctgctggaccttgcccagaaacacttgagcagtgtctcccgagtgtatgaagaagatgcccgtgcctggtctcaattccatgtcgcttcactgggcagttgagattccggcnatcgggatgacgcccctgcctttgggccacgttggccattttgnaaa

SEQ ID NO: 694413 - DNA, 1112 bp, Homo sapiens
aggagggagatctacgcgaaggagccagtgcagtggtggcagtggaggccactgtgatccagagtcccctcaccccatttccttcccacagtgtccctgtgccaaatgatttattatctcttgacaaccaaggtgcctccgatctggatttccaaggacgaatttcctctgaagcaccgtgaacttgctactaccagcaccatgcccataccgaatatccgagccactgaaccctggagcagaagaaggagctgtctgcacatctgctcaccggcatcgtggcaccttggcaggggcatcctggctgcagatgagtccacatggtgagcattgccaagcggctgcagtccattggcaccgagaacaccagaggagaaccggcgcttctacctgccagctgctgctgacagctgacgacctgcgtgaaccccatgccatgggggtgtcatccatcttccatgagacactctaccagaaggcggatgatgggcgtcccttcccccacgtcatcgaatccacggagcggtgtacgtgggcatccaggtacgacaagggacgtggatccaccctggcagggcaccacatggagagactaccacccaacagggttggatgcgactgactgaagcgcatgtgacccaagtacaacgacggcacgcgacgcttgacttcagcccactggccgatcgtgcgcctgaccgattcgggcacacacacacccctcacgccatcgaccctcattgcacacatgccaatgtactggccccctactccacgttatgaccacgcccactgcgcctcgcgcccaccacgcgccacctgacaccccacccagatgcgcgaccacagaccgagacgggcacgcagacatgggcaaccgagaacagccagccggacggcgacagaacaccggcacgtgagtagcaccagaaaccgaacaagagaacccaccgtgcgtcaagccgagactgggaaccacggaccgaggagtgagacacaacgaaaaccacgaaacgaacagcacagaagcccagccagcaccacgcaccaaataccccccactgacgtcaacccgaccgacggccgaccaccaacacggcgcaacagccgag

SEQ ID NO: 694414 - DNA, 175 bp, Homo sapiens
tggtcgtagcatgcagggcgaggaggttgggccacgaagtagccggccggggacatgaacgcgtggccgcaacgtcctggtcgttggtagaagaggacatagtctgtcttggactccatctgattctcatatactggtaatacacttttatcatctaagtatttccacttgccgt

SEQ ID NO: 694415 - DNA, 350 bp, Homo sapiens
taaaaaaaggtatttattaattcttttttttttttttttttttggggaagggggaaggcacttttggtttttgggcatggtggggggggaaaaaataaaaactaagttggggagaggaagggccccttaccaaaaaaaaaaaaaaaaaaaaactggggttttccccctggggtttataaggggggggggaaatccttttggggggtttgggtttggttattgggacccgtttattcgccagccaataaaaggggggggggggggggacctttgaaattttgcccttggtagaaaatggttaaaaaaatactttttttgtttttttttggaaaaggaaaaataaaagaaat

SEQ ID NO: 694416 - DNA, 194 bp, Homo sapiens
ttattggaaatcagaggctcaaaaagtaaacgaaggctgatggcacgcctggggataggcctggaaacgaggtgaagtggctgaggtgctatgaggagtcccctagcgccggtcttcgttcagagaacatgcccctggcccctgcgcacggatggagtcctatggcggcgtcatatgggtgctccttggtcgtg

SEQ ID NO: 694417 - DNA, 102 bp, Homo sapiens
tgatgactgcgtaagccttagactaaagcctttgagcatggtaagagatgatttctctcctgggagcagttctcatcctgggagcaattctcatcctgggag

SEQ ID NO: 694418 - DNA, 153 bp, Homo sapiens
tacataagatgctctccctctgcgggcctcttattgctcctgctcctctgactccgccgccgactgagtcgctcttgctactcttcatcgccaatcgcctcgtgtcgcgcgatctctccgcccatgcagcttcaaggcgcagtgcttatgtct

SEQ ID NO: 694419 - DNA, 547 bp, Homo sapiens
cactcacgaggtagtataacagaggcaagacatgtcatggactacaaaccaacaggcttgttcatcaccagccatgggagcaaggaaagggaaaggctccaagaaccactcttgtcattgtggccattaggtaaatagagctccaccactcactcacaacaggaatgctagtggagagaaagccacacactcagttctggacatgtcgagctttagctgtctgggatacaggagggtggagatctagaggatgagatggagggctgggctgctgatgccaatttagagatgtctgccatggccatgagtggtctcaatcaggaaggacagaatgagatgcgaagaagatctccagctgagcctggaggaattctacccccagttgtgtaaggaggaataaactggctaagaaaacagaagaacagtcagaatggtaagaggaaaaccaaaggagaataacattttgtaccctagaaaaatgtatttcaagaaggatggagtgttcaacagtttagaagagagccagagataatgagactgagccgtg

SEQ ID NO: 694420 - DNA, 3267 bp, Homo sapiens
gccaaaggcacggagggagagacagcaagtgcctttccaagccttggtggacaccacacctgcagctctccccttggccacagcaagtcacgtggctgggctcagcattaaggggtgggggacaggcctgccactttattgtccgctctgcacagtcgggtggcagtaggctgagaatttggagggctaaacaactgggactctggagagtctgtgtcctaataatgcctgctttggagcactccttccccacccgcctgctccaggggaatagcgtccctggtcctagcatttcactagatacctcgtgcctttgaaccgctgtgtttgggagggaggaagaggatagacaggtccagggctcccctcacttgggaaggtcctagtagaaggcattccttctgagtctcctggccctacagcttctcacccctgctgctccccaagacctgacccggaccaatcagctgcatctctgcaccaagtgccacccccaccgtgcactgctcgcacctcacgctccccatgggctggcccggaccccagtgaggtctgcacctctcggaccagccaggacctcggaagccatgacctgggtgttcagggcttggcggaggagacgctgctccgcgggggatggagaagccccgcccctccacaactcccttaatctggatgcaattagaggaaaccagccaaaaaccccgcggcagctgttgccccgggattattcccagccagcgagaggcattagggcgataattcagtcattagacttctagccttcccaccgccagaacgtgcaaataggggataatcagccctgcacggccatcctcagcaatgctgcttatttaacccattttttaaaatgacacttaatgttattggctggcgtacgtgtgtgcgcatacttaaaagttgatgcgtggtgcagctctgctgctaatgtctgctgacagcgtcgcccgatgttgctcagggcctctgggaagaggggacacctttgatgtgggcgtgctggcacccaagaggcagcgtggtcaggctcgatgcttgccagccctggaaggtcccgccagggttggggggtcgggtgagcactcagagatctggggaggaagcgaggagcctggtgtcctcaccaggtgcagaggggaaatgcgtactgctccagaaggttctgactcaagtctcggccctgaggactcagaactcacaagtcatggatcaagtacagagggagggagggccccagcccacccctgcgggggaggaggagggtctgaaggtgggagggcagctccatgagcagccactgttcctgaccagccgaagtgccaggcagggggaggtttccatgtccaggagggagaggacctccaccctctgacctttcagttttccatagcagcccagtgtgaagctcggcgggggtgggcagggcatcaggacaagatgaagatgctggctctggaatgaggactccccttgggctaaggggtagtggctggcagaggttgcccagctcttttggaggccacagggaatagaggtggggtggcaacaggaaatagggtgtgggctgtagaccatagtgggtggggtggtgcttccgttcctgtgaggcccgcccccctgagccccctcgtctgcttcttgtttggcagaaatagatgtggggcacagcccctagatgatgggaatctgcccacgctgtgccctctggggaatgaaatcttgctcctcgtgcagcctcccctttcccttgcggggtgggggctgggggtgccaaggctccacccttggagggggttgctgggggtgccaaggctccaccctttgctcgctgggcagagggaaggaagcacctccctgtatgctctgcaggggcccctgcaggccactttgcctcagaggaaggaggagaggtcccctgggaaaatgcacacacacacacaacacacacacacacgcacacacgcacatgcacacacgcacgcatgcacacacacacacacaacatatgtgcaggggtgcagcctaagtcagtggagccaggactggctgcgcagctgggcctgccccattcttggagtccccagggaatgagcctcaggatccacttcgtcccttgtttctaagccaggctgcacggccgttcctgggtgtgaaagcattctgtcctgtctccagtcagagggaaccgcccccaaactagaaagctaatttcccccgaaggttcatgaagccagaggcatgcccttgggggttggtcgggagaagggtgagaggcagtgctgtggaaggggcctggcccctgctgcctgcgattctccccgggtatgtggccttctgcctccttcagcctcagtttcctcgcctgtaacatgagaacaatgatgcctgcctgcccaggccacctcctgggactgcagtggggactctaagtgtaaaactgtcatgaggatggtttatgaagtcccagggaccacacctgccactcagggaagagaccgctgacctcagccatcagccatgtgcatcgtgaggggcagcgagctcaggacggagagctctcccttggttcggagtcagcacacctgcactcccacacgcccacccagctgtgtgtcctccgccgagggtgagcctctctgtgactcttctgtaaaatgcaccccattctgcccactcctgccacgagacccatcctctgcgatcccgccaggcatgtgtgtgtgaatgcatgtgcaaagctctccatcagaagggtggtgtgggccctgcaggtcctacccctcggccttgaagctccctcgggctgcggactctgcctcctgggtctgagcattagaaccaggagaggggtgtccctgggcagagccaggggtgcaaacagcctgcagccatctggccttttaagtatagtgtgtcgcatttccgggtaggaaggtagcatttcaagttcaaagagaggtcaagtcatgcaaccatctttcctccagcacttttggggtaaggaggacagtttttgttatggtttaggggaaattttcatgaaattttcaccattaccaatagattactgatgtccatggcaagtgatctgttcttggtattttgttttgttttgttttggtttttaaatgtaatcacccattggtcaggcccaggactggtcaccatgagctctgctagccacggccccaacgatgcttccggctctcatggattccacagcaaataaaactgtgctgacaacag

SEQ ID NO: 694421 - DNA, 2454 bp, Homo sapiens
  misc_feature (2416)..(2416): n is a, c, g, or t
gccaaaggcacggagggagagacagcaagtgcctttccaagccttggtggacaccacacctgcagctctccccttggccacagcaagtcacgtggctgggctcagcattaaggggtgggggacaggcctgccactttattgtccgctctgcacagtcgggtggcagtaggctgagaatttggagggctaaacaactgggactctggagagtctgtgtcctaataatgcctgctttggagcactccttccccacccgcctgctccaggggaatagcgtccctggtcctagcatttcactagatacctcgtgcctttgaaccgctgtgtttgggagggaggaagaggatagacaggtccagggctcccctcacttgggaaggtcctagtagaaggcattccttctgagtctcctggccctacagcttctcacccctgctgctccccaagacctgacccggaccaatcagctgcatctctgcaccaagtgccacccccaccgtgcactgctcgcacctcacgctccccatgggctggcccggaccccagtgaggtctgcacctctcggaccagccaggacctcggaagccatgacctgggtgttcagggcttggcggaggagacgctgctccgcgggggatggagaagccccgcccctccacaactcccttaatctggatgcaattagaggaaaccagccaaaaaccccgcggcagctgttgccccgggattattcccagccagcgagaggcattagggcgataattcagtcattagacttctagccttcccaccgccagaacgtgcaaataggggataatcagccctgcacggccatcctcagcaatgctgcttatttaacccattttttaaaatgacacttaatgttattggctggcgtacgtgtgtgcgcatacttaaaagttgatgcgtggtgcagctctgctgctaatgtctgctgacagcgtcgcccgatgttgctcagggcctctgggaagaggggacacctttgatgtgggcgtgctggcacccaagaggcagcgtggtcaggctcgatgcttgccagccctggaaggtcccgccagggttggggggtcgggtgagcactcagagatctggggaggaagcgaggagcctggtgtcctcaccaggtgcagaggggaaatgcgtactgctccagaaggttctgactcaagtctcggccctgaggactcagaactcacaagtcatggatcaagtacagagggagggagggccccagcccacccctgcgggggaggaggagggtctgaaggtgggagggcagctccatgagcagccactgttcctgaccagccgaagtgccaggcagggggaggtttccatgtccaggagggagaggacctccaccctctgacctttcagttttccatagcagcccagtgtgaagctcggcgggggtgggcagggcatcaggacaagatgaagatgctggctctggaatgaggactccccttgggctaaggggtagtggctggcagaggttgcccagctcttttggaggccacagggaatagaggtggggtggcaacaggaaatagggtgtgggctgtagaccatagtgggtggggtggtgcttccgttcctgtgaggcccgcccccctgagccccctcgtctgcttcttgtttggcagaaatagatgtggggcacagcccctagatgatgggaatctgcccacgctgtgccctctggggaatgaaatcttgctcctcgtgcagcctcccctttcccttgcggggtgggggctgggggtgccaaggctccacccttggagggggttgctgggggtgccaaggctccaccctttgctcgctgggcagagggaaggaagcacctccctgtatgctctgcaggggcccctgcaggccactttgcctcagaggaaggaggagaggtcccctgggaaaatgcacacacacacacaacacacacacacacgcacacacgcacatgcacacacgcacgcatgcacacacacacacacaacatatgtgcaggggtgcagcctaagtcagtggagccaggactggctgcgcagctgggcctgccccattcttggagtccccagggaatgagcctcaggatccacttcgtcccttgtttctaagccaggctgcacggccgttcctgggtgtgaaagcattctgtcctgtctccagtcagagggaaccgcccccaaactaggcctcagaaggtgaggctccgaagccacctgccgcataggcctgacagtggaggaaatagcggggaggtggtgctgagaaaggttgcggaacgtttattattattatttcttggcacacagccttgtgctgcccatgttgctaggcctgggttggagaaaaggcaaatgcaagtacagcactttcgagaagggcntttatatgtgcacagaacatagagaatgtgcacccgaa

SEQ ID NO: 694422 - DNA, 170 bp, Homo sapiens
gcggttgttctctggagcagcgttctttatctcgtccgccttctctctacctaagtgcggttccgcacccgatgggaaggattcggatggacatggacatgaggcccccttagggccccaggaactatcttttcggggtgttgtaacttaagggcgacaaaggtattatc

SEQ ID NO: 694423 - DNA, 109 bp, Homo sapiens
aaggttgaaagggcccccggggttttaaggaaaaaagggggtttccccttttttttttttccaaacccccccccgggtggttttaaaaaaacggcccttggggccccca

SEQ ID NO: 694424 - DNA, 297 bp, Homo sapiens
atccttcctcttttacgttgcaggaattgtcttatttaattaatccatcagcctctcatagcaaatatttgagaaaacaaatgtttttcagattctattttcagtagggaagtaaaaagatgcagctcagtgcgcataaagttgagacacagatggggacatccacccccccctctttggaacaaaaaaaatgactgggggggaaacacaggtcaccatgggaacaggggggacacaggacacacagggggggggtgtctccacctcctcacattttgctaacaggagcgcagacac

SEQ ID NO: 694425 - DNA, 357 bp, Homo sapiens
gagctggaccccgcaactgcttgggatgtagtagttttcgtaattcgcagggatcaatgatgggcactgaccaggcttgattcttacacacatatgcatgggccgtgctttccaaccgtccgagggtactcacgaaaggcagctggcgggacaagaagctcctggggtccccctcatccacaatcatcaccttgttaggaatgttgacaaagtggacgccctgctccacggccttggtgtccttggcctgacggcctccacaaatcacaacctgcttgagggtgtgctgctgggctgatagggcgcggaccatcttgggcaacgccaccgggacaccacgcatgctctcgtaaaagg

SEQ ID NO: 694426 - DNA, 303 bp, Homo sapiens
  misc_feature (242)..(242): n is a, c, g, or t
gtgacaacggctgcatctgggacctcaagttctgccccagtggagcatgggaacttccaggcacccctcggaaggcttcctcttctgccccggttgggtctcttggctctggccttctcagacgggaaagtacttctattcagtctaccccatccggaggcccttcttgctcagcaacccccagatgcagttaagcctgccatatataaggtacaatgtgttgcaactcttcaggggggggnctatttcaagctacagagccctctgagtgttggtgagtgtctctgtctcggctctgatgtc

SEQ ID NO: 694427 - DNA, 104 bp, Homo sapiens
taatctatgaggatcccccggtgctgccttatgatgagtcgagcgggcttatcgcccgagctggtgagcaacctggcatcgctgctgatgcagcattaatctct

SEQ ID NO: 694428 - DNA, 142 bp, Homo sapiens
cttgataattgagctatgagcatcctgtaagaggctaggtctactagcggctatatgcacatttgtccgctatacaagaagtttactcattccccgtatccccgttttctcactagaaggttagctttttttgtaagttttt

SEQ ID NO: 694429 - DNA, 448 bp, Homo sapiens
gactccttaagtgttaaataatgtagaagtaaaaaaatttttttaaaaggcttaattggggaggggggacttatttctgtttacggtgtattaccttccttccctcctcttctccccccaaacccaacaaaatacagttgggaattcactgaaacagtaccagcaagtcatgagattttttagtaaagatgagaaagatggttgaagaaaattagtgcataatttctcagtgaataaagtggtagctctcatatactaaatagacaagtttacatgctggtaatttagaaaatggactaaaattattcaaaaaccggttgttggtggtttaactcctgggtctttaaggcttcattaccaatgtttcaaagagttctaatggtacacggtgggtttaaatttttcttttaaggggatagttggtaatagtaagaactgtcccatatgt

SEQ ID NO: 694430 - DNA, 106 bp, Homo sapiens
ggcagatggctgtgggttacgtgctgtggtgacgtgctgtgatcgtgatcctttatttgcactgtatgagaattttcacactaacaagagtcgagggactcaacac

SEQ ID NO: 694431 - DNA, 253 bp, Homo sapiens
agaaaaatacaggtctacttcactcagaattcttcagatttttacacaacctaccagggtggagtggggagactggggggcaggcagccgcaggagtagggctggtggagaggggctatgcttctgtctccacctgagactggctccctgccgtagtagctcttctgctcctaccttacatctactgtagtacagtgggatggtctcctgaggaagcctctgtcacttgagacttgcacataatgccaagggt

SEQ ID NO: 694432 - DNA, 769 bp, Homo sapiens
gacaacacagctaacacaaggccccgcaggcaaggactctgggacagacgcaggcagctgcccagagcccagaccaagcatggacgccgtgatgccaccatggagaaactccgggcacagtgcctgtcccgcgtgccctcgggcatccaggctctgccaggtttttccgccaactagacggggacgggagcagatccctgacgctgatgagttccggcaggtctgcccaaaactcgggctgtgctgaccaggcggaggcagaggggtgtgtgcaggaagtgggaccgcaatggcagcgggacgctgaactctggaggagtccttgcggccgctgggggcccccatgtcccaggccgggaggtgtcatcgcagctggatttgtgccagctgacccgcagtggggacggcgtcgtgcggggtggacgacctcgcggggtgtgtacaggtggctgtgcccaccccaggtttgccgcatgtgggatgtgacgcgcgaccgaaggttggtggcgccgtttccttgacaaccttcgacttccttctggaagaggacggggcacgggtcaccactggccggaatttccgaggcctacctacccgggcgtgagtgcctccatgaaccccggatgcggagtcgtgcccatgattgaccatgtgcctggcagctgtgagcagtccggtcaaccctgtgcctgtgctgtatccccaccctggggaagcctccttctggcccttttatctgtgggcaccccccagctggggcgtggggacg

SEQ ID NO: 694433 - DNA, 129 bp, Homo sapiens
  misc_feature (24)..(24): n is a, c, g, or t
  misc_feature (67)..(67): n is a, c, g, or t
  misc_feature (85)..(85): n is a, c, g, or t
  misc_feature (129)..(129): n is a, c, g, or t
cgaggatccggatgtgtgctccgnggaccggaacatctcggccagctaccccgcggcgcacagcctncagacgacttggggccancttctacccggagctgaagccctacagctcccgggaccccgaan

SEQ ID NO: 694434 - DNA, 208 bp, Homo sapiens
  misc_feature (64)..(64): n is a, c, g, or t
  misc_feature (115)..(115): n is a, c, g, or t
  misc_feature (125)..(125): n is a, c, g, or t
  misc_feature (144)..(144): n is a, c, g, or t
  misc_feature (151)..(151): n is a, c, g, or t
  misc_feature (153)..(153): n is a, c, g, or t
  misc_feature (165)..(165): n is a, c, g, or t
  misc_feature (168)..(168): n is a, c, g, or t
  misc_feature (177)..(177): n is a, c, g, or t
tacacttaggaaaattcaacttaacttgaccgctctgagctaaacctagccccaaacccacatncaccattactaccagacaaccgttagccaaaccaatttacccaaataaagntataggcgantagaaacttgaaaccttgngcaatanantatagtacccgnaangggaagatnaaaaatcataaccaagcatattatagcaagg

SEQ ID NO: 694435 - DNA, 800 bp, Homo sapiens
  misc_feature (244)..(244): n is a, c, g, or t
  misc_feature (608)..(608): n is a, c, g, or t
  misc_feature (625)..(625): n is a, c, g, or t
tcaagctttttgaccacgctatggtccggcggcccatcggtctggaacaggctgggctttgtacaactaacaagagtttgaaagaagcatatattccaaaaggaacagaagtattcattcctggacgaaaccccaagaactccctctggtttctcagaagtctaattccgagcaacacttcaaacaggggaggagaacacaacacgaaaatctcaaactaagaagctgcgtccggaatcttccntgtgatgtgtcaattcaaggtcgctgggctggaggcgccgtggcaagttccctcacaggaggtggtcattcggccaaacaggcctgggtggtaacgggcggccctctgtaacacggcaaacggtctaatgaaaccttcctataaaggaacctaagagagacaagggcactccacaagcggctgaatgagggacgggctgggaagaatgggcaaggccccgggaactggggcagaatctctcaaaggcagaacctaacaggcaaggttcgaacaccaaaactcaccagccaacgaatgaacgcaactaactccaagaaactaaccgggctggctctaactggcttcacggggagcctggagccantggtccgaagaaccttncctggggccttcgctggaagttggccggtcctggtggaagggcaagctgtggggcttctaagctgagccggggtgtgcgattcctgttgtaaccttccccaagaggcttcaccttgggcctgggaagttgtgcactccaattgggcaacaagactgggcccttttcgttggttcc

SEQ ID NO: 694436 - DNA, 1255 bp, Homo sapiens
tgatctgaagtggaattgaaccagcctaaatatgccattagagttaattaggtgacttgctgatcatattgtaccgtgtgtgactatggccctgggaaccaagttgaagaaataacgaaatctcctctgagatgatgtagtagcatttctgctcgggccatgctcttgtcatactttatataacgctcaggattagatacctgcacgtacttgtaaattaagttttagggttacataattcctgtaagagactgctccaagcaatcatactaccttcgttgtacaattttctactcacttgcgaatgacagagatgagacagacgaatgtggtgcctcatggttaatcgaaaaagtccaaggcgaagtacgtccttatccgacatgttcggcaactactgatatgtccaatcctgaaagcggtgtgtaattagggagaatgaaagaatacaaaatttagtgataatgcgtactatggacttactgtatatgcatggaaatgaacagtaacatttgtcagggtttatcacttacacaatacgtagtatccgtgggacctttggttgaaagtcattaataggacaggcaatccccctgatggtgttaagatgttctctgtacatgaggatgatcatgtgggtagggtcgcttgagatgttgtacttggccctaaaactggacgtccgatagccactagccacacttgacatgtactttgagttactctgggaaggaggtcaactaatatacgtgatatacttccttgatgtgaaaattcgaagatttacttgactaggcgccgcatgaaagggggttgtgatctaaacaagtggcgtgaacgaaaaggcccttgtaaaagaagatagtctttggtagttgacccaattctgcgcggtttgaaggggtaaacattgttaaagttcaatcgtacgccaaggaaggcggggaccacccatgtggacaaaaatgggggaaccaggttccccaacgtggagtaaacacagtgtctccaggggaaggagcaaacacacttatgaggcggaacctcttaggggcccggaaccttgtgacacttgacgttcatacagagcgttccttataggtgtccttgtgttgcaacgtgccttttcttgccaactggctacttagttccagagaacaggcaagacaacagttggcttggatgttggagacatattatcggccgtcgtagatcagatcaaagagtgtgtggtaatttacacagcaaatctccc

SEQ ID NO: 694437 - DNA, 225 bp, Homo sapiens
  misc_feature (119)..(119): n is a, c, g, or t
  misc_feature (143)..(143): n is a, c, g, or t
  misc_feature (146)..(146): n is a, c, g, or t
  misc_feature (184)..(184): n is a, c, g, or t
gtttttagagattcagtgaggccagttttcttttctcactgtaatcatagggattggttcattaggtaaataagaaatgaattaaaaattaaaacagaaaaggactccaaaaacaaaancaacaaaacaaaattcatttatcnctncttagatttcagcaataaaggtatatccagttgacctnccatctaaaatctgaaatctgaatgctccaaatccaaactt

SEQ ID NO: 694438 - DNA, 720 bp, Homo sapiens
agcgggttctccatcaccactgtgatggcatccgcttccgtgactgtcactgtgcaccctccgcctgtcctgggcccacgcaggacccccaagcggggctctgcacaggccaggagggctacccagggactgaccacgggttgttcatgggtcctcacctgcttttccaggtccaggtgagaggacgaatttgaaggtagaagtcacagagttgcaggatgtggagtgcgaggagtggccccggggaagcagctccaactgagggtgattaaaatctgaagcaggccgggcgcagtggctcacatctgtaatcccagcacttttggaggccgaggcaggtggatcacctgacgtcaggagttcgagaccagcctgggcaacatggtgaaaccccgtctctgctaaaaatacaaagttagccaggcatgatggcgagcgcctgtaatcccagctactagggaggctgaggcacgagaatcgcttgaacctgggagggggaggttgcagtcacctgagattggaccattgcactccagcctgggcaacaagagcgaaactccatccttcagaaaacagaccatcctatcaactccaccactgctctactctaccggaggcgtccaacatccggaaaccccttgccccttcaccgtttccagcaccggcctgggatatgaaccggctccgaataccggtcaacgttgccttggcccaggattc

SEQ ID NO: 694439 - DNA, 403 bp, Homo sapiens
atacagtaattagaactcgagcgtggtaccatcgtataaggcctaagagtacctgctaacagtgtcatccaagtgttttcatgaggtcggagccgccgctcatgtttcgctatctctgagctgtccctcgtgccctgtgtgagattgttctcgctaagagggggctcaagatggtgcggcctgagtgtgcggccggcgggatatgggatacacccgtagggtgggcggggtgtgtcccacggcctaattccatctttccagcgatgacacgagagtgcccttgtgaggctggcctccttgggcgcttgtccccagcggaccgcgcgtcgtgagccacgatgctccccataccccacccattcccgatacaccttacttactgtgtgttggcccttatcgaggg

SEQ ID NO: 694440 - DNA, 253 bp, Homo sapiens
  misc_feature (151)..(151): n is a, c, g, or t
  misc_feature (187)..(187): n is a, c, g, or t
  misc_feature (190)..(190): n is a, c, g, or t
tcataatatgtcaatggcgtatcaatgacgtgaaagaccgacttcacagctggttggtagtctgtggtctctaacattactctcatgcgaattcagaatttaagctttataagcaactcggaacataagacactaattccatcttgaaaanctgtaaaaagaagcgtaggctctgtccacgaccaanccnagcctatgcctaattccaggttgaatgagtctgctccttaaataaacctatcccagacagaac

SEQ ID NO: 694441 - DNA, 591 bp, Homo sapiens
  misc_feature (159)..(160): n is a, c, g, or t
  misc_feature (163)..(164): n is a, c, g, or t
  misc_feature (167)..(168): n is a, c, g, or t
  misc_feature (173)..(173): n is a, c, g, or t
  misc_feature (175)..(175): n is a, c, g, or t
  misc_feature (181)..(183): n is a, c, g, or t
actgaccggatcgtatttacaggcacgaaacgaggtgtgaccgtaagtacgcattcactggccgaaagatagaaagggaaggacggctgtaacgaagagtaagaaatagaagaaatgaatcatgagggagagaaggatgttaggaaggagagaaggaannatnnaannagggngngcaggnnnaagagaaggaagcaagggagggaaggaaggaaggaaggaaggaacgaaggaaggaacgaaggaaggaaggaaggaaggaaggaacgaaggaacgaaggaacgaaggaaggaaggaacactttggccccatgcagacatgggtcctcatcctggccccatcactacctggatggtcgttgggttaaactgtggaggtatctgagcctccgttttctcatctgtagaatgggtggatgggaattaacagcagaaaaggaggtgagaacaagaggagctctgagcttatggtgggctggctggtgcatattgggtccctcatagacattacagatgaaatgcagatggacccaggtatccagatgggtctccagatgcaggacatcctaaacagttgccggggtacccagc

SEQ ID NO: 694442 - DNA, 264 bp, Homo sapiens
ctgtgtatttatacatgaccagttttatattttggatgcatacaattaagatatgcttgcttgatacaggttcaggggctactgagtatctacaaatctaatcaattcatagatgtccttaggttcaagactatatcctgtatatgaatatttttgaatcaatttataaaaataaggtcagagacagaaaaatacacttgtgactgcattttttggtacaacagtgacatcttgtggtaaaaactcagtggataaggtcgacgc

SEQ ID NO: 694443 - DNA, 1707 bp, Homo sapiens
  misc_feature (646)..(646): n is a, c, g, or t
  misc_feature (842)..(842): n is a, c, g, or t
gtaggaactttaaattatcacaatgtccagaagaggtaaagtaacttgcccaattgccacacagcaagcaagttggcctgtccatggatgtgatcttaggttgtgtctgacgtgcaggagcccccacccttcacttttccagtgtgtgtgtgtgttgagggggttcaggaacagagggaggactattgtgtaagcggagccccaggcacgtgatagggctccgtggagaaaattaagggggcatgggtgtcgccagtggacgcctcacaacaggtggttgtttgctccctgtggccctgtggttcgccttgggagaagaatgtgacgccggatttgtatgtgtttgtgatgtgttctgcacatgtgtgccatgcttgtgcgcaacgccctttgtgagatcggggtgtgctcagtgtgtttgagagtgagcgctgtctataagaaagagaggtgtgtgtatatcatctccccaagtgatgactctagaggtcttatagaggagagagctatgtgtatgagttctctctcaacgcgtgtgcgccatacgcaagacaacatttccgcgctatgggcgcgcccaaggtagaaacattgttttgccccacacacagcgtggcacagaagattaccatgtgtgtggttctcnccacaaaggccacacagtgggtccacacaagtgcgtgtataagaaataccccatgttgtgtgcacacccgcgtgtgttaagttagtagaccgtggaacaaacaccagcgtggtttcaagatgaaggctcgttgcccacgtgtcggtgtggacaaccccaagggggggtcccacacaagctcgtctgagaagaagtnccccgttgtggtggtgactataaacccaaacacagtcttacaaacgacgtgttgtcactgttgtaagacaagttcttccattctctgttgtgagaaccaacacccttttcttccccgagggggacgaagttgtctcccctatatcagacggaggggaacattgtggtgggcggacccctttctaccaaatgctgtgttggaaacatcgtttggtttttgcaaggccactttgttggtaccccccccccaaatttcacaaatgtgttgtttgttttcccccccaacgattattctccaaaggggtgcccgagacccctgtaggggaaaatatcattttcacccccgtttccaaagaaaaggtccagctctgtgggagagaaatacccccgataatcaagtgtggacaaaaaggccaccaacggaattcatgtgtttgtagccctgtagagtagggggcccccttattgggaggagcatcccttcccaggagtgagccattgtgggcgcgtgcacaaggataacctcattgtgaggagagccgacaaaatacgctgtgtgtccttggtggaagaccaacgttggagcaaacgagtgatattcaaaggcccccaagaagagttatttattattcccccagcaattggttctcgtgagcaaaaccctggaaagaccttcgtgtgtactccctctgttgtgccctcagatgggtacggttggtctaccatcctgtgtgatgcgacgtgtgaacacatacatggtcgtagtgattctacatatgtgataattccgatagatgatgaggatagtacccgccgtcggtctgatcgtctacacgtgccataaatagagctcgattgctgggacc

SEQ ID NO: 694444 - DNA, 237 bp, Homo sapiens
ttctagaggatcccaatcagtaacacaagattcgacatgaaaaacaaacattattcatgctacaggtttttaattgtccttggacaacaccaaaaacacagtactcacaacggcatgtttctagttgtttttttttattttttttgtggcccctaaaacccgatattttaaatacttccacaaattccaaaaggaaaaccaaccttattccaggcaccggtttttaattttccttgg

SEQ ID NO: 694445 - DNA, 267 bp, Homo sapiens
tgccagtctctgcccacagtcttctgcctgatccagagtcttagccatgatccacagtcttctgcatgatccatagtcttagcctgctccacagtcttcgcatcagtgcgacgacttgtggggggaggtcaccctccctgcacctgatgtggtccaatgtatcttcattcaattgaatcagagtcttttttgaataaatctgtgttcatgcgctgtgggaggcataagcacaaaatagagttgcctttgtaagaaagaaggaaacca

SEQ ID NO: 694446 - DNA, 529 bp, Homo sapiens
  misc_feature (75)..(75): n is a, c, g, or t
  misc_feature (233)..(233): n is a, c, g, or t
  misc_feature (265)..(265): n is a, c, g, or t
  misc_feature (432)..(432): n is a, c, g, or t
aaacaggagttgaatgagcccccgaaacagtccacgtctttcttggttttgcaggaaatcctggagtctgaaganaaaggggatcccaacaagccctcaggattcagaagtggttaaagctcctgtcactaaagtggctgcgtcgattggaaatgctcagaagttgcctatgtgtgacaaatgtggcactgttctccagcaggcctctgctgcagctttttctctcagtgttntggccctctcctctcttgaaagttctctgccnactttggttttccctctgcttgtaaaacattgagtcccctccctgccttggttaattgactcacaccagctgtgcgatgcccgcttttacaattaaaggaaaactgttgtgttcagtgtccccttgtcagcaacactgtgtcccttcgcccccccgtttttttttgntgcatttggacatcagccaaatttgaacccaatcaaatataacgtgtttgaccctgattttgtttttactcaataaatgtatagcctccaaaacaaa

SEQ ID NO: 694447 - DNA, 98 bp, Homo sapiens
ccaccttcactgtgtccacccttcctagctttgtgcccggggtgctgagcccttccccggtcagccgggccgcgggaggagggagccgtcaccgagga

SEQ ID NO: 694448 - DNA, 843 bp, Homo sapiens
agcattcgggccggaatgtctcgctccggtggccttatgtgtgcctcgcgctattctctctttctggcctggtaggctatccagcgtactccaaagattcacggtttactcagcgtcatccagcatagaatggaaagtcgataatttcctgaattgctatgtgtctgggtatcatccatccggaggcatcgaagttgacttactgagaaatggactagagaattagaagaaagtggacggcctagttccagacttgtctttcagctaggactggtctttctatctcttcgtacctacactgaattcactcccctagctgaacaagagatgtagtatgccctgccgtgtgcataccatgatgcactttcgtcactagacccaatgatagttagagtgcggatctgcagacaatgtaagcagcactcactggacggtttgatagatgccagctatttggattcggatgaattccaatattctgcttgcttgctttttaattattgatatgcttatacacttacacttaatgcacaaaatgccatgggtctataatacctgttcacactggacagtgtatcttctctctaattctaccttctggagtgctgctctccatgtttgaatgtatctgaggcacgttgcgtccacacggattgctctaccgagggctggccgacttaaaagctgggggagcacaaaaagttctctttatcaatcatccaacatccctggcccaggattggaactctctcaatcttcttgcactccaaagcttgtttagatatgccaagcgagataattaactccattactacccgccccactggggggcattgactttat

SEQ ID NO: 694449 - DNA, 81 bp, Homo sapiens
gccgaggacacggccgtgtatttctgtgcgagagatggcggtgggggctactccaaatacttcccgcactggggccagggc

SEQ ID NO: 694450 - DNA, 316 bp, Homo sapiens
tctaggaatggggtctggggatacacgagagtgctgtgtcatgttatttcatcgtttggaaggctgtgttgtggttatgtaggagaaagtccttaactggagaacacacactcgagttcagaagtgatgggccaggaggttggcaccctcatgtcaaatggcttaggacaaaatactctttgtaccatacttggcaacttttgtctagatcttaaatatttccaaataaaaggttttgaaaatctgcttctttttaggaatagccacaggaatctccttaggcagagacaaataaagccccctgcccatccatgct

SEQ ID NO: 694451 - DNA, 290 bp, Homo sapiens
agcagtcatcgagactgaaattttcatttcagctagtaagctaatctctgacgattacctaaaaattctaataaacacaaagaatagtcatgttataaaagaaccttagactcctacttaaaatcttttgtactgtatttcttttatcatatacaaagtgattatactggccgtcaatatttcaaaaatgcattgttctgaggaaacggtagtatatatattttaggaaaatgtatccaggccaggtgcgaaagatcacgcctgcaatcccagcacttagggaggccgag

SEQ ID NO: 694452 - DNA, 154 bp, Homo sapiens
acgtgccgcgcggggcaacgccgtcttcttcagctatgagcgccccgacccctcgacgcgtaccctgcacggcggcgcgcccgtgctggccggcgaaaaatggatcgccaccaaatggctgcgcgaacgcgaattccactgaagagccagcgaa

SEQ ID NO: 694453 - DNA, 1247 bp, Homo sapiens
cactggtgtgctctgtatgcgctgtggttgttgatgctccgtgtgtggtttgtggtttgaggtggcgtgttgcccaggtatcatctgtctgcatcgcgcagtgggaggtaggtgtgttgtccgccaggcgcggatgctggtgtgctgtccctgatttgtctcgcattcgagtgtccaacggcgccaggtgtccatggctgtgcgcgttgccgaattggtgtatgctgttttcttgagcgcggtataaaattgcagggtaggaattgagcgcgcatatgtcgttgttgcggacaccacgtgtgtgcgtaggcttgatggtggaatcgtaaagcgactcatggttggtaactgttgttgtttttaatttaatttttttcataagtattgggggtaatctactggtaggaaaggtggcagaggggagagcccagagttttagtggcttcggtagtttgcgattaaaggttgttgtaagtgtcgtgaagaatgggttttttcggacgtgtgtttgtggaagtttcctgggcgcttaaagggccccgtgtggtgaaaaccaattgagtttgagattgggcttaagggtaccaaagggaaagtgccctggtgtgaggtgggataatgcattccgttcgggttgggctgggttgatgtcttaggtgtttctaccaggagatcattaagtttttgccctcctaaataggagaggggctagtgtcgttaggagtgcagtggtgcttcacactggagtaccagctctttcttgttgcttaggccgttagctgtggaatgcttgccctagtaactaaaggtagaggcaagcacacattgaaaggcttgctggatcagacggttcctgagaagtttgtcagtctgtgaatgtgcttgtgtagttaagacctgaatgttgtcttgttaaggctagagcaaaggagtcatgaagttgttccagtgagttagccagtgtaagctccgtgcaatgaatgtttatgtgattgaagcaaatgtgaatcgtattattgttaaaaagtggcagagtgacgtgtaagctgagtcagtgcagtgatccgctcatcccgtgaaattgagtttatgtagtcattgttacttattttattcattagctaactttgtgctatgtatatttctagatagttgactagtgtaatcgattataaaggatatttatcaaatccagggattgcgattgttgaaattgattaattatttaacatcgcggaagtattcta

SEQ ID NO: 694454 - DNA, 141 bp, Homo sapiens
ccttggggcccccccttcccccttttttgtcccccaacttaaaaggaatgaagggttttggtttccctgggagggggggggggcagccagggtttacctgtacactgacttgagaccagttgaataaaagggcccccctta

SEQ ID NO: 694455 - DNA, 201 bp, Homo sapiens
aagtcttgcataattttgtcaaatttatttctaagtatttcaaaattttaggctcttataaattacatttttaaaattacatggctgggcacggtggctcacgcctgtaatcacagcactttgggaggccaaggtgggcggatcacaaggtcaggggttcgagaccagcccgaccaacatggtgaaacgctgtttccccca

SEQ ID NO: 694456 - DNA, 350 bp, Homo sapiens
atactcagaatatggatagctcctttttattactatgcctttacgagtcgttcatctttcaagtcaacactcttcagctaatcacagatctaagcttacatgaaatctgaaaataaactttactgtgttttcagaggatttggccgttaacagtcaacggtggcatggcaagattgtagttgatttgacatgattgtagttaaacgaaaccaaaccacacatcaacaagggcacagcaggcaagcagaatgcaaagcaccatttccattcaccaagccaatccacgcaccagtttcattggtctcaggcaacatcaaacaacagcaagcaagcaagcaaagcaaaggcaa

SEQ ID NO: 694457 - DNA, 673 bp, Homo sapiens
  misc_feature (414)..(415): n is a, c, g, or t
  misc_feature (419)..(419): n is a, c, g, or t
  misc_feature (425)..(426): n is a, c, g, or t
  misc_feature (430)..(430): n is a, c, g, or t
  misc_feature (536)..(536): n is a, c, g, or t
gtggggactgggcatcttgctcagagtgggcaggaatccccaggaagtgggacaagagtgcctcgtcggaagtcgccccagccctctacgcgtctgcagccacaccccgacatggtgctcgggtcacaggccttgaggtgctcctgtgtcacccagtgcaggtgtctgcccccagcctctgcgcctgtgagaccttctctctggaaaattcttctctgatatccacatgcctttgcattgcctccctgtctcgccctgaaaggtgggcacgggccccctcctgctgcagcgtctctggggctgcccgcctgcagacacctccactcagttcctttccatctttgcacttgagggtcggcttccccagggcagcggcctcactggtagcccccaccaaccctggagcactaacanncctnttggannaggncctgagtgcaggaagacctgagtgctgattgtgttaagagaaatgcagccattcccaaaggctgcctgttgctggctctgtgtttgcagaattcccaagatacgcnccctctgagtcccactgccgtctcaggtgctgtgttggtttcttcggcgacacttccccttcctgcatttgattgcgtggtgacaccaggcgtgcacctgcccctcctgcatctgctgccgtttgttcttcgacgaa

SEQ ID NO: 694458 - DNA, 805 bp, Homo sapiens
  misc_feature (132)..(132): n is a, c, g, or t
  misc_feature (191)..(191): n is a, c, g, or t
  misc_feature (478)..(478): n is a, c, g, or t
tatttttacgtatagacggggctttgccttgcctggccaggctggtctcaaactcctgacctcaggttatccacctgcctctgcccctcaaagtgctggaatcacagtcacgatgccactgcgcccggcccngaggcctttgcagtgcttagcccccagctgctctaccccttcagatgggaggatttcanaaccacgttcagatcatcttttttctgcagaaaaatcatgctttaacgtgcaagctattaattcatagaagaaaatgtttcaatcctatcagttctttttttcgagacgcagtttcactcttgtcacccaggctggagtgcagtggcgcaatctcggcttcactgaactccatcttctggggttcacgcagttctccttgcccagcctcccgagtctctgggattgcaggcgtcaacaccagggctggctaattctggatttgggggagacagggtttaggccatgntgggccgggacggtcttgaacttctgaacgtcgggtgtactggccaatcggggccttcacagggcgggacataccgaagatggagccccctcggccgacaagataacgggaacagactctgcgagcccgtgaagcagaggttaaagggccccaaaagcacgcggagggacaacaacgacgagtggcaacgggcccatgcggccaaaaagatcaggagacaccgacgggggcagcagacacacaacacaccagcggcaagaatgcgccacagaggagagagagcgaacagcatctagcaaaacgggcgctccgcatattgctgcagta

SEQ ID NO: 694459 - DNA, 146 bp, Homo sapiens
ttcctatcgtgtcggggttgcacagagcactgggttggaggatagcggagcatggagtgggtgatgcacacagcacgtgtggataggaagcgcatgagcacggtgagtagatgcactatgagcacggcggggtctggtgcgtgttc

SEQ ID NO: 694460 - DNA, 219 bp, Homo sapiens
  misc_feature (6)..(6): n is a, c, g, or t
cagatnaaggatattgctgcatatcgtgccagggcaaagtgaagccggaaagaatttcctggaggccaacaggctcaaagaagaagaacgaaccagaagatgaggagcgaggaggagttagaagaagatgagagatgaggaggcaagacggatgaacgatgacagacataaatgggctatcctattaatgagtgcttggaatcagtgtgtagttcgctt

SEQ ID NO: 694461 - DNA, 1703 bp, Homo sapiens
ggtctcttcctgaccatcaggttctgtgttctgctctgatcccactccaactgcagtcaccttgtgtgctggcccgcctgtggtcctgggagcccgaggccagcccggctgccgcatcctgctcttcgcactccggctgcccaggctttgctgaggttctgcagaccttcagcacctgcaaggggatgctgggtgagatcctgtctgcattcgagttcatggatgctgtgtgcatgcagctggtcgggcgccatctccacctggccagcccggtgcaagagagtccgttttacgtcctcatcgagacttcaggctccaacgcaggccatgacgctgagaagctgggccacttcctggagcacgcgctgggctccggcctggtgaccgatgggaccatggccaccgaccagaggaaagtcaagatgctgtgggccctgagggaaaggatcacagaggcgctgagccgggatggctacgtgtacaagtacgacctctccctccctgtggagcggctctacgacatcgtgactgacctgcgcgcccgcctcggcccgcacgccaagcacgtggtgggctatggccaccttggagatggtaacctgcacctcaatgtgacggcggaggccttcagcccctcgctcctggctgccctggagccccacgtgtacgagtggacggccgggcagcagggcagcgtcagcgcggagcacggagtgggcttcaggaagagggacgtcctgggctacagcaagccaccgggggccctgcagctcatgcagcagctcaaggccctgctggaccccaagggcatcctcaacccctacaagacgctgcccagccaggcctgacggccactcctgctgctgccaaggcccactgggggtcggcgggtggctctcgggcgggggtgttgcggtggctctgagggatgagccggcagcgggcaggggaccaggcacctggttgaagggactgggagcccgcactggggaactgccggacgcaggccctcgggcaggagcatctggcagagtggggggcgtggcaggcaccctcctttgcagggcgaggtggggcctctgcagccatcctggacaggccggggtggcggcagctttgcccacgtggaagcggggtgggtctcacttgcgtggtggcccctggccccatcttgcctgctgcggcctggggagcaggcgctgggtggtggttctgcctgcttgctgctcgttccccgggcatgcgtgggcagcggggggcatgcgtgggcagcagggggcgtgggcagcgggggcatgggcaggaccacgtgggccgtgatcgtgggttgccgagaggacctgagcgctgcggctctgctgaatggagccgggtccctcaggccgtggacgccctcgggaggggggtgactgtggcttgtgtctggacaggaatgtgtcatttcccacatcttctagagggctgccagctgggaagacagttatcagggcaagctgtgctctgagtttcgggttctgctcctacaaagaacgtgcggtgctgcgggcgagggccccggcacggacaagggccactgcagagtgtgtttctgctcgtcagctgccctgggcagcggatgggctgggcgatgcagctggatgcacatctcattctgtcatgaatgtccagtaaaaatctgaattggttgcaaaaaaaagaaaaac

SEQ ID NO: 694462 - DNA, 2616 bp, Homo sapiens
ggtctcttcctgaccatcaggttctgtgttctgctctgatcccactccaactgcagtcaccttgtgtgctggcccgcctgtggtcctgggagcccgaggccagcccggctgccgcatcctgctcttcgcactccggctgcccaggctttgctgaggttctgcagaccttcagcacctgcaaggggatgctgggtgagatcctgtctgcattcgagttcatggatgctgtgtgcatgcagctggtcgggcgccatctccacctggccagcccggtgcaagagagtccgttttacgtcctcatcgagacttcaggctccaacgcaggccatgacgctgagaagctgggccacttcctggagcacgcgctgggctccggcctggtgaccgatgggaccatggccaccgaccagaggaaagtcaagggtctcgctctcacccaggctggagtgcagtgacacagttgcagctcactgcagcctcgacctcctgggctcaagcaatcctcccgcctcagcctcccgagtagctgagtctacagatctccacaatggaagttcgaagcaagcaaaagccacgcaaaccacaggccgatctgtctgagccctaggatttggcccggttctgcttcagccaccagcaccgtctgctcctcctcagaatccttcctcccccgtggcccgcccgccgtgtccctcctcctccacggcccgcccaccgtgtccttccctcccccgtggccacccaccatgtccttccctcccctgtggcccacccgccatgtccctgcctcccacccgacatgccccttgagctgcctgggccctgctgttgtccccactgcctgtgtgactctgcgcccccttccctaccctgccccaccctggttcagggagcgtccaggcccattctcatcctcagggccttccctggcccttgccactctgtgccgtgtcatgacctgaagctgcaggtgggcgcctcccccttccgtcatggctgtccccttctgtgaggtgcagccgctgattgcggagtcccaggtgctcggtgctgtcgtggagcctgggacattcactgtctgggattgattccatggattggagccacacctggtctggggcattcgctgtcctgggtcagagcccctcctggtctgggacattcgctgtctggggttggagccacacctggtctggggcatttgctgtccggggtcggagcctcacctggtgaagatacagaacatgctgctgccctaaccccgtgtggtgtgccccctgtccccgggtgtcgttcccatagccagcccttgtctcatctcgtctcatcttctagatgctgtgggccctgagggaaaggatcacagaggcgctgagccgggatggctacgtgtacaagtacgacctctccctccctgtggagcggctctacgacatcgtgactgacctgcgcgcccgcctcggcccgcacgccaagcacgtggtgggctatggccaccttggagatggtaacctgcacctcaatgtgacggcggaggccttcagcccctcgctcctggctgccctggagccccacgtgtacgagtggacggccgggcagcagggcagcgtcagcgcggagcacggagtgggcttcaggaagagggacgtcctgggctacagcaagccaccgggggccctgcagctcatgcagcagctcaaggccctgctggaccccaagggcatcctcaacccctacaagacgctgcccagccaggcctgacggccactcctgctgctgccaaggcccactgggggtcggcgggtggctctcgggcgggggtgttgcggtggctctgagggatgagccggcagcgggcaggggaccaggcacctggttgaagggactgggagcccgcactggggaactgccggacgcaggccctcgggcaggagcatctggcagagtggggggcgtggcaggcaccctcctttgcagggcgaggtggggcctctgcagccatcctggacaggccggggtggcggcagctttgcccacgtggaagcggggtgggtctcacttgcgtggtggcccctggccccatcttgcctgctgcggcctggggagcaggcgctgggtggtggttctgcctgcttgctgctcgttccccgggcatgcgtgggcagcggggggcatgcgtgggcagcagggggcgtgggcagcgggggcatgggcaggaccacgtgggccgtgatcgtgggttgccgagaggacctgagcgctgcggctctgctgaatggagccgggtccctcaggccgtggacgccctcgggaggggggtgactgtggcttgtgtctggacaggaatgtgtcatttcccacatcttctagagggctgccagctgggaagacagttatcagggcaagctgtgctctgagtttcgggttctgctcctacaaagaacgtgcggtgctgcgggcgagggccccggcacggacaagggccactgcagagtgtgtttctgctcgtcagctgccctgggcagcggatgggctgggcgatgcagctggatgcacatctcattctgtcatgaatgtccagtaaaaatctgaattggttgcaaaaaaaagaaaaac

SEQ ID NO: 694463 - DNA, 2374 bp, Homo sapiens
ggtctcttcctgaccatcaggttctgtgttctgctctgatcccactccaactgcagtcaccttgtgtgctggcccgcctgtggtcctgggagcccgaggccagcccggctgccgcatcctgctcttcgcactccggctgcccaggctttgctgaggttctgcagaccttcagcacctgcaaggggatgctgggtgagatcctgtctgcattcgagttcatggatgctgtgtgcatgcagctggtcgggcgccatctccacctggccagcccggtgcaagagagtccgttttacgtcctcatcgagacttcaggctccaacgcaggccatgacgctgagaagctgggccacttcctggagcacgcgctgggctccggcctggtgaccgatgggaccatggccaccgaccagaggaaagtcaagggtctcgctctcacccaggctggagtgcagtgacacagttgcagctcactgcagcctcgacctcctgggctcaagcaatcctcccgcctcagcctcccgagtagctgagtctacagatctccacaatggaagttcgaagcaagcaaaagccacgcaaaccacaggccgatctgtctgagccctaggatttggcccggttctgcttcagccaccagcaccgtctgctcctcctcagaatccttcctcccccgtggcccgcccgccgtgtccctcctcctccacggcccgcccaccgtgtccttccctcccccgtggccacccaccatgtccttccctcccctgtggcccacccgccatgtccctgcctcccacccgacatgccccttgagctgcctgggccctgctgttgtccccactgcctgtgtgactctgcgcccccttccctaccctgccccaccctggttcagggagcgtccaggcccattctcatcctcagggccttccctggcccttgccactctgtgccgtgtcatgacctgaagctgcaggtgggcgcctcccccttccgtcatggctgtccccttctgtgaggtgcagccgctgattgcggagtcccaggtgctcggtgctgtcgtggagcctgggacattcactgtctgggattgattccaatgctgtgggccctgagggaaaggatcacagaggcgctgagccgggatggctacgtgtacaagtacgacctctccctccctgtggagcggctctacgacatcgtgactgacctgcgcgcccgcctcggcccgcacgccaagcacgtggtgggctatggccaccttggagatggtaacctgcacctcaatgtgacggcggaggccttcagcccctcgctcctggctgccctggagccccacgtgtacgagtggacggccgggcagcagggcagcgtcagcgcggagcacggagtgggcttcaggaagagggacgtcctgggctacagcaagccaccgggggccctgcagctcatgcagcagctcaaggccctgctggaccccaagggcatcctcaacccctacaagacgctgcccagccaggcctgacggccactcctgctgctgccaaggcccactgggggtcggcgggtggctctcgggcgggggtgttgcggtggctctgagggatgagccggcagcgggcaggggaccaggcacctggttgaagggactgggagcccgcactggggaactgccggacgcaggccctcgggcaggagcatctggcagagtggggggcgtggcaggcaccctcctttgcagggcgaggtggggcctctgcagccatcctggacaggccggggtggcggcagctttgcccacgtggaagcggggtgggtctcacttgcgtggtggcccctggccccatcttgcctgctgcggcctggggagcaggcgctgggtggtggttctgcctgcttgctgctcgttccccgggcatgcgtgggcagcggggggcatgcgtgggcagcagggggcgtgggcagcgggggcatgggcaggaccacgtgggccgtgatcgtgggttgccgagaggacctgagcgctgcggctctgctgaatggagccgggtccctcaggccgtggacgccctcgggaggggggtgactgtggcttgtgtctggacaggaatgtgtcatttcccacatcttctagagggctgccagctgggaagacagttatcagggcaagctgtgctctgagtttcgggttctgctcctacaaagaacgtgcggtgctgcgggcgagggccccggcacggacaagggccactgcagagtgtgtttctgctcgtcagctgccctgggcagcggatgggctgggcgatgcagctggatgcacatctcattctgtcatgaatgtccagtaaaaatctgaattggttgcaaaaaaaagaaaaac

SEQ ID NO: 694464 - DNA, 2518 bp, Homo sapiens
ggtctcttcctgaccatcaggttctgtgttctgctctgatcccactccaactgcagtcaccttgtgtgctggcccgcctgtggtcctgggagcccgaggccagcccggctgccgcatcctgctcttcgcactccaggtctcagataggagtcactcgcctcttcgtgccacgcccacgtctaagccgggtggaacaggcccttgcaggtgtctgcccccagcctctgcgcctgtgagaccttctctctggaaaattcttctctgatatccacatgcctttgcattgcctccctgtctcgccctgaaaggctgcccaggctttgctgaggttctgcagaccttcagcacctgcaaggggatgctgggtgagatcctgtctgcattcgagttcatggatgctgtgtgcatgcagctggtcgggcgccatctccacctggccagcccggtgcaagagagtccgttttacgtagatctccacaatggaagttcgaagcaagcaaaagccacgcaaaccacaggccgatctgtctgagccctaggatttggcccggttctgcttcagccaccagcaccgtctgctcctcctcagaatccttcctcccccgtggcccgcccgccgtgtccctcctcctccacggcccgcccaccgtgtccttccctcccctgtggcccacccgccatgtccctgcctcccacccgacatgccccttgagctgcctgggccctgctgttgtccccactgcctgtgtgactctgcgcccccttccctaccctgccccaccctggttcagggagcgtccaggcccattctcatcctcagggccttccctggcccttgccactctgtgccgtgtcatgacctgaagctgcaggtgggcgcctcccccttccgtcatggctgtccccttctgtgaggtgcagccgctgattgcggagtcccaggtgctcggtgctgtcgtggagcctgggacattcactgtctgggattgattccatggattggagccacacctggtctggggcattcgctgtcctgggtcagagcccctcctggtctgggacattcgctgtctggggttggagccacacctggtctggggcatttgctgtccggggtcggagcctcacctggtgaagatacagaacatgctgctgccctaaccccgtgtggtgtgccccctgtccccgggtgtcgttcccatagccagcccttgtctcatctcgtctcatcttctagatgctgtgggccctgagggaaaggatcacagaggcgctgagccgggatggctacgtgtacaagtacgacctctccctccctgtggagcggctctacgacatcgtgactgacctgcgcgcccgcctcggcccgcacgccaagcacgtggtgggctatggccaccttggagatggtaacctgcacctcaatgtgacggcggaggccttcagcccctcgctcctggctgccctggagccccacgtgtacgagtggacggccgggcagcagggcagcgtcagcgcggagcacggagtgggcttcaggaagagggacgtcctgggctacagcaagccaccgggggccctgcagctcatgcagcagctcaaggccctgctggaccccaagggcatcctcaacccctacaagacgctgcccagccaggcctgacggccactcctgctgctgccaaggcccactgggggtcggcgggtggctctcgggcgggggtgttgcggtggctctgagggatgagccggcagcgggcaggggaccaggcacctggttgaagggactgggagcccgcactggggaactgccggacgcaggccctcgggcaggagcatctggcagagtggggggcgtggcaggcaccctcctttgcagggcgaggtggggcctctgcagccatcctggacaggccggggtggcggcagctttgcccacgtggaagcggggtgggtctcacttgcgtggtggcccctggccccatcttgcctgctgcggcctggggagcaggcgctgggtggtggttctgcctgcttgctgctcgttccccgggcatgcgtgggcagcggggggcatgcgtgggcagcagggggcgtgggcagcgggggcatgggcaggaccacgtgggccgtgatcgtgggttgccgagaggacctgagcgctgcggctctgctgaatggagccgggtccctcaggccgtggacgccctcgggaggggggtgactgtggcttgtgtctggacaggaatgtgtcatttcccacatcttctagagggctgccagctgggaagacagttatcagggcaagctgtgctctgagtttcgggttctgctcctacaaagaacgtgcggtgctgcgggcgagggccccggcacggacaagggccactgcagagtgtgtttctgctcgtcagctgccctgggcagcggatgggctgggcgatgcagctggatgcacatctcattctgtcatgaatgtccagtaaaaatctgaattggttgcaaaaaaaagaaaaac

SEQ ID NO: 694465 - DNA, 329 bp, Homo sapiens
  misc_feature (22)..(22): n is a, c, g, or t
  misc_feature (48)..(48): n is a, c, g, or t
  misc_feature (248)..(248): n is a, c, g, or t
  misc_feature (296)..(296): n is a, c, g, or t
tttgccttatatttctaatggncagtactgctgtagattctagatgtncttttcctttgtcgttgctaaattctcttattagttatagtagttattttgttggtttcttaggtttttctttgctttttttctattttttaaatttttattagaaacagggtctctctgtcacctaggttggagggcagtggtgtgatcataactcactgtaacttcaaactcctagcttcaggtgatcccccaacctntggcctcccaaagtgctgggattacaagcatgagccaccacaactgtnagtttcttaggtttttctgtgtactcaatcatg

SEQ ID NO: 694466 - DNA, 2293 bp, Homo sapiens
  misc_feature (1620)..(1620): n is a, c, g, or t
  misc_feature (1679)..(1679): n is a, c, g, or t
  misc_feature (1966)..(1966): n is a, c, g, or t
ggtctcttcctgaccatcaggttctgtgttctgctctgatcccactccaactgcagtcaccttgtgtgctggcccgcctgtggtcctgggagcccgaggccagcccggctgccgcatcctgctcttcgcactccggctgcccaggctttgctgaggttctgcagaccttcagcacctgcaaggggatgctgggtgagatcctgtctgcattcgagttcatggatgctgtgtgcatgcagctggtcgggcgccatctccacctggccagcccggtgcaagagagtccgttttacgtcctcatcgagacttcaggctccaacgcaggccatgacgctgagaagctgggccacttcctggagcacgcgctgggctccggcctggtgaccgatgggaccatggccaccgaccagaggaaagtcaagggtctcgctctcacccaggctggagtgcagtgacacagttgcagctcactgcagcctcgacctcctgggctcaagcaatcctcccgcctcagcctcccgagtagctgagtctacagatctccacaatggaagttcgaagcaagcaaaagccacgcaaaccacaggccgatctgtctgagccctaggatttggcccggttctgcttcagccaccagcaccgtctgctcctcctcagaatccttcctcccccgtggcccgcccgccgtgtccctcctcctccacggcccgcccaccgtgtccttccctcccccgtggccacccaccatgtccttccctcccctgtggcccacccgccatgtccctgcctcccacccgacatgccccttgagctgcctgggccctgctgttgtccccactgcctgtgtgactctgcgcccccttccctaccctgccccaccctggttcagggagcgtccaggcccattctcatcctcagggccttccctggcccttgccactctgtgccgtgtcatgacctgaagctgcaggtgggcgcctcccccttccgtcatggctgtccccttctgtgaggtgcagccgctgattgcggagtcccaggtgctcggtgctgtcgtggagcctgggacattcactgtctgggattgattccaatgctgtgggccctgagggaaaggatcacagaggcgctgagccgggatggctacgtgtacaagtacgacctctccctccctgtggagcggctctacgacatcgtgactgacctgcgcgcccgcctcggcccgcacgccaagcacgtggtgggctatggccaccttggtgagcggcgccccggggccgcggccctgtgtgtgctgggtggtgggccccacggtcaccgtcaccctgccaggcttcgaggcagggcagtttgaccatggtctctggcttagcatatctcccgtagacactggcaggaccacggtgtctgacagggaagggaaaatcctaatcgttgtcatgactcgttttgagtattttggaaaagactgccatcgtgcacttgtaatggcagagcgcatggctcagcttgtcagaacgttctgggatcttcagtggcatgcagggttggagggcatcagccttaaccccggagtccgggatgcgggtctcaggggctcctctcacagggcccggcccngaggcctttgcagtgcttagcccccagctgctctaccccttcagatgggaggatttcanaaccacgttcagatcatcttttttctgcagaaaaatcatgctttaacgtgcaagctattaattcatagaagaaaatgtttcaatcctatcagttctttttttcgagacgcagtttcactcttgtcacccaggctggagtgcagtggcgcaatctcggcttcactgaactccatcttctggggttcacgcagttctccttgcccagcctcccgagtctctgggattgcaggcgtcaacaccagggctggctaattctggatttgggggagacagggtttaggccatgntgggccgggacggtcttgaacttctgaacgtcgggtgtactggccaatcggggccttcacagggcgggacataccgaagatggagccccctcggccgacaagataacgggaacagactctgcgagcccgtgaagcagaggttaaagggccccaaaagcacgcggagggacaacaacgacgagtggcaacgggcccatgcggccaaaaagatcaggagacaccgacgggggcagcagacacacaacacaccagcggcaagaatgcgccacagaggagagagagcgaacagcatctagcaaaacgggcgctccgcatattgctgcagta

SEQ ID NO: 694467 - DNA, 1113 bp, Homo sapiens
ggtctcttcctgaccatcaggttctgtgttctgctctgatcccactccaactgcagtcaccttgtgtgctggcccgcctgtggtcctgggagcccgaggccagcccggctgccgcatcctgctcttcgcactccggctgcccaggctttgctgaggttctgcagaccttcagcacctgcaaggggatgctgggtgagatcctgtctgcattcgagttcatggatgctgtgtgcatgcagctggtcgggcgccatctccacctggccagcccggtgcaagagagtccgttttacgtcctcatcgagacttcaggctccaacgcaggccatgacgctgagaagctgggccacttcctggagcacgcgctgggctccggcctggtgaccgatgggaccatggccaccgaccagaggaaagtcaagggtctcgctctcacccaggctggagtgcagtgacacagttgcagctcactgcagcctcgacctcctgggctcaagcaatcctcccgcctcagcctcccgagtagctgagtctacagatctccacaatggaagttcgaagcaagcaaaagccacgcaaaccacaggccgatctgtctgagccctaggatttggcccggttctgcttcagccaccagcaccgtctgctcctcctcagaatccttcctcccccgtggcccgcccgccgtgtccctcctcctccacggcccgcccaccgtgtccttccctcccctgtggcccacccgccatgtccctgcctcccacccgacatgccccttgagctgcctgggccctgctgttgtccccactgcctgtgtgactgtggcttgtgtctggacaggaatgtgtcatttcccacatcttctagagggctgccagctgggaagacagttatcagggcaagctgtgctctgagtttcgggttctgctcctacaaagaacgtgcggtgctgcgggcgagggccccggcacggacaagggccactgcagagtgtgtttctgctcgtcagctgccctgggcagcggatgggctgggcgatgcagctggatgcacatctcattctgtcatgaatgtccagtaaaaatctgaattggttgcaaaaaaaagaaaaac

SEQ ID NO: 694468 - DNA, 656 bp, Homo sapiens
tgcaggcgggtgtgttaggcttccccactgggcggcaccctcgatggggtctaccctaccctcatggagcccgtcattgctgcccaaggaggccccccgggtcgcccggccagagcggacccgagcagacaccggccatgccttcctcgccaagcccccagacccgctccgggactggagcccgcctcctcccccagcaaggagctcggagccccggtccccatagttgccatccatgatctctggcacacgccaccatctgtccagcaacaccctgcagaaggaaccgtcgcaccatcaccacgccagcccggacccagccggtagcacacctagcctcgagcctacgagacccgcaccgggaataagactcaaagtaaacccttttccatccaggaactggaactccgttctctgggttaccacggcaagcagctacatgccccgaatggggtaggagcccgtcagacctgtgagctcacccagtctgacccacgacaaggggcatccccaagcacctggaagagctcgaccagagccaactggagggggagctgcggcccaagcagccaggccccgtgaaagcttggcggggaggccagcacacctccacacaacatgcaggcgctagcctgagagccagccctcgtccacac

SEQ ID NO: 694469 - DNA, 409 bp, Homo sapiens
tagctgtagctgcgtagatcgtcagtgagacgctattcataacagagctaaaaaaacacgcagagccagttaaaagctctaatatgtgtttaaagaacaaattaatgaaagaatgctgtagacaggccaggtgcggtggctcacgcctgtaatcccagcacttagggaggccgaggcgggtggatcatttgaggtcaggagttcaagaccagcctggccaacttggtgagaccccgtctctactaaaaattcaaaaattagcctggcatggtgggcgcctgtaatctgagctacttgggaggctgaggcgggagaatcgcttgaacctgggagacggaggctatagtgagctgagatcgtgccactgcactccagactgggtgacagagtgagactctgtctcaaaaaa

SEQ ID NO: 694470 - DNA, 226 bp, Homo sapiens
tctgtgtggaaagcggctgtgcagacatttaattgttattatcaaaaaaaaaaaaaaaaaaaaaaaaaaaaaaaaaaaaaaaaaaaaaaaaaaaaaacacacaacacaagaaaccaacaccacaaccacaccaacgacaccaaacaaccaaccacacaccacaacaagaaaggaacaaagagcacgcgactagcgcaacgcactttttgcccggcaccagccgcgc

SEQ ID NO: 694471 - DNA, 217 bp, Homo sapiens
tattatttatttattcttcgttaggtacttcaaattatcatccactgagggtggaaggggagtgagcacacacacttgggaggggtcttgagattatcatcccctaacggtggatctgagggtccaaggggagggaccatacactcctaggtgtcttgagattatcatccgctcacggaggaaggggtttgagctgactctccttacgaggcccttg

SEQ ID NO: 694472 - DNA, 293 bp, Homo sapiens
agagtttcccttcggcagatatgtcgctctgccataagcggtataagatccacaagaaggttcgagaagcatcatcggaaaattaatgaaatggaggctatcaagcagggtcacaagaatgcctatgaacagacccaggagttccaaacagtgctcccttttaggaggctcttcttagggaagctgagcttcggaaacagaggcttgaagaactataacagcagcggactgttgataggcagacagaactagaaaagaaaagaaaacttgaaactaatcctgatattaagcca

SEQ ID NO: 694473 - DNA, 806 bp, Homo sapiens
  misc_feature (806)..(806): n is a, c, g, or t
cctacggctaggtacgaggcctggtttgccgactgggaggcgccgggctgcccctccaagcggcgcaagtcgagtcgcccgacgtggaccaggccagcttctccagcgacagcccgcgggatgacacgctcaccgagcacctgcagagcgccatcgacagcatcctgaacctgcagcaggcccccggccggacgcccgcgccctcgtacccccacgctgcctcggccggcacccccgcatccccgccgcccctgcacaggcccgaggcctaaccacccttccagtcacaacggtggactcggcgccaggacgttgaccagataacaccgggccgcctccccattccccgatccccatcctccacgaagacgccgggaccagcccgtgttgtccgccctcagactcctggggacctcgagccgggaatcccccgtgacggtattacttgcctaagtaataagagtcacaaaggcctccttccctgccgcctgcttcagctgggttgctgaagaggtgggcgtggatttagaggcaggggggctgtgatgtagaacgtctccccttgccaaacggagggggcaaagtgctgtgtcagtccctgttcattcccagtatcctggcacacccatgccctcatcccggggggaaccgcgcatgtgtttgccagggatgaggccacggcgtagatgccaacgctcgggtgcatgtttgctgagtggtcctcagaggagagcagggaggagtgcaggtcggcagaagataactatccgcgccaaaggtgtaaaacggagggggacacccagggn

SEQ ID NO: 694474 - DNA, 290 bp, Homo sapiens
tgggaaggccggtgggtactgcagcctgggcagtgggtggttccagccccatcctcgttccactcacagtcagcccggtgttccacctgagtcagcttgatgggtttgcctgtgatcttgctaaatgtctggtgaatcaaacaatgattgcagcttcatctcctgcagtggacttggtgacttcgccttcataactcagcttcagctatggggacagtgaggacctgactgcacggatctacatgttctttttttctacgaatggtgtatccctgtgtggtacctgaact

SEQ ID NO: 694475 - DNA, 430 bp, Homo sapiens
gcgaattcactagtgattcagccatgttggccgggctggtctccagctcctaaccgcgagtgatccgccagcctcggcctcccgaggtgccgggattgcagacggagtctggttcacttagtgctcaatggtgcccaggctgtagtgcagtggcgtgatctccgctcgctacaagctccacctcccagctgcctgccttggcctcccgaagtgccaagagtgcagcctctgcccggtcgccaccccgtctgggaagtgaggagcgtctctgcctggctgcccattgtctgggacgtgagcagcccctctgcctggctgcccagtctggaaagtgaggagcgtctctgcccggccgccatcccatctaggaagtgaggagcgcctcttcccacccgtcatcccatctaggacgtgaggagcttctctgccc

SEQ ID NO: 694476 - DNA, 253 bp, Homo sapiens
  misc_feature (239)..(239): n is a, c, g, or t
  misc_feature (250)..(250): n is a, c, g, or t
gatgggatttggggataggtttggttatccaaggggcagtgctgagctccttgccaatgggaaacggaatgctggtgatttccaggaagtgacctcacaatgactcaagctactgcttactgttgattgtgatgaaatgccagctgaggcacatgccttgggagctaagtggttgctgcacttgaccgctatgaagactggtgtgggaatggtccttttggatgcacttcagcaggggntccccaacccnctg

SEQ ID NO: 694477 - DNA, 178 bp, Homo sapiens
gggggggaaaaagtggggggggccccccgtgaatttttgggtaaacccccgcgggccccgggggtcccccggggggtaatccggttttacccgggggccctttttttttgggtccaatgttttttattttgggggggccccctttttttttttggccaataaaaggttttaaacccca

SEQ ID NO: 694478 - DNA, 137 bp, Homo sapiens
catacagacggatccccgcccacatatcgttcgatagaggttgtggggaacgtaaatgcatggatagtatacatggtgctgagtgtagatgtgcctatctagatagtctggcatgaagggagaggaagcttagacat

SEQ ID NO: 694479 - DNA, 289 bp, Homo sapiens
  misc_feature (93)..(93): n is a, c, g, or t
  misc_feature (258)..(258): n is a, c, g, or t
tagagagcttataacatcaacatatggagagaataaagaagtagaagaagagaataaagttctaaatcatttcaaggaagtgatgacccatgntatatcatttatgtgaaggggaagttacttaaatcattttatttgtaccacatctgctccagtggtctgtttgacgaatatggatcttaaaagagcgattacattaagctctatgtgcgccgtgtattcatcacagacgacttccatgatatgatggctaaatanctcaattttggcaagggtgtggtggtatcag

SEQ ID NO: 694480 - DNA, 134 bp, Homo sapiens
gagcctattaatgaaagtggggatacggcgaatcggatcaccccacacatttgcggcttaagcacccgtggtgtctttttgcagattagaaaacacgcgagcggaagtgtaggatctcatacattccgttctgg

SEQ ID NO: 694481 - DNA, 849 bp, Homo sapiens
gctggaatctggtcaccttccatccatgcgacaacttgtgcagattcttgacaatgaaatgaagctcaatgtgcatatggatgcaatcccacaccatcgatcatagactaccaccgtatcatggcgacgtgaaaactcttttgcatgtaagggatcattgcaagaggcagcgtgaccttgacgttactgaaggcctgtactgaagacagcaacgctgtgttagttactacgaccagatgctttcttggcaggctcgtgtacctcgttgggaaaagctcaatgcaagaatagtgttgcagtgctggcatatttggtaattcgtgcacattcatgagacgtgcgaacgaatactgtatagctttccccagctcccacaaaatcacccagttcatgtgtgtgtgtgttgagtttaaaggtacaacagttattatttggtacctttttgacttggccctatatgaaaaagtgtataccttgcgttacaattttgctcttatttccgaagactgtctgtgaatctgtggtgctctatatatgcaggtataggtcctgatataggtactaaagattgtcccgttggggaatcagtagaagctcccaaagtactttattaagagtttattcagacatttctatttggccctgtcaggtttatacagtttacgaattctacgcgattgcaagattatgggggaacaccaatatgcagaggccctatacaatggggcgggtggttgtgcgggtggattacagaacaggttaggaaaccatgggtttaggcaatgggttaagggtacggcggcacacccatggatgggaaaatcgggggtcataagaagaaaaaaggtg

SEQ ID NO: 694482 - DNA, 269 bp, Homo sapiens
ccagaggcaccaaggaggcagacggcgctgagagctgagaccgggccactgcactcgagcctgggcgacagagggacactccatctcagcaccacagatcaaaacagcacagactcccatatcttaaatgcatggagctcaactcttgagtattttcagaaacgtttacacatagaagatctgcggattgagaaactgttgacgtataaacgagaacacctacaaggatgtcatcacacccaagattactctgagcgcgaatctataac

SEQ ID NO: 694483 - DNA, 149 bp, Homo sapiens
  misc_feature (78)..(78): n is a, c, g, or t
  misc_feature (119)..(119): n is a, c, g, or t
tctgagtaacgtcgaatcgattttcttaatcccacatcaattcacttccattaattctcaaacatccatgcccaacgntcgcttaccgtgaatgttgaggtcggcaagcgtaaagcgtnccttcccagtttgtttcatagtcctcgcgc

SEQ ID NO: 694484 - DNA, 109 bp, Homo sapiens
gcaggagtcaaggttgagtagtaggaagtgcggtaggtagtgaggataatataagatagttaaatgaagaagtggtgtatgttagggttgtacggtagaactgctatta

SEQ ID NO: 694485 - DNA, 300 bp, Homo sapiens
  misc_feature (261)..(261): n is a, c, g, or t
atgggtcacagcgaccaggatctcctcagaccccagtgggtgcccccaggccctgagcttggaggggctagagctggcccaggcctgccctggagagcctcacagactggcagccagacaggggctgggcatggagtgggagtcaaggaggcttcctaggggaggcagtggctccaggagccctggagggggaggctaatcacacaggatgcggggcctgtggccaggggaccagccaggaccagggcctggaggcagcanagggcgtgtgtttgctgggttacctgctgggctggcctg

SEQ ID NO: 694486 - DNA, 204 bp, Homo sapiens
  misc_feature (164)..(164): n is a, c, g, or t
  misc_feature (194)..(194): n is a, c, g, or t
tgtttagagatcctgtgctaggtgagtgaggtgtatcttggtcactgaactctgcttcctgggtcagcgattctctagctcagctcctgagtagctgggttacaggaccacaacatgccggtaatcttgtatttttagtagagacggggtttcaccatcttggncaggctggtgtgatcatggctcattgcaancttgaattcc

SEQ ID NO: 694487 - DNA, 466 bp, Homo sapiens
aattccgttctaaatatgccagtgaatggagtataatttttctcgggattcagttgaatttatcaatgaaatctaaatacgtgctttcccaagggtcctggcaactgaaagctcccagcttttgcccagacgctcctactcttaacccacaggaaaggaacactcgttggagggtccacgcctgtgtagtgtcgccggcttttcatctcccctgtagagatcgcggcccttgggcggagctgagggtgccggtagcgttttcctccgcgagatggagctgacgagtacgggagggggggtgccctcagactcagcgacaggataaaagactttataggaatttgcacagaaggtgcggggtgggggaggttgttgttgttgttgtttatttatttatttttagaaaaaagctctgcctccgttttattagcaaataaaaattatggagaaatgtaatagccaaaaa

SEQ ID NO: 694488 - DNA, 105 bp, Homo sapiens
gtattagcacctggagtgagaggtctatagaaaacaagtacagtggctgggcgcggtggctcacgcttgtaatcccagcactttgggaggccgaggtgggtggat

SEQ ID NO: 694489 - DNA, 130 bp, Homo sapiens
ccacgccgaggcccatacacttcttgagatcagtgtggacgaagttgttgccaacttcgtccactgggacctgattttaagaagtatactggaggctcggcgtgtgcagtatggttactcggcgtgtgca

SEQ ID NO: 694490 - DNA, 466 bp, Homo sapiens
ttcggagttgcttatgtcttccttttctgcacagatacaggtaaaatctgatactttgttttggcgacatggactatggcgatgtcatagatatggtgcggttgcagttgcaagatgctctgtgtgaattatatacattttagaaaactatgtacagatgaataatttaaaattaattgtaagtggtatttgtggtcttgatagagttggccacgatgtccaaatgtaatattaagcctatgggaaagtcagagccactttgtgtttgtatacttttggagtcagagtctggctctggtcgcccagactggagtggatggggatgatcctgggctcacagaaacggcacacctcttaggtccaaatggatcctggtgcctcagaagccagatgtagcgggattcacaggcctatgccaccactccaagataatttttcgggtatttaaagtaaaaatgcgggtacg

SEQ ID NO: 694491 - DNA, 95 bp, Homo sapiens
  misc_feature (53)..(53): n is a, c, g, or t
gttaaagtgcaaaaccgcacgctttaaataccagcgttcccctggagttcttngcgcctctgtccaacttccgttacggtacttgcgctttttct

SEQ ID NO: 694492 - DNA, 542 bp, Homo sapiens
  misc_feature (501)..(501): n is a, c, g, or t
  misc_feature (518)..(518): n is a, c, g, or t
gcccaggctgtggtgcagtggcatgatcatcgctcactgcagccttgaactcctgggcttaagcaatctcccacctcagcctcctgcacagctgggaccacaggcgtatgccaccacgcccagctaattttcttttttgtagagatggggtcttgctatgttgcccaggctggtctcaaactcttgggctcaagcaatcctcccacccagcctgccaaagtcctggggctacaggcatgagccaccatgccatcttctgctcagctcctttcgtagtctcccgtccccgggccctcctcccccatggctgctcatggactactgcagctgcctggtgcctgctgttcctccatcaggcctgtgtccccatgcccttctgctgagcctacgctcttcccaggtggctgcacagctcccttccttactgaaacacccgctcaccagagaggcctgccctggccaccctctaaggcagctgtatctgcctctcccattcatctnctcatactactgtgctnttcttcctaaatgatcctaccaac

SEQ ID NO: 694493 - DNA, 788 bp, Homo sapiens
gcctggtgtgattccgtcctgcgcggttgtatcacttggagcagcgttctctgaatctccgtaccgacttctctcctacctaagtgcgtgccgacacccgatggacagcattcgatgcccccatggcacatgcagcccccctgaggccccagaactcatcttttcggttagtgcaactcaaagggccgcacaaaagaatttcatccactttaaggtggatacatgcatgaacaatgcagcaccagttcatctttaagcaacggtcagttacaggggcatggtgcaaaggatgagttgcacatagttgcaagccagaggcaatgacattacgcaggcagtccacttcaaagtcaacactggccacttttgcaactgtcctgtcacagccaacaggttacccttgggggcttatgacaataacaaacaccaagtggtcttcaagggtacgacagtgtggttacagggccagctgccatcatcacgtggacagcaccttaagtcagcatcgtgggcggacagactgcagagtacagcaagactgacagcacacgaggaggcctgtgacaactcttccacgtatcatcctgggaaaaaccagcgaacatagaaccctgggcaggtgcgaagcacaagagatacccaccacgaacaaaacgtaacgaccatagactggatcgcagacaagatcgacgacgatgacatcaatcaaccgacggactgagaccacaccacgcgaaacacacaaaagaagaagactgaataaagaacaacacgacaaaaaaccgcca

SEQ ID NO: 694494 - DNA, 1159 bp, Homo sapiens
  misc_feature (34)..(34): n is a, c, g, or t
  misc_feature (183)..(183): n is a, c, g, or t
  misc_feature (335)..(335): n is a, c, g, or t
  misc_feature (404)..(404): n is a, c, g, or t
  misc_feature (427)..(427): n is a, c, g, or t
  misc_feature (457)..(457): n is a, c, g, or t
  misc_feature (469)..(469): n is a, c, g, or t
  misc_feature (475)..(475): n is a, c, g, or t
  misc_feature (504)..(504): n is a, c, g, or t
  misc_feature (510)..(510): n is a, c, g, or t
  misc_feature (512)..(512): n is a, c, g, or t
  misc_feature (534)..(534): n is a, c, g, or t
  misc_feature (540)..(540): n is a, c, g, or t
  misc_feature (545)..(545): n is a, c, g, or t
  misc_feature (552)..(552): n is a, c, g, or t
  misc_feature (580)..(580): n is a, c, g, or t
  misc_feature (625)..(625): n is a, c, g, or t
  misc_feature (669)..(669): n is a, c, g, or t
  misc_feature (677)..(677): n is a, c, g, or t
  misc_feature (701)..(701): n is a, c, g, or t
  misc_feature (707)..(707): n is a, c, g, or t
tcccagtgcgcaagtggctggcggtgtgtgtgtngggggcggcccgggactaggaggggctcggggccaggccggagccgtggtaggcgggtgcagcggctgcgcggcgcggcgcggcgcggggcgggcgtgctctccgcggagagttagaggagttgccgagctgagctccggtggagcganggcgcggagctgggtgcgcgccgagcctctgcctcccgccgctcctcgccctccattcctcgctcccgtcttctcccggccacaccgccactgctgccgcctccctgggaacagtagccgggggagggggactggcgcggtcagagcctgcnaggaggtgcggggcgccggggcgtaggggagcgcgccgggccctgcccgagatcagataacagccggcnggggagggggtgggccggccgtnctcacagcggaccgagggaccgacgccagncgcccggccaancgagcncccagcggcgggggcgccgtccaggcgcncccccnanccgtggctggacagggcgatcngctttncaganagacgcncccctcggatggagcgcccccgggagcngccctgaggcggtggcggcagcgcggcgatgcagcagcgcggcantgccggggccaggaacgccgcccggagctgggaggacgccgagngcgccgcncccgggccactgaccgaggatgtnctagtnactggatcctttccagttggtgcctgggaaatggcagccactactaattcagccttgaagacagtaccgtgcccactcagcaccattacatagaagaaagaactcaagaggagccgccctgcctggaactaagcttggggccgagccagttccccacccccggggatgaccgacgggcaagcgggccacccctaagcattggtcatcgcaagagacggctgacctgcaccatgtcgggccacgggtccggccggagggcgcgcgcgcgggccgcaccgttcgcgagaagccatggactgtggtgcacatgcgaagccacgacccgcgaagtacactgtgactccgcgaatggactccggcccgcccgcgcgcggcacggcaccggcagcctgccggcgcaccgaagcgcggcctcacaacacagcgagggcggccacaccgagagcgcgcgt

SEQ ID NO: 694495 - DNA, 657 bp, Homo sapiens
  misc_feature (52)..(52): n is a, c, g, or t
  misc_feature (404)..(404): n is a, c, g, or t
  misc_feature (474)..(474): n is a, c, g, or t
  misc_feature (554)..(554): n is a, c, g, or t
  misc_feature (610)..(611): n is a, c, g, or t
ccttttggacaagaggcggtcatctaaccatggtcatgccaggaaaagaccnagtctaattccaagctaaagttggtgcgtagcctggcagtgtgtgaggagtcctccaccccatttgctgatgggccattagaaacccaggatataattcaattgcacatcagttgcccttctgacaaggaggaagaaaagtccacaaaagatgtctctgaaaaggaagacaaggacaaaaacaaagaaaagatcccaaggaagatgctgtccagagactccagccaggaatatacggactccactggaatagacctacatgaatttcttgtaaatacactgaaaaagaacccaagggacagaatgatgctgctaaaattagaacaggagattctggaatttattaatgacancaagtaagttacttgcatgaaatatataattagaggtgggagggggcactggaaataaatttaggtacanttttaggagatgttccccttgaagtgtgatttttgaaaacatactgaagtttttaagttattatgtagatttgagttganaaataatttatatcttttcagcagcttgcacttgtcccagattttctgttctaaanntcttccttttctttgcaacatcatcaggtaggtatgatgaaggacg

SEQ ID NO: 694496 - DNA, 530 bp, Homo sapiens
  misc_feature (277)..(277): n is a, c, g, or t
  misc_feature (347)..(347): n is a, c, g, or t
  misc_feature (427)..(427): n is a, c, g, or t
  misc_feature (483)..(484): n is a, c, g, or t
cctacacctagcaaatgtatactcgggttgtttttctttttaaaaatattgtaaaacaggcaagtgaggcttagcagcattatggttcattactgggtttggatatatacctctttcagcttctgtaatgagcaagttgtgttttcaatccccactttcaatgtctatgggagggctgctttttgttttgttttgttttgttttaatcttttttaaacagggacagaatgatgctgctaaaattagaacaggagattctggaatttattaatgacancaagtaagttacttgcatgaaatatataattagaggtgggagggggcactggaaataaatttaggtacanttttaggagatgttccccttgaagtgtgatttttgaaaacatactgaagtttttaagttattatgtagatttgagttganaaataatttatatcttttcagcagcttgcacttgtcccagattttctgttctaaanntcttccttttctttgcaacatcatcaggtaggtatgatgaaggacg

SEQ ID NO: 694497 - DNA, 479 bp, Homo sapiens
  misc_feature (52)..(52): n is a, c, g, or t
ccttttggacaagaggcggtcatctaaccatggtcatgccaggaaaagaccnagtctaattccaagctaaagttggtgcgtagcctggcagtgtgtgaggagtcctccaccccatttgctgatgggccattagaaacccaggatataattcaattgcacatcagttgcccttctgacaaggaggaagaaaagtccacaaaagatgtctctgaaaaggaagacaaggacaaaaacaaagaaaagatcccaaggaagatgctgtccagagactccagccaggaatatacggactccactggaatagacctacatgaatttcttgtaaatacactgaaaaagaacccaagaagaattgggaaaacttctgtgaaagaagaatgcagaaacaaagaaatatgaagtcttgggagtatactgattaaaaagcacacattgggagtgatagtaagaagagctaaaataaaaagcacagaaggaaa

SEQ ID NO: 694498 - DNA, 387 bp, Homo sapiens
agctttctgaatgttcaccgagggaagaaatatataagatacattaaaaaaattgaaaattgttttttgtttttttcagtctaattccaagctaaagttggtgcgtagcctggcagtgtgtgaggagtcctccaccccatttgctgatgggccattagaaacccaggtaggtcatttgcaggagtaagtgtagcttttgcgcttggcagttgtttggtaagatgtagtatggcagtcacagcaacatcagacttgaaaatcagggtagaaggtacttcagaacaaaagctgttgtagtaaaacagggcatggtctctcctcccagctgtgggttccagtggcagtggcagtgctgacagacctgcaccagggaggagggggacccat

SEQ ID NO: 694499 - DNA, 342 bp, Homo sapiens
cccgacattaatgcaaacaggcttattagaatgaatgaactaaaggtgtctaccacgattatttttcgtaactggttggttaataaactgtacctgctctcaaattgaaaaaaaataaaatataaaagcagtgcttacttaagttgtcatgaccctcggggggaaccagaagcactgcctctccacgctccaggatgccgcagctggcgttgtccacatcggtcccacctcgctttacaaaacagtcctaaagcttaatcaattgaaacttattgtacaccacatttacttagaaaaaaagagagttgggtaataggaaagccgggccggtaggctccatgt

SEQ ID NO: 694500 - DNA, 146 bp, Homo sapiens
tcacctgcgtgcaattcaaaaccagcctggtcaatatagtgagaccacatccctactaggaagaattaaaaatatatatataaactggggccaggtacgatggctcacgcctataatcccaacactttgggaggccaaggccggtg

SEQ ID NO: 694501 - DNA, 304 bp, Homo sapiens
acatttattctataagccaggcccacaaccacataggacctttgggccaagttcaaaggaaagtaaagggcagaggaattttccacaatccgagggtcccagggctcacgctgacagctccacctgggcattccagggatgcagctacccccaacaccctttcccttgaggtcaagcggagggcgccatcttgctgggacaggtcagatcactgtgtctggtgttcacttttgcctaagcttcttgataaaggaaacctcatcttcggttccggatgccataatctctgaagcttcttccttgt

SEQ ID NO: 694502 - DNA, 325 bp, Homo sapiens
aaaaaaacgtgtgtcatttcagcctattcagtgcattctgcagcacctgctagaatatttatcctccttctctttccacttaagtcctacatttacataaaggctactggagggttccatgttgaagcaggttttatttgcaaaactcagcctccatggatgtgtctttctgcagcattcctttgtgcctctcattatcacctaagggtttataaaatgggcagtggtaactctagttttaaatctagttaactctagagattaaaatccagtaactctagattaaaatctagtaactctcagctattgtgaacaagttgaagtt

SEQ ID NO: 694503 - DNA, 149 bp, Homo sapiens
tgaggatccccaaccctgccacccacagcccgactttatggataggatttgggaatttttatagatgctgttccatctggtcccttaaacagccatggggaaggctggcaaatagctttcttttattttttgagatggagtttcactct

SEQ ID NO: 694504 - DNA, 201 bp, Homo sapiens
cgtgctgcatcacacaggcgaaatgtggcgggcgctggaaaacgcggcgctgccgtgcaacctggcggacggctttttattgcaatttcaacgacacgggcaatcaggcggtgcgctggaaagcgatcaaaaaattctacaaccgtttgccgaaatttttgcgcaaaccgtttgccgtcgcggtcgtcgcgcccgaagaat

SEQ ID NO: 694505 - DNA, 1893 bp, Homo sapiens
  misc_feature (1198)..(1198): n is a, c, g, or t
ggcgtgaggtttcacagaaggttctccgactgcccgagtacatggtgtccctcgagctgcctgcctcggaagcgcaagagcaggcatcgtggggaaggtgaagagctaccctaaggatgacccgatccaagccggtccaccgtcacaggccttcctggcgtagtacaaaggctggcgatgcagctcacgatcggtggcgggaagtcagacgatggccgaggatccaaggatgagatccgaaggaatggaggtggtgagaggctggtgaacgagtggtcgtagaacaacctatccgatggctgggttcgtgggctattgtggcgagcgtacgtgggaaaccgcctcgtgagggcttccaggaatcttcaaagcaatggtcttagctgtagcacatcaggggatgcaatggtcgagtaggcgttgcctataagaattgtgcattgaatctaagtaggaatgggcttataacgcaatgtactgaacagaagatggtcggagtgatggcctggacaaaagaatcagactagtggatgacgggacgtgcacgaagcatgagaatacggtactgcgcacagtcaatccggcgtcagtggggccgagtagccagtatgacgacctgcttggctgtgttgcgactagaaaattgggcaacctggatggaaggatccgaaggtgagccgtcgtagcactcggggcaggaggaatccggaattgggcctgagaagatggattgagctaggagagtccctagtcgaaccaaaaatgtttgggctccgggtcactgacccaccgggctaccgggtgcccccgggcaaagggtccacagcgacgcgctcggttagggggcaccagtaatgggcccgaacccaacggggcgcgagaaagacgggaagggccaaactgggggcgccacgagagacgggaagaggagaaaacaacagcgcccaacaggagaagacacgctagcaatagatagaatatacacagatacgattgttgtgtgtgtgtggtcgactgcggactcacatcaccgttcgtccaccaacagcgcgaacgcacaacgacaacacagcaacccgcaccacaccccacacacacgcaccacgacccacatcagaccaaacaacccagcaacacagacaacaacaacaccgagcacaacacgacacgcccacacccgactccacccaccacaacnaccaaaaaggacatacatgaagaccaccaaacgatagagacgacacgagacaccgagacggaagcaccggaccagacacagccgccaaccgcgtaagcatagacgtgcgagcagaagcaggaacggaaagaacgagtacaaagcgacaggagacagcgagaactatacgacgaacgaccgaatcaagcgctcgaacgccgcaagcgcgacgacgagctgtgagagaggagcagacgaaatgaggagataagacgaggtgcggagatcacagagagaaacgcacgacacgtaagaaggacaccaaccaactatccaaccatataccgaatcaatataactacaacaccatagaaccatatataatcatccaacatatcctcacataacaatatacatgatcaaaatcattagcatctctacaatcaccacccaataatcgataaccaaaatacaaacacgacaaactacgactcactaacagcacaagacagacacaacactaacaaatcaaatactgataaacaacccatataacatacctaacaatcaaacactcaacaacccaccaatataacacaacacaaaaagaacgatagctaaaaaaacactaaatctctaagctaactactagacacaagacacacactaagaccaccaatttaaaaatataaacataagaacaaaacaaccccaca

SEQ ID NO: 694506 - DNA, 254 bp, Homo sapiens
ggagcgacccttgtctcctgtgggtcgagttgatttcctgtggaaccgaagagtgcgcgcctgagtcagtgttcctatcacagcgttatgtagccgaaatagtgtgctgcgcagcttgctggcgccgtggagttatcagttcgtacacgtgcacggaatatgaatcgatgggactatcgtttccaaggttacgatcaatcgcacgtatgccgggatcgcggtgacgacacctgtcgaccagaggatgtgttcta

SEQ ID NO: 694507 - DNA, 419 bp, Homo sapiens
agagacagggttttactctgtcacccaggctggagtgcagtggtgcaattatagctcattgcagcctcaaactcctggcctcctcctgccttggcctcccaaagtgctgggatttcaggttgcaccactgcacccagctgattttgttacagggttttactctgtcaaccaggatgagtgcagtattgcgtttatagctcattgcagcctcaaactcctgggctcctcctgccttggcatcttgagtagctgggactacaggtatgtaccaccatgcctggctaattttaaaattttctatagagacggggtcttgctatgttgtccagctggtctcgaactcctgggctcaggaggattgcttgagccctaggagtttgaatccagcctgtgcaatacagcaagatctcatctctggg

SEQ ID NO: 694508 - DNA, 122 bp, Homo sapiens
tcttttcttgcccacttactctgcccgcgtatacccgcttccactgtgcacaatcctctcccttctttttcccccgcctggcatcgcccagccctctcgtagggcatgttccccactctgga

SEQ ID NO: 694509 - DNA, 378 bp, Homo sapiens
  misc_feature (172)..(172): n is a, c, g, or t
tgaggttgaggtaaactaatatactaaatattgccataagatctaagtgcctcatcagagatcactacaaggtctagctctgatcttccaagcagtcagtgcaaagaggataatttcaaaattcacgatacaatttacagtaaccataaaaaatgaaccagaagcttaggtnaagtagctctggaactttctcctgtggatcctcataaaaggacactgtgatgtgttgaaccatgtcctggacaacattcctaccataaatgcagtaaggagtctcacagggctgttccttaaagcattcctcagtgagggctggtggcacagcaccaaatgctcagttcagtaaaagcaattctttaaggggccaaaaccattcca

SEQ ID NO: 694510 - DNA, 250 bp, Homo sapiens
cgtcgacatgcgggccgattcctcggtatcccggatgagatcgaggacgccgcctatatcgacggtgcgggtgaagtgcgaaggttcttcaccatcttcctgccacaggtcaagggatccctcgtcgtcggcctgacagccttcatcttcgcgtggcaggactatctgtggccgctgctcatcactcagtcctcctcgaactacacgatgatgatcggtaacgcacagtgtcagcctcattcggaacgga

SEQ ID NO: 694511 - DNA, 108 bp, Homo sapiens
cgctataggcctgtctaataggtatcttcttttttataccacgataactacttccactcacaatgagatgaatcgtcttatttacagaatattagggattccaagtag

SEQ ID NO: 694512 - DNA, 252 bp, Homo sapiens
ccattttccttggaaccccccccccccttttttttccccccaaaaaaaacccggggccctttcccccccccggtttttaccctagcccgggggggggatacctttttccccccggaaccccttttcccctttggcccttttttggtccccctttaaaccatttttttccaaaaaaccggggggggcccggcccggatttcccgggtttttttccccccccgctcccccggacggttggggggggggttggga

SEQ ID NO: 694513 - DNA, 367 bp, Homo sapiens
tatttccttagctttagtgtttctgtagagaaaagagatggatttcaatttttttgcatgtcactctgacaaagttctgtttcccttacagcagccaagaaactaaaataaggctaggcttagtggctcatgcctgtaatcttagcactttgtgaggccaaaatgagaggatcgcttaagcccagtagtttgagaccagcctgggcaacatagtgagacttagtctctataaaaacatttaaggctgggtgcggtggctcacgcctgtaattccagcaccttgggaggctgaggccagtggattgcttgaggccgggagttcgagaccaacctgggcaacgtggtgaaacccgccccccatctctgt

SEQ ID NO: 694514 - DNA, 737 bp, Homo sapiens
gcctttgccgatccgccgccgtccacacccgccggtcagctcaccatggatgatgatatcgccgcgctcgtcgtcgacaacgggtccggcatgtgcaaggccggcttcgcgggcgagatgcccccggggcgtcttccccctccatcgtggaggctgccccaggcgaccagggcggtgatgcgtgggcatgtggtcagaaggattccgtatgtgggcgacgaggcccagagcaagtgagaggctgtcctcaccctggaagtaccccatcgagcacggcatcgtcaccaactgggacgacatggcgaaaatctggcaccacaccttctacaatgagctgcgtgtggctcccgaggagcaccccgtgcttgctgaccgaggcccccctgaacaccaaggcaaccggcgagaatgatgagccagatcatgttgagacgcttcaacaccccagccatgtacgttgctatccaggctgtgctatcccgtgtaacgcctctggccgtaccactgggctcgtgatggactccggtgaccgggtccacccgagaatgtgcccatctacgaggggtaatgcccatccccaatgccaatccttggagtctggacctggcttggccgggaccctggacttgactacctcatggaagatccttcaccgaagtcgcggctacaagctttcagcagccacaggcgaacggggaaatcgtgcgtgacattcacgggaacgctgtgtacgtcgc

SEQ ID NO: 694515 - DNA, 160 bp, Homo sapiens
ctgattacgatggggacggacttagcctccactgtgagagtaagccgaatctcggcgtcgctgatggtctagggggctaccgagggggtggggcagtgtcagtcttcaggcgggtaagccgagaagatcccacatgtcttctgtctgatgggtaccgagg

SEQ ID NO: 694516 - DNA, 585 bp, Homo sapiens
cacaacattagccgcgcgcacaacgtacagtagagccaccatgaaccaaccgcctgacatcaaccagtaccggccgccgaaacgccacggggctggatcgccgtcatcatcgtgacagcgctcgtcgtcgcgctggtcatcgttgcacgccgggtcacgaccgagccggcgaaccccgtcacgccgacgccgtcccccattgcgacatccgcgtcctcgactccgacgcccattccggcatcggctactgcggtcgcctcctctttacccttctcctcgaaggatgatgacaccgaggggaggtggtcaatcgaccacgtggaatggggacctaacaccgtcaccctgacggatgaccatcggcggtcaccaagggttctttgaccgactacaccttcttcatcatggagaaccagtcaaccgatatccatcaggcgagccagcccccctacaggctcactcggcactggtgtatcccaaggccacaaggttcacggcacgatcacgatcgattgtccacgaaccgatgccaccgtcatgcttacccacgggtcagggatgtcctcccccatttcggcattaatg

SEQ ID NO: 694517 - DNA, 299 bp, Homo sapiens
gtcctgactcggatatcacagcagagcctgtcggaaggctgccacgagcccgagggcagtctgatcacggtcttgcccagaactgggtctccacatccacattggagatttcagtcagtatcatgtcttaggaatcttgatcttgactgttgtccagagtactatggcaataggtgtccacacaccagacttcacccgagtcctaggtcttatgttgaacgatgtagcatcttcactgcatggaggcggccactagggtcggtggcagaagtgcaagcagaatggcctcctatgatgca

SEQ ID NO: 694518 - DNA, 1220 bp, Homo sapiens
tagcctcacaagctagtacagcacctgggactgggtaagccagtgacatagcgaatgaatcaactaaatagtgtagtattagtctgtatctcatgctgctaagtaaagatagtaccccaggaccaggcacaggtgaactcatgcctgtaatcccagacccttaggagaggtagatgcaggcgagatcacttgaggatcaggcattcgagaccaggcctggccaacaatgggtgaagacgccgtcgtctactaaaaatacaaaacaattagccaggcatggctggcgctatgcctataaatcccagatacttgggaggccgcatggccggagaatcacgtatgcacccgggaaggcagaggttgcaagtgagctaacgatcgtgccactgcacatccagactgggcagacagacgtgagattccaatctaaaaccacaacaactacccaacacggggataatcctctccacgcgacacgacggtcgacgcagacccacagacaccacaatggcctggcggacgcacctcacaactcctggcaaccagaaccccgggacatctaacatggccggcccgaaaagaaagcagctgcaagggtgattatacagccatgacatacacacagcatacacagaatctcaatgagcacaccaaatacacgataccgaccaaagaaataggacagagcgaaaaaaaccgcacccaaggtgaacaaaagcaaaaacacccgacaggagatacagcccacaggaacacaccgaaaggaactaacaaggaaggcaaccaacctccgcgcactgagactcggcatgacggacataaccaccaaccaaccacatgagcaacacccagtaacccaacggcaccacacacaccccacacaacaccacaaaaaaggcaaagacgcagacaaccgcgcacccaaaccaccagacacaaaccgcacgacctataaagcgccgaccaaggtccgcacacaccagactccgaaaaccacggcgagcagcaccgacgcacaccccagagcaaagcccacacccagcaaggcacaaaaccgggaaaaacatacacccaaaacgacaagaagaaaccacacaacagatagagtagacacccacacacggcgggagcaacagcgcacacacagacaaacaaacagaacgaaagaagacaaaacccaaaacgagaagaagaaacagccacagaccaagacagacgcc

SEQ ID NO: 694519 - DNA, 123 bp, Homo sapiens
cctctagacggatcccctcggaaggaggtacggacaagacgacatagggcctacttacacaaagcgccttccccggtaaatgatatcatctcaatttagtattatcccctcttccccagccag

SEQ ID NO: 694520 - DNA, 169 bp, Homo sapiens
gggaaaaattccccccaaaattttttttttaggggggggtttttaccccggtaaaaaccccttgtttttttccccggcccaaaaggaaaatttttttttgtttttgggggccccccctcccttggggtttaaaatccccttttttggttttaccccggcgccgggggga

SEQ ID NO: 694521 - DNA, 127 bp, Homo sapiens
tccgtactacagacagaagtctcagagctcagcagattaatgatcagtcgaagttggctttaagtatcatagagcaagattaacgaagtcccagaatcatcccaaagcggatattattgagaacttt

SEQ ID NO: 694522 - DNA, 1053 bp, Homo sapiens
  misc_feature (193)..(193): n is a, c, g, or t
  misc_feature (216)..(216): n is a, c, g, or t
  misc_feature (800)..(800): n is a, c, g, or t
ggtgggatcaggcagcagagcttttttcccctttgccttgatccttcgcaaggctgagccactgggctgtgggggaaggggtcaaggccatatcccaactacgtgtagggcgagggtccctgctggcacattcaggctgtgctgggaagaagagacctgggcttggaaggaaccggtccccgacggtttctgnttgcctcgcctcttccccctttngtcagctgagcagtttgtggtttctatgcccgcaagtttcaggaagtattcacaaaagaaaaatacattttcttcccccaggggtggggcaaggacagcggcagagcagtgctacggaaactgagctcccctgggcacaaggggcaccgggccgtgactgtccaactactctccgcgctcccaacgcgcaccggactccgcctagcgaccctccagcaccacacacgacttcagcacccctcagacctgccccggggccaggctggagaacagtgacgggccgctacaaggcacagtgaaactctctgagttgccggggctaagccctgaccccctcatccatgctccccgcccccaacccactctggcctcagtcacatcccccccctcagctctgctggtcgtccgcccccggctggcacctgcacgtggccgccactcttggcctcacctgcacctccacccttccgcgcctcaccccgatactccacccctcacccctcctgaccacccccgcaccgccgcgcgcccccaccacgcccggcctaacccccgcaccccccacccacacacgccgccacacnccgcccgccaacccgccccccacccccgccccacccccacgccaccccaccccccaccgcgacatcacgcgcaccccgcgccaccccacacgcccaggcccacgcccccccccggccccccccaccgcccccccgcccctccccacccccggccccgcgcccccgcaccccaccggccccacaccccgcccccacccaccccccccacccccccacccccccacccccccaccccccccaccgcccacacccc

SEQ ID NO: 694523 - DNA, 449 bp, Homo sapiens
gcgtggtcgcggccgaggtacggaatataatggaatggaatgaaatggaatggaatggaatgcaatggaatggaatggaatggaatggattcaactcgaatggaatcaacacgattgcaatggaatggaatggaatggaaaggaatagaatggaatcaacccgagtggaatggaatggaaaggactggaatggagtggaatggaatggaatggaattaacccgaaaagaatgaaatggaatggaatggaacggaatgtattggaatggaatggaatggaatcaaacctgagtgcaggggaatgtaatggaacggaatgcaatggaatggaatcatccggaatggaatggaatggaatggaatggaatcaaccctagtgcaatggaatggagtggaatggaatggaatggaatggaacaacccgtatggaatggaatgtaatggagagta

SEQ ID NO: 694524 - DNA, 261 bp, Homo sapiens
aggaaaaaaggatggagaaatatctaggaaagtgtcttctcagaaaccaccaacctttgaagggtacaagtagacgaggaagattctttttttgggaagccagagaaaacaaaggatggggaaaatctaggacagtgtttttctgagaaaccaccagcgcttgaaggcttcaaggtaagagaaagattctgtttttgaatatagccagagggaaaaagtatggagaaaaatctcaggacagagtttttctgagaaaccacc

SEQ ID NO: 694525 - DNA, 560 bp, Homo sapiens
  misc_feature (193)..(193): n is a, c, g, or t
  misc_feature (216)..(216): n is a, c, g, or t
ggtgggatcaggcagcagagcttttttcccctttgccttgatccttcgcaaggctgagccactgggctgtgggggaaggggtcaaggccatatcccaactacgtgtagggcgagggtccctgctggcacattcaggctgtgctgggaagaagagacctgggcttggaaggaaccggtccccgacggtttctgnttgcctcgcctcttccccctttngtcagctgagcagtttgtggtttctatgcccgcaagtttcaggaagtattcacaaaattagccaggcgtggtggtgcatgcctgtaatccagctacttgggaggctgaggcaggaaaatggcttgaacccgggaggtggaggttgcagtgagctgagattgcgccactgcactccagcctgggcaacaagagcaaaactccgtctcaaaaaaaaaaattgccgggcgcggtggcaaatgcctgtaatcccagcactttgggaggccgaggcaggtggatcacaaggtcaggagatagagaccatcattgctaacatggtgaaaccccgtctctactaaaaatac

SEQ ID NO: 694526 - DNA, 749 bp, Homo sapiens
caaagtgtagcgttcacgaaatatatactgctttacacacagagatcaagcatatccttttacaagtggctatacatgtcctaaaatgccataagaaaatgcaatatctgggtactgtatggggaaaaaaatgtccactcccccataaataccagtggcatttcagctgtgcaagtaactgaacacaataatgctgtcgttaatttcgtggttatatcagttaaaattcacaataatgtagatagacacaagattacagacgaagcgcaacagaaagaaacttgaatgaaatggattttacagaaagctttatgatacattttcgaatgcattatgttatttattcgtgccatgcattgtatattctcaccagagagtgaccttacctggtaatacagatcttgatttgtctgttatacaagccatgtatctattgcaatgtacatactgtacatgttcaactggtaacagttatctgttcttattaaaacatcatcccatgactgggaatggtgtcgatatattggaaactcttggtgagagacatgaatggtgtgtatacatacgtctggtaccattaatacaattactcctgtaattactagtcttaggttcacctttagaagcctcgatctaatcggaagaattgcaagaaacaactataaacatacgtaacagatctaataccttacgaaagacaagcctggcaagtcaaatggtcccaggctcggctttgcgttgaaaccaaa

SEQ ID NO: 694527 - DNA, 351 bp, Homo sapiens
gaatgcactcgggctatatatggatattgtgctgtatctgtgtttgtgtctgtgtgtgacaccatgaagataatgcctgtggttatgctgaataaattcaccagatgctttctgttagcttcagaaattattttaaggtttcttaaactcaagttatacaactaaaggcctttcttaagctaatgatatatagagtgaagagcacgactctggcaatggattgccattttataggagacctctatagaaactgtctagataaatggggctatctatactctgaatattattctattactccaggggacccagcagtgctctctcgtgtgtgtgtgtgtgtgtgtgtgtgtt

SEQ ID NO: 694528 - DNA, 532 bp, Homo sapiens
tgccactttggcataaggatgatttgagctgaaggcaattgagaaaaagcagacaggatgagctttctgccttttccctttctgcctgaaaaacagggtgtacatttccttgtgaagccccctcaccttgtccataccaggaaggggagaacggccttatcaccggagagagagatggcactgagaagcatctacacagacaagccttactaaatagccctatctaccatagtgtcccccatatgtttaccttcccacagcttactacccctaaaacattcagaagccactttcctttgccttgtcacttctccacaaatttatcatcctttgttagtatggtataaagccaccaagtctgctttgtggggtttctcttttatgaagcaccaccacctcccccatgccaggtaacacttttaacattagggagtcacgctgaacctattctggtttaggggtccacccgatttgaaaaacaaaaaaaacaaaacttttaacatgaaataaaatgtgtatgtaattaaaaaaa

SEQ ID NO: 694529 - DNA, 112 bp, Homo sapiens
cggagaactctgcaaaacaagaggctgaggattgcggttagaggataaaccagttcaggccggagcccgttaaggaaaggcatttccgttggttccgcccgttctcgggaga

SEQ ID NO: 694530 - DNA, 366 bp, Homo sapiens
  misc_feature (120)..(120): n is a, c, g, or t
  misc_feature (351)..(352): n is a, c, g, or t
  misc_feature (356)..(356): n is a, c, g, or t
ccccgccttgcagtctcccagccgtgcggggccggggaagccgaccggcctcccagacttcctaaggaccgccgggcccaactttgtactcatccaccccagccggcttgggactcaganaccgaagtctttttttttttctctccgatccttggacacctcctctgtctgccatttattagccatgtgaacttggccacatcacttcacctccctgagcctcagtttcctcatctgtcaaatgggggtttataaacacctacctcgcagggttgttgtgaggatttaatgcgataatgtatgtaaagcgccttgcacactgcctggcacacagtaggcgctcaataaatnnttantcttcccttt

SEQ ID NO: 694531 - DNA, 211 bp, Homo sapiens
gggagagaggttgcagtgagccgagatcgcgccattgcgcttcagcctgggcaacaagagcgaaactcgatctcaaaaaaaaaaaaaaaaaaaaaaaaaaaaattgttggcttttgtgggcattaaaaattgggattcggtttggtaaaaggaaagggaaaaagggcaatttaggggaaagcgggatctagattgatgtgagaaagaggtt

SEQ ID NO: 694532 - DNA, 137 bp, Homo sapiens
  misc_feature (63)..(63): n is a, c, g, or t
gctacctacgctgggcaggtcccaagtctgaagctagtattcatgatggtgggggatggagtntcttccgaggttcttgggggaaaacgaattgtaggatattatgcgggaggcaattaaccgtgttcggaactttt

SEQ ID NO: 694533 - DNA, 319 bp, Homo sapiens
agttgccgcacgtgacgatacgcggcggtacgaggccgaggctcgtgatgcgcttcatcgatcaccagcagatcgaggatcgggatggcagcgagatggttgtcgcgcgacagcgtttgcaccatcgcgaacgtggcgcgcccggaccaggatttgtccttggcatcgaacacggaggtcctgacgcccggattcacccgtgcaaacttggataggttctggccggtcagttcatcgcgatgagcgaggatgcaggccttggcatctggctcggccaacaagctgccggccaccgccgacagcatgatggtcttgcccc

SEQ ID NO: 694534 - DNA, 445 bp, Homo sapiens
ccggattacaacctcgtctggcgcgggttccgcaacgggcacgtcctccaaggtgagccgcagttccccgtctcgagtaacaagcgatcgcagttccaaggtgttagtacccataatctctcctttcgtcccagcgccgagctcactgggctatgaaattcgcccttgtgtttgccagatccccggccgcggcgtcggcaccaccctctcagaccgggtacggccccttggcaaacacctcgccgtggtagccctttgagcccaccgctcgcgccaaggggctctggaaatcctcaccgcggtgcaaactccccaccactgagttgaaatcgtaccgcggctgccatcccaactgggcgcgggccaattcgttcacatacacgcgatctatcgtcggcaccatcgaccagccacgccgccgaaattccgcctcgtaacccggaga

SEQ ID NO: 694535 - DNA, 288 bp, Homo sapiens
tggaataataatttaatgctcactggggccctgactgaaagtcaagctcaggcacaattagggccatggctgggctcccaccaatgaggatacacgcaggcaaggaggttggatgtggtggtgtgggatacacgataagggcaaagggagctcataaattgggcccagactggctctgggttcaaaggtggagggtccacgatggacaagtctggagggctaggcaccttaggaggagtgattaaattggctccctttcccaggactttacagacacgatggggggtt

SEQ ID NO: 694536 - DNA, 128 bp, Homo sapiens
ggttaccaggcaggaataactggcgacgcttgtgagaccccagcaggagagcggcaagttgtcgctggactcccgactcacggattcgttgagataatagagatggagtgtcacaatgttgccaaggc

SEQ ID NO: 694537 - DNA, 920 bp, Homo sapiens
  misc_feature (24)..(24): n is a, c, g, or t
tgcgtcaccaatattgcggtcgtnatgccgaggggcccctcttgaaaggtcgtctctcccatgcgcgcctcaccatatttggtgttgctcggatagcctcttattcggctgccgggcaaagactacggttccgggacagcaaacggctccctttggccaggaaacccaaaatgggggcccacaggactcgcgcggtggggtcgcgacccgtgtgtcgcgcgaatgtggaaggactcccctccccgcaagggggtactctgggtgctggggtggccacacagtgtttgtgttgcgccccacagcccgagtgggtccatgtagggtttttggagaagccctttaacactcctgtccttggggcgcgccccttaaaatttgccaattcccttccgagacccactaaaagcttcagagctcttatctctgggcccaccaaaactattgcccccgaaaccgcatcggccataacattacgttgggtccatagacctgtggcaccaattctccacccttgcccaatgcccaccagcgagaccatttttcggcttcccctcgtacacaatattcggtaaaaagcggtgcaatttacacaccacccatacttcaccaccatctaacctcctacaaactcgataatttgtcttctccccgttatcggaccccccgcggtccaggaacttaacccaatcgctcattcacacgggacattcacacaccacccttcccccttcacacggacacacattctccctccgcgcaccctggttatgcccacccctctaacccccctcggtacattctgccctccagtctccagacgtagacccaccacgctttcgccagaagggcgtaaactttcccaacctagcagttcggggcacaatctcccaaccatggccccacacccaaccgccaacatc

SEQ ID NO: 694538 - DNA, 675 bp, Homo sapiens
gcttgaaggtcattttataacaacatttgtgcataaagcaaagtttgactgcattgacggcatttgatgtggaatttttttcacatttgaagtacttggattttttccttttttttgagacggagtctcgctctgtcacccaggctggagtgcagtgacgcgatctctgctcactgcaagctctgcctcctgggttcacgccattctcctgcctcagcctcctgagtagctgagactataggtgcccgccaccacgtccggctaattttttaaatttttttagtagagacggggtttcactgtgttagccaggatggtttcgatctcctgacctcgtgattctgcccgccttggcctcccatagtgctggaattacaggcgtgagccactgtgcctggccggattttttcctttttttagtaaaaagtagagacagggtgaccaggtacagtggctcatgctgtgcaatcccagcactttggaggccgaggcaggtggatcttttgaggcaggagttcgagaccagctggcaacatgatgaaacctatctctactaaaaatacaaaaattaggctgggcatagtggcaggctttgtatcccagtatcagaagggtgaggcaggagattggtgctggatctgggagggagagttgagtgagcgagatgtgtgggta

SEQ ID NO: 694539 - DNA, 116 bp, Homo sapiens
ctacaggatccccctggctaagagaaccctcacaacaagttttgcctccttcatcgcacgaggctgcggtttctagtagtcagcagatacaagctgctcggagactcatagttgga

SEQ ID NO: 694540 - DNA, 502 bp, Homo sapiens
tgagccggtcccccccgcggaatgaggctagaagtatcacagccatccttcggccggctaggagagtcaggtgcaagaagggtttatggactctgagtaaggcaagcaggggctgcctgggaggcaaacgccgcggtctggttgcactggcctttgagatgggcggctccttcatgccatgggcaccgcagaggcattggctctgatccttcaacgctgtcgcagggctcctgaggcttagagacggaggtcacctcctgagtcatacacagctgagacatcagtgacaggagaggaccccaactgcgtggataccagagcccaaggccccggaaaaggccatttcgcgtgcctccagggtatggcctgcctgaggaagctgttaccccactgacgttttcgtagcaacaacagcttcctcacagaagaggaggggggccgagatattattcccattcgacacagtaggaagctggggcccacgggggccttcgggggcaga

SEQ ID NO: 694541 - DNA, 148 bp, Homo sapiens
atacattgtctgatgacaacttaattgaaggtggtggaacaaaatttgtctgcatacctgtagccagaaacattaccgtcatattccacccattactaagatttattcaggagattgagcatgctctgggtcttggcccagccaaaca

SEQ ID NO: 694542 - DNA, 242 bp, Homo sapiens
aaaaaggggggggtttttttttttgggggcgggggaaaaaaaaccaggggcccccccccccccccagggggtttgggggttttcccggggcccccccggggggggtccccccccccctttggaaggggggggggccccccccccccggggggggggggggggccccgggttttggcccggggcccccccgggcccccgccccccgggccttttttttttccccattattgttttttttttta

SEQ ID NO: 694543 - DNA, 203 bp, Homo sapiens
ctagattgacttcatagcaagcctcgctaatctcgcctgacctccccagtgattaacactacggggagaactctctgtgctagtaaccacgttctcctgatctaatatcactctcctagttccaggattcaacatactagtcatagctctctgctgcctctacatatttaccacaacacaatggggctcaggtcacccaccct

SEQ ID NO: 694544 - DNA, 1394 bp, Homo sapiens
ctatgtgtgctttgggggtcgtcacgggtcgttcgccatcgcctctgtgttatgctccggaggagtgatgtgtttgggagaggggcttgcccccctctcttcgcgtgctgctcggtgagcaggatgtaatagaggggctcgcttgtggcgcccacacggacgcctaagaagggtcacgggaggggcacttgctagacccactggtccgttgtcgtagtgccagcaggttatgttgttccccgaccgcgtgcgcagggagggtaggcttctccccccggcgcttgtggtggctacccccccgtgtgggtttgatatgccggtcggggtcctctgtgggggcttcatctcgcccgtgggtgtggtgtgcgcctcaccaaccccccctcacccaatgcctgcccccccccggggtagggggtggctgcgcgcgcccctccagcacaggagtttctgttggtagcacacgcgtgtgtggggatgcaaatatccggggcttttacgaggcgaaggatctctctctgtggggacgcacacattcgtccgcaagagccctcttctgctgaggggaagtattgtttacctcgcgccaaaacttgtgggctgccgacctcgaggcggggcgcacgcgtgttggacgccgcagcgattgggtgttggttcgcccgggggggaaccatttgttctccaagcgcacgaaaaccaccttgggggtgcgcgcccccccctccgccagagacgctcgcgccggtttgttgtttctctccccctacatgaggagagcgcgagcgctctttctcccacaaaagaggtgatattcttttggcgcgtgattgtgttgaggattttctcctgggtgagcgcccctggacgcactatctccgccgtgcgccaagtggaatttccccccggacatttctttcttctcgcactctccccccgaggcgccgggtggtcgttgtgacacttctgtgatcgcacacagtctccctgtctcagagtataagagggcgccacatctttctcacactggccacatgtgcgctgggtacacatggcctcttctcacaccccgggggatgtgccaacctgtcgtctgtagaccagacgtggggtctacatccccacgttctatctactggcgttataaacaagatgtcttgtgcgtttgtatataagccacaccccatgtgatgacgccacagcttgatgtacaccaggatttgggccagacaacacaccaagtgtctgcccagagatggtttggcacgtctaatggggggacaccagggggtgtacaataggccacgcatttaagattttggggggtttttacaccccccaaaaacaccctccgggtgggccctggttttaaagggaaccccccgactttccca

SEQ ID NO: 694545 - DNA, 375 bp, Homo sapiens
cggctttctccgtccataggcaccgcgtgaagggcaccgtaagaatcttcccgaatgctcctgtcacgcgtcgcggccgcctcttcttcctcaccgccacttcctcaggccaggcccgcggataacgcctcagttgcgacccagctctaggcagtccgcaggggcctccgccggggagggaaggcacgacctggggccgagcggggccaagccgcggggcagcacgccggggcaggctcgggcgggcgctgtcgccgcgcggactgaaggcgcgggcggaaggcgaccgcgcgggtgggcagggggcaccgctaggggcggggcttcggcgcgtcggaggcgcagctcccgcgccgttcacgtgacgggcccggc

SEQ ID NO: 694546 - DNA, 110 bp, Homo sapiens
gagacagatacgaattgatgtcggtgaccttttttttgtgtattataattcgtggtctatatatggatcaattgcatgatcatatgaagattggcgcgatgatatagggg

SEQ ID NO: 694547 - DNA, 537 bp, Homo sapiens
cccatccttcaaaatattcatatgtggtggtatctctatctgattcaagaggcctaggggtgcacatagaaggctatggtcataagtttgatactcgatccaactgcgacctttctcttacactttacaaagcattatccatatataaaatgttaattgaaaccttttttattacgtatatatctgatgctgctacatcattataatgcttttcattaaagaaaaaaaaaagctacaggtcttcacttacagtaccatgcactatgagtagctaaggcattcatttggcactagagagaaaattacagatacagctaattttgctttcattatcatttttaacatcaatagaaataagcatataactttcacttgaatttctgtaatgcttaaaagataatcacagaatacccttttagtttgacagttacaatgttgccattaaaacaaaacaaaaaaaccataaagacctctgtatagcctgtaggaataagttacattttggggttgaaaaatttgcggctctcagacacaatt

SEQ ID NO: 694548 - DNA, 834 bp, Homo sapiens
  misc_feature (518)..(518): n is a, c, g, or t
agctatcaatactattagaacgcatcgcgtggaagctgttcaatcagctttgtcatagactggatccaaggaaatcctggtcatgaatgaggttgggattgataattgaatgatggaaggggagcatgttagtgaagaagctatgggaggaaatcaaggctcgtctcatatcgtggagggatgatggaccgtggtcgtataaagaggcactctcctgtggctgagtgtcagtgttacaagaattgggccgagcgatcatgtgatttctctaagcatcaggataaagaaggctgacttgaccaaatcacaagtggttggactctaggactttcccgtggggctttaaattgcacttgtaccaccatgcggcacctcccctcaccagctgcccgagacacatgtccattatggcacaggcccatactctcgcacaacagattcccgcttgcgcgcaaccaatggggacttcctccgccctcattgaacaccgtctcacccagcaacctccctccccaagntttacgagggccagggcaaacggctaaaaggttcttggatagaactccctttgctaactttttgaacaagtcacagatgaagacttatatagatataataatccatacattgtattgtgtcaagaacttttagactgtaaacttaactctatttggcaaatataaggcgtgggaatagaatcggttgctttaagtgggttgagcaatcactgtttaacctattgctctgggttggaatagaagcctgagtggtataactaatggtttgggggattgggtacaactgtgccttacaacgtaataattggaatatggc

SEQ ID NO: 694549 - DNA, 1090 bp, Homo sapiens
ggagggtgacccatgctgcgcagtcagagagactgaaatggtgtctctgtggctcatgctgatgggctgagcttgggtctggggcggcattcatctcgcgtcacacttgcgtctccagcgtgcgtccatggtacacggcgtccctcacgttgatgagactcgatgaacaacttgtgcctgccacacagaggctgacaaccaaatggtatgaggtcccacatccaatgtcggtcgacccatgaaccgcgcagaatggcgtacgtgatagtggataggcgagtatctgtggacgcagaaagcgcgctgactaggctaagccctacagcaatcccatcctcactcgccgaactacatcgaatcacgcaatcgaaacggagttctgacgtgcggtccttgaggcctggttctcccttgtgtttgagacatatgttctcttgcagctgtcccaggaggcctcacgttccagctcgacagtgtggagttgcattcatcgcactccagagcccccatggccggagggagtcacttcctgggcacaaatggctgtcacacgttgcgtgtgtgtgactgagctctccgtcatggaccatgacagggctgcctgcctgacccgcgatggagctatggaggaacctgcatggctgatagagaaggacctggccctactattgctacgatgcctgaagtgtgtgggcccagtgagacccgcaggcacttccctcggagttcttccagcgccaagtcaggagctgtctggcggggaaagacctgtttggatgggggacgggcccggtccatgcaaggtggcacctccgccgcaagatggtccagtgacgtggggggatgggccggacgcacaaagctgagtaccttgtgggacatactggaccacctgagggccaccaaggtagtctggcatatcttgcggggccaggagctgtgcccacatggcatgaagttaacctggcttgaccagttcttgaaaggagagccagaaccgagtaagtggaaggagcccagtcctagagggagaaccgataggggcgaggtacaaccacggaggccaagacagacagaagaacaccccacc

SEQ ID NO: 694550 - DNA, 382 bp, Homo sapiens
gggtctatcgatgccacaaagaacttacattaaattaaaaaattctttttctagcataatattgttctactaacagttctttgtggcaggaaactattccttgaacatgcagtagttcttaaatgtatcccatttagatgagaaaactgatagatgtatttagattgcttagtcactgatttgacctcgttggatgactttttacatgttgctgttaaaactgttctattttcatccaaagcacattctgtgaactttaggatcaggatttcaaatgctgtctaccatctaacacggtatctgttaaaattgttttggatgattgggaagttggattaaatgaataaaaatggtgaactttattgggtggcatcgataaaca

SEQ ID NO: 694551 - DNA, 172 bp, Homo sapiens
gtctaccttgtcttgtaatcccagccactagggaggctgaggcaggagaatcacttgaactcaggaggcggaggttgcactgagccgagatcgtgcactgactccaacagcccaaagaatcctgtgcagctccgattttattcgcatccttgtgagacaaggtagagccgag

SEQ ID NO: 694552 - DNA, 347 bp, Homo sapiens
ggagatagagtcttgctttgtagcccaggctggagtgcagtggcgcaatctcggctcactgctatctctgcctcccaggtcctggttcaagcaattctcctgcctcagcctcccgaattgctggggttacaggcgcgtgccaccatgcccagctaatttttgtatttttagtagagatggggtttcaccatgttggccaggctggtcttgaactcctgagctcgtgatccacccgccttggcctcccaaagtcctgggattacaggcgtgagccactgtgccggcctatttttgctttctctaaaacaagattccaacagagtctacactgtatttagttggtatgc

SEQ ID NO: 694553 - DNA, 1188 bp, Homo sapiens
ctgctggggcctcccggggccggtaaagggacccaggcacccagcatggctgaaaacttctgtgtctgccatttagctactggggacatgctgagggccatggtggcttctggactcagagctaggaaaaaagctgaaggcaactatggatgctgggaaactggtgagtgatgaaatggtagtggagctcattgcgaagaatttggagacccccttgtgccaaaaatgggtttctcttctggatggcttccctcggactgtgaggcaggcagaactgctcgatgacctcatggcaggacagcaggaacagagcacagcttgcattctgtgcattgcacatcccagccatcccgagactctctgctgcatccgcaagcaatccccaggcaaggctgcattcaccccgaagagtggccgttcctacccacgcggcagtcccaaccctccaacacgcagcccatgcaaagccatgacctccaccggggcaacccgtgcatccgccgcatccagcatgatcaatgcacaccaggcctcgcccaaatccgcctgcaacgccatacacacacatcaaagccaaccccacgtcatagagtacatacacggaaacgggggatccactccagccctcgatgcatcccagcaccaccgacgtcgagctcgccagcctcctagcagacctcctccacaacgccaccatcctcgaatcacccagggcccggcgcagcactgccgacaagggcccctccaccccgccggcgtgcacccctgcgtcctcacgcgcacgaccagacgggaacgcgcggccaccgagacgaagcaccacacgccacgacgcacacgcgacaccacagggccaaccgagacccacacacccacgcggccacggcacccgacgcacataccatacccaccaccgccgcacacgcccccaagcggccggcaacaacaggagcaaaaacacccagctagcgcgcgcgagccacagccacaccacaggccccaccgcacagcggctcaccaccggcccggtacttaccaaacacacaacaccacagctacccccccccctcaccaacaccggacacggagagacaaccggagagcacagccaaccacccacaccacgacagcagcgaccacgacagacccctcactgccgagccaacgcgagagcacgcccacccgccc

SEQ ID NO: 694554 - DNA, 103 bp, Homo sapiens
tctagagatcccgcagtttaagggctaccccaagtacattatgaccccctcattcttctcttgaactggagaggggaagaaatgaaaggcatgccacgttcgt

SEQ ID NO: 694555 - DNA, 265 bp, Homo sapiens
gatggtgtctctttgtaaccaaaattttttgatacatgccatttaagactatcagagaaataaataagatacagtctttttttctctaggacttcacagtttatcagagaagataagcatacttttacttaaaaaatgactaatagtaacataagcccaagaaaagtggtagagacatttctctttaatgttgaggtgtaggatggaggacattggagaagacgatataaggcagaggaaaattatactgcacctgaacaagaag

SEQ ID NO: 694556 - DNA, 239 bp, Homo sapiens
ctcataggtcgcaggcacctgtgttttcgctaaacagtcgctatgggccttttcactgcggctcttcccatcggaagagcgccccttctccctgaagttacggggccattttgccgagttccttaacgagagttctcccgcgcgccttcgtgttctccacgcgcccacctcctgtcggtttccggatacgggacaccttcggcctcgctaggggtaccagagctcgcaattcagtaatc

SEQ ID NO: 694557 - DNA, 898 bp, Homo sapiens
aataatgaaatgaaaatgaaatggaaatgatgagatgagaagaaatgatgagatgaaatagatgaaatgactgacgactgacgactacaaactgacgactgacaactgactgacgactgacgactgacacactactgactgatcgactgaccactgaccatacactgacactgaaaatgatgacaatggaaactaactgaaaactggaaactgactgacgctgccggactggcactgacgtcgaccactgaagactgacaatgatgacaactgatgacgactgacactgactgacgcactgaacgactgtgactgaaactgactgacactgaaactgactgacatacaacatgacgactgaccatgacgactgataatgactggacactgggactgacgcctgacaactgaccgatgacaatgaatacgactgacgaatcccactgactgcctaatggaaaaatgaagtgaagaactgtacatggaatgcacgacgtgcaacgggacagcccttgcacaatcgcacctaggcgcaacgtgcaccaagcgcgagtgacggacacagcacgcccgcacccggcaaaatggcagcacatgaggggcaacgcacgacaacactgaaaacgcacggcaagtcgcgaacgccgaggaaacgaataaaagaggaccacgaagaacaacaacggaaaacaacaaacagcaacaagaaaccccccagaagcaacacagaccagacgaggacacacacagcaaagcagcaacccgaacagcacgaaccaaaacaccacacgaaaagcaaacaacgcaacaagagcaggacgaaccaaagaggcaagaaagcgaaacgcaaacggcaaaacaacacacaccgaacaaacagcgacgcgacgaacaccgc

SEQ ID NO: 694558 - DNA, 232 bp, Homo sapiens
  misc_feature (45)..(45): n is a, c, g, or t
  misc_feature (47)..(47): n is a, c, g, or t
  misc_feature (61)..(66): n is a, c, g, or t
  misc_feature (147)..(147): n is a, c, g, or t
  misc_feature (159)..(159): n is a, c, g, or t
  misc_feature (182)..(182): n is a, c, g, or t
  misc_feature (185)..(185): n is a, c, g, or t
gaatattagttggaagacttcacaaagactgctgataactatctntnattgataggaaatnnnnnntcttgatttctctgtgagaaatgtaatgctgacttttataaagcctggacttctactttatttaataattcattttttgcnttggtaaatganacatttccttggacatgtatttnatngcattaaatacaaaatttttggaaattcaggaaagttagcaattatg

SEQ ID NO: 694559 - DNA, 1054 bp, Homo sapiens
  misc_feature (34)..(34): n is a, c, g, or t
  misc_feature (348)..(348): n is a, c, g, or t
gctagctcttcacccagaatggagcttcgccttncgtcagcatccatgaaggtctctgaaaacattgatagactctcatgatgcatttccggctgcggatcacgtgcctacgatcgagtccccgagccgagaagaccattaggtatgctcgagctcgtctctcacatggcttcgtgatctgcgcagaagactgacttgcacacctggttctgctgggtcatgcgtatcaggtcgacgtagtgcttacgtgtctatgtataaatgcatctctgttcaccacggaaagagagcgcgacgcgcacctcagctaaggggcaagatctcacctcgcctatgcacccaggtgantccttcgcaatcctagaaggccgccgtcaatgtctccctccggtcctgcgcgtaggccaaggcctcgtctctgtagcggttctacctagggccattgtcatagcgagccctagcgtggtacccgactgcttatggccccacaagcgtgtgttggggaagcgcctacgtagagcggaatgggccttaggacgtagattcgacgttgagggcctctcgctttgttggcccttttctgcgaaatcgggccctcgaaattgccatattgccattgtgccgtttgggcgacctccgtgctaaggctaaaggctcgcaagaaggggattcgtactagggaagggatccctatgcttacatttgcgagggaaatggcgccaaatacactggaagtttgcccactttaagagggatagatttgcccaagacgggcattgaaaaataccacgtaacgcagtattatattctcacttccctgaggaaggtccccacgcgagggaactttgaccgccccaaaccgttggtagacgaggacagggccgcttgggcacaccaagggggcttaaattcgggggtattcgaaggttgaggcccatttgggcggtagctttgtgggcccgatgcgaacaagcgttcccaagagggcttgttcccaccatgggggcgcttttccttgtgggagtcgcaccgcacttttacaccggaggaaccc

SEQ ID NO: 694560 - DNA, 413 bp, Homo sapiens
gagatccgatcagtgcatgtgtgtgtgaaaagcgggttcagtgagctggctgtgtaaagtgtaatctcataaggctgcatgtggtgctggaggtgacatgttgacagaactgagctggttggctatgaggggtggtaaattcttgagcaaaagatgaagttgtgatgctgccaggggacagtgttgtctcagttgagcctggcttactgtggaaagttgttgattcctgactgaggcctgaggtggtggtgctggcagggaacgctgttgtgtgtgttgactctgcttggctatacaagctggtgggttctccactgatgctggagcttctcatgctggcaggtgagagtgtttggtctggtgatctggagctactgtaaaggatggtagattttgcacaatggcacgtggat

SEQ ID NO: 694561 - DNA, 960 bp, Homo sapiens
ggacgcgtgggctttttctaaaataggagatttcatgtttgcctgtatgtgctgctaattctataaaaacggaaaagtctgtaaatttgggttttgcttcattgatttctgaggtagaaaaccagataacctaggcaattgaaaacagccagatcaatgtcttttcttaatttataaataaatgatgatcattccattctgagagagtgtttcactcgagttcgcgtccacacgcgagcacagcctctttgcagctcctccgtcgctggtccatacccaccaccagttctccatggatgacaatataactgtgctccttgccatcatcaacaatggctccagcatgtgcaaagccggcttcgcaggtgacaatgctcatcttcccctccatcgtgggccaccctaggcactagagagtgatggtgggtgtgggtcagatggactcctacatggcgacgaggcccagagcaagagaggcatcccgaccctgaagtaccccattgaacaaggcgttgtcaccacctgggacgatatggagaagatctggcaccacactttctacaatgagctgcgtggggctcctgaggagcacctgtgctgctcacgaggcccccctgaacctaggcaacgtgaaagataccctgatcatgtttgagacttcaaacccagcttgtccgtagcatacaggtgtgctatacctgaaagctctggtcggtaccctggcttgtgatggctccgagaacgtgggtaccccaacttgtgccatctatgaagctatgtttttttacacatttgggctgaacagtggtggggacgaggagactctgagaactgcgagggtacttcttaccaggagggggcgcttataaaaacagggcggcgacaaagaaagagcgactctccgaaaaatggggccatataaaacgagcccatgggagcaacacaactataactgcatgt

SEQ ID NO: 694562 - DNA, 169 bp, Homo sapiens
actcaacggtttcgtatacatcgatcatacgtgcatgagacagaaattagcctgttagagttcagagcacgtgacactttcatgccttgtacaaggtagggtaaatctccagttcgtatttagtcaaagtactgtctttgtcctttgatcacacacaccccacccggcc

SEQ ID NO: 694563 - DNA, 283 bp, Homo sapiens
cggttttgttgcgtttcgcctgcacgctaccgctccgtagagatgatggcccaggatgtgccgcgccacgggcggcggcaccaggtcgtcaatggaaagtccagcggcgatccgctcgcgaatcgtcgttgacgacacgtcgcgcgtcttcgcctgcacgagcaggatacgcgtctgcctcgacaaatcggccgcctcgggtgcctcgcaggcgcggtactgcagctccggcgtgcgcgccaacgcctgctcgagcgtcgttcccggccgtgcgatcaccacg

SEQ ID NO: 694564 - DNA, 379 bp, Homo sapiens
  misc_feature (13)..(13): n is a, c, g, or t
  misc_feature (175)..(176): n is a, c, g, or t
  misc_feature (200)..(200): n is a, c, g, or t
  misc_feature (285)..(285): n is a, c, g, or t
  misc_feature (311)..(312): n is a, c, g, or t
  misc_feature (320)..(320): n is a, c, g, or t
ctcctagcatatnctggatgatttgttaaggtgatgatagccccaaaatccttccgaatgcctcatttttatcagcataatctcttttagcaggttgggcatggtggctcatgcctgtaatcccagcagtttgggaggccttgcttgagctcaggagttcgagaccagcctgggnnacatgacaaacccccatgtctgcnaaacatacaaaaaattagccagttacaatgatgtgtcccagctactctggaggctaaggcaggagaatttctggaggctaaggcnggagaattgcttgagcctgggaggcnnaggttgcngtgagctgagatagcaccattgcacttaagcctaggtgacaagaaaaaaaccttgtttc

SEQ ID NO: 694565 - DNA, 103 bp, Homo sapiens
tttttggggcccccctttggggggggggggggcccccccctttttaggggctttttccccccccccccctttcccggggccaaaaccccgtttttttttttta

SEQ ID NO: 694566 - DNA, 349 bp, Homo sapiens
agaaggttatgaaatgaaagagattgaccccactccccattactgtctgtataggtgcttacacttctgagacatacaaattgatatggaataatttgtgaaaatggaattgccttaaagaatttgaagtaagagcacaattctgggagtggagttcttagatgattcacaacattcctcttagaattaatttaagtattttgtttcactagggtgcaagtctatgaagttgtttatgccaccatttcagaagtcaaagcaccactattcattttacaacttctttctgcaaagcactgtaccaccttctgaatgtaatacgtagttgaataaaaaaattattcccgta

SEQ ID NO: 694567 - DNA, 267 bp, Homo sapiens
ggcccgctctccgacggggtgtgcagaatgaataggaatataaatagttgtaattaggctgggtgcggtagctcatgcctgtaatcccagtactttgggacgccaaggtgggtgggtcacaaggtcaggagatcgagaccatcctggccaacacggtgaaaccccatctccactaaatatccaaaaaattagccgggcatggtggcgggtgcctgtggtcccagctacttgggaggctgaggcaggagaatggcatgaacccgggag

SEQ ID NO: 694568 - DNA, 158 bp, Homo sapiens
cccctcgttggactatgtgatggctgctgtcaacctgtttgccctttacctacgtgtctgacaggctctcaggaccgagctgctgtggtcactattcctgcaggtctagtgcatgttccgcgaattcgccccactaagtctggcgatctaagatccag

SEQ ID NO: 694569 - DNA, 440 bp, Homo sapiens
aatgtcatcagagtggtccagtatagcagtgccccgagaagtctatactctgcacctaaaccccacagcagcccatccaccaaaggagccagaaagaaggagccagctgtacttgaactggagggcaagaagtggagagtggaaaatcaggaacatgttccaacctgatgatagaggacacagagctgaaacaggtggcttacatatacaagtgtgtcaacacgacattgcaaatcaagggcaaacttacctccattacagtagatcactgtaagaaacttggactggtattcgatgacgtgttgggcattgtgacgataatcacacaagtcaggatgtcaaagttcaggtaatgggtaaagtgccaaccatatccatcaccaacacagatggctgccatgcttacctgagcaagaataccctggattgtgaaatagtca

SEQ ID NO: 694570 - DNA, 121 bp, Homo sapiens
tcgaaggtgacggagcgtcgcgagcgctggtcaggtgaggcaggaaccgcagcacggtgccggccaggccgcagtcgacgacgccgccaccggcgaagttgctgggctggggtgatcctgc

SEQ ID NO: 694571 - DNA, 933 bp, Homo sapiens
gaagctatatccgcacgatgacgatatgctaagaaacaattagtgggctaacgcgctggactctacgcaccgacggggggaaacacaacatgggggggtcaaaaaataagagaggcggggctaactatatgcgcccgggggagaactttcgcccgccagcctaacactttggcccgccgttgcaggaaggtcccagcggtccaccgaagagaacagggaaaagaacccgagaacattgaagaagcctggactgtcaaaggtggacagcggggcggcatagaagcatataccgaccaggctggatacacagttaaaaagaccccgcgtgccctcatctagtaggtccagcttgcagccaccacctcccccaaacctcggggatggttgatcccccaccaaaagattccaagcggggctgcccacaagggactccaaaccagggggaagagtccctcttggtgaccaacgccacccctcaagggccacatcatggggaacgaaagaaggggccacacgactccccacgctcagtgacgagcgcaatgcccgtgagaccacgcccccccacgaagatttttgagcctcggggcggcttgataaaaaccacgcgccctaaggtaagctcactgtaacagttctcggaacacggggtcctgggactccccacctcctgcttcggagcaggtgtttattgtatcgagggcggtgatacgacagtgagacccactatggttaagcactgccacaagaacacgccgtggtttaataagtagagtcaacaagagagctgtttcaggcaacataatctaaatgacggtgagataatggacggtcggtcttctaaagcaagacagcctccagttttccatctctgagaaaaacctacaaaaaaaggagcccaaaaaaaagggcgcaaacccggggacaataaca

SEQ ID NO: 694572 - DNA, 106 bp, Homo sapiens
cggatagacaattcaaagttccaccacctaaatcatatacagcaatgactttgtcttctgatttgtctagaccataggcaagagcagcagctgtcgtggggtagga

SEQ ID NO: 694573 - DNA, 599 bp, Homo sapiens
aggagcttgagcccaagtggcctacaccggaaaagctctgggattgggacatgtggatgcggatgcctgaacaacgccggggccgagagtgatcatcctacgttccgatcctacacttggcatcgtcggctcaacatgaatggtattcacgagctactcagaacacagtcaacacggtccagtgtcagctcagaatgtggacagtctgaaaagaagcttatgagtggaagtcacaggctgctcagtgaggctgagtctggacacagaagacccttgtgaagatcttcctgccagacacagagggccacacctacgtggcctttattcgaatggagaacagatgatgacttcaccacctggacccagcttgccaagtgcctccatatctgggacctggatgtgcgtggcaaccatcggggcctgtggagattgtttcggaagaagaaccacttcctggtggtgggggtcccggcttccccctactcagtgaaagaagccaccctcagtcacccacaattttcctggagccaaccccaaaggaggaggggagccccaggagccccagaacagacatgagacctcctccaggaacctgcgtg

SEQ ID NO: 694574 - DNA, 389 bp, Homo sapiens
  misc_feature (359)..(359): n is a, c, g, or t
ttcggcacaggaatattttgaatgtcaaccctgccggtaagggataaggaactggtccttgatgtaccaagtgatgaggagtcaaggaaaggagaaagcaggtattttccaccaacaagctatattcgcagcagggaagattttaaggtagggctggatggtctctgtcagccacctcccacctctcaggtaccctctcatcccttttcaccaactctgtgtgccatagcagggccttgttctacaactttctcaaacatgggtctgattaacttatgaccttatccattactcttaaaatgcaagcaacgtggatttttcaagcctctcccagagtgtccagaactttataggggatncacagactaagaacagggaccaaatttgtt

SEQ ID NO: 694575 - DNA, 169 bp, Homo sapiens
  misc_feature (56)..(56): n is a, c, g, or t
  misc_feature (101)..(101): n is a, c, g, or t
  misc_feature (153)..(153): n is a, c, g, or t
tagtcgtctttatgaagcgtcaaaagtaatgggctcatacacctgattgccttgtngatcttgccattaccggcggtaggctaagagctccccttctaatnccagcattcgccttaagacagggtcctctaatagctgtagctggagtctccnttgccttttttgccta

SEQ ID NO: 694576 - DNA, 397 bp, Homo sapiens
gtcttttctgctcccgtagaacctcaattttagctggacagcattaggatggactttatttcccaggctccctcgtagtagatgtggccatgtgactaagttcgttgtcatgggagctaagcataaatgtgtacacttctggatcatgcctttgaaggaagagatgtggcctccattgtcctttactcccatttccctggctggaatacagaccttgtgattggaactggagcaaccatcttggggccatgtgacggaggctgcctgattattcaccgtgcagaaaagaccaggagcctgggtctctgatcatttgccgaaggcctgttgccgttcttggacttgtgggctttcttagaggagaattaacctctgttctccttaattgctgttattt

SEQ ID NO: 694577 - DNA, 1030 bp, Homo sapiens
  misc_feature (232)..(232): n is a, c, g, or t
  misc_feature (244)..(244): n is a, c, g, or t
  misc_feature (255)..(255): n is a, c, g, or t
  misc_feature (270)..(270): n is a, c, g, or t
  misc_feature (295)..(295): n is a, c, g, or t
  misc_feature (301)..(301): n is a, c, g, or t
  misc_feature (304)..(304): n is a, c, g, or t
  misc_feature (311)..(311): n is a, c, g, or t
  misc_feature (314)..(314): n is a, c, g, or t
  misc_feature (322)..(322): n is a, c, g, or t
  misc_feature (330)..(330): n is a, c, g, or t
  misc_feature (340)..(340): n is a, c, g, or t
  misc_feature (342)..(342): n is a, c, g, or t
  misc_feature (358)..(359): n is a, c, g, or t
  misc_feature (363)..(363): n is a, c, g, or t
  misc_feature (380)..(380): n is a, c, g, or t
  misc_feature (382)..(382): n is a, c, g, or t
  misc_feature (402)..(402): n is a, c, g, or t
  misc_feature (423)..(423): n is a, c, g, or t
  misc_feature (447)..(447): n is a, c, g, or t
  misc_feature (452)..(453): n is a, c, g, or t
  misc_feature (458)..(458): n is a, c, g, or t
  misc_feature (460)..(460): n is a, c, g, or t
  misc_feature (464)..(464): n is a, c, g, or t
  misc_feature (493)..(493): n is a, c, g, or t
  misc_feature (516)..(516): n is a, c, g, or t
  misc_feature (529)..(529): n is a, c, g, or t
  misc_feature (596)..(596): n is a, c, g, or t
atattatgatcttgctgcagccacagtgcagctccacattaactctacagaccaaaccatttgtatctggcatcacttactaacacacgacatgcggcttttctgcatcaactgctatgacggttaagaatgtcagtatacaagaaggaatagaaaactgatactgttttaaataatctgtaatttcaatttttttttttttggctgaaatactttatatggtacgttgganataattctagtnacaaagtatantaaacactagatgtntaataaaccctttaaatcatgggtnagtgtncangtggggnganctgaagcntttactgngacaaagtantngttcactctaagggtnnactngctcgtgcgttgccacncngtgtataattggcttcattnccttgctattggatacatagngtgcattctctgtcactgtacctntggtnntgcanantttntcatcttactggccaatcaaaatgacttngataggaatgaactccagaggcngggcctgaacagngaggtggtcgctcaggcctggtgctcagtcgtacgacctgtacctctcaactttggccctatctgtnaaatatatgctatgtcaataaacggctttaaataaaaaaaacacaacaccaaaaaacacaattttcggcggcggcacgacggccggagagagagtcttaaaaccaacttcgcggcggcgccgggcgcccacagtgggttacggcactgcgcacacaggcgtcccgaagaaaaccccggcgcagaacacagggcgggcgtctctcccaaaaaaaaagcccgcggggaccgcgcggttcgaaccaaccacagggccttggggcacaaggtcgactcccacggcacagaccaattataccgcccggacgacggagaccacaacacacaacgcaagccacaacacagtatcaacaatcaccaacagcatgacagccaacacaaactcccccacacaccacacgaccaccacacacggcacccagacactacacgacgc

SEQ ID NO: 694578 - DNA, 248 bp, Homo sapiens
tccagtacccgagcatgcatgcttgcttgcaggtcgacgtgtatacagcactggggtgcatgcatccctgaacaagttccgtcgacacgtaagccacgtgttgagctccaaatatcggaaagctggagcctggtcgacgtgtattcaccactgggggtgcattgcctccccttgtacagttccgtcgacacgtgagcaccgtgcttgacctccaaatatcggttcaggctggagcctggtcggactct

SEQ ID NO: 694579 - DNA, 377 bp, Homo sapiens
  misc_feature (329)..(329): n is a, c, g, or t
  misc_feature (361)..(361): n is a, c, g, or t
  misc_feature (367)..(367): n is a, c, g, or t
tgtacccattaaccatcctcacctccctacccaccccacccctattacactacccagcctctggtagccatccttctactctctattttcatgttttcaattgttttgatttctagatccaaaaataagtgagaacatgtgatgtttgagaccagcctgggcaacatagtgaaaccccatctctaataaaaatacaaaaaattaggctgggcgtggtgggcaggcgcctgttaatcccagctacttggggagggctgaggacagggagaatcactttggaacccggggagggcgggaggtttgcagtggaggccaagattcatggccantggcacttcccagcttgggggttgacagtggngaggantccatcttcc

SEQ ID NO: 694580 - DNA, 277 bp, Homo sapiens
tcctacctacgcactaggacagacccctatgtagagaacaacacacctgcccatacttagctctgcaagtgctactataggggtctagcctattctccctggagcttattttcctagctagcactagtgtcctaataggcaggacactaatgcatcagactgtagcagttggactcaagcagagggaaggtcattatagtggtaaaggatggacctggattcaatactaacaggtgtcttgcgcacatgatgtctgaagtcatccgaatccaccagg

SEQ ID NO: 694581 - DNA, 117 bp, Homo sapiens
gtttgcacggcagcatgttagtggagttgcagggcactggcagtggcagcagattgggtaggtggagttgagggagcatggggtaggtggcagttgcagggcaactggcagtggcag

SEQ ID NO: 694582 - DNA, 475 bp, Homo sapiens
ctactactactaaattcgcggccgcgtcgacgtaattttgtttatagcaagacttggttaacaatcgtgcccctcctctatccccaccctggtcatttgaaagcattatgcctagcataagtccctgtgagatttatacatagcaaagagggatctgaaggactgaggcaagccactaattttaagcagatgattccttaaacactttggagaaatgagaaacagcatgataatcttagtgtaaacattgggctttgaaacataaagttctaaaactgatggtctcattgatttcccaactctgaggttcttggagcttggttagccacagaattgggcacattaaatgttatttcgcatgtgtattgtaaaccattttgagcttgatggaaaaggtaatgtaaaaactaaggatttaaaactgcaatgtcattttcgtttttaaaaaccccacattttattgtcattaaccata

SEQ ID NO: 694583 - DNA, 321 bp, Homo sapiens
  misc_feature (177)..(177): n is a, c, g, or t
gtgagcccatttagaagtagtcttaggctgcctgaggtggaacacgcctgcaatcccagcactttgggaggcgaaggtggtcggatcactcgaggccaggagtttgagaccagcctggccgacacagtgaaaccctgtctctaataaaaatagaaaaaattagctgggcatggtggngcacacctgtaattccagctacttgtgaggctgaggcatgagaatcgcttgaacccaggaggccaaggttgtagtgaactgagatggcgccactgtattctagggcgacagagtgagactctgtctaagaaaaaaaaaaaagaa

SEQ ID NO: 694584 - DNA, 707 bp, Homo sapiens
ggaggggttgactgaggcgtgcgagccttagcttactcccgaaagccgacgctgaggacacgatgtcgcggtctcccgctcactgcgttaggggcgccagatgcctgggtgtgctctgagtgctgtccgcgggacagatgaacacgatcgcagcacccgatactgttgacagacttgttagacgccccatcttccaaaggttaacctcgtgtgcccagagtgagcagtacccttcccagatgtgtcactctatctcccgggcaccaaggagataccctgtgaatggttctgataaacacgctgactgtgttgccatgtcatttaaatggttacgacggttagtaacctactcaacatgcatataggggatgagacatgtgcgaatgatgatgagataattttggttgaacattagattgaaaaagttagagatggtccaaagtggggaaacacagacgtgagtttctcgttccgtataccacgagggcaaatccaagatggccaacaggacacaatgtctaacaagcatacacccgcacagggttcagaccgtcccccatttttaacaacttgccaaagaacagtttactatcatcgggggtaatgaatgaaataacaactgttgaatgcagaccttcaaatctgtgcgaaagtctagctttgatgcagggcagtttcctggcaggaatggtctggctggactgtga

SEQ ID NO: 694585 - DNA, 1321 bp, Homo sapiens
agctatggaggatgaggcgcaggcccagagggagagctcagctgataggggatcagcgctaagaaagtgggggaagggagatgcatgtgtacataggtatagtgggttataaatttcgtctaagattatatgagagaagtcagcggggtagtaagagtgtgagtaagacagggcacaggcaagctagtgttcaacgagagcgatgtgcaaggaatagttcttgtctttcctcaatgggttgtggagagttctgttggacattgtattagttgacttaggtagtgcatgggatcgcaaaagtggttaccccatttggtgaaagtaggctgtcaggtgcataaccaagggtatcacctaggcaggatagtggagatgagtagaaggggctgagtgccctgtgcgctagttatacgtgtgacgcctgggacttagatctgtaagtgtcctcactggccatatccgtgtcgacttcatatgggaactaggcaaagagcctataacattgtcgcccaggtgaagtatgtgatgagcaatagaggaggagtaggaagacatgggcatagaaagtgcgggaggacccagactagtactgccagacggtcgtgtgtgtctatggcgaggaaagtgcgctatggggtggggcattcaacctgagcagatgcagcattgtaggaggagtgaacggtcacatggctgaggctggtggatgtgactgagggttgactataaaggaataaagaccctggggcattggacaaatggggcccatggtagtagaccaacttggaactgtggggggccaaagtctcctggggttgtgcccaccgggggaacagcgctcccaaactggagagagaccgtccaatcctgcaaagcacagcagagagattacaagggggcaagcgaccccttgcgactgtggacagcacactgtgacaacgcagtttatacacggttacccgcccagcgggtcccccgggcgatcgaggggcccacacaaccacgcagggggggcgccaccgtggaaggacaccccacaaaagagcagagaaaaaaaacgggagagggaaacacgcgagcgagagacaaccccacacgagatatgacgatgggaaccaacgacgggagcgggggaagagacacaacaaggaggacagcagggcggtgagacagcgagcacgagacagcgcacagacaggcgaagagacgaaacaaaaggatcaagcacgcagagaacgccagacacgggtagcgcgaccgccaccagacaggcagaacgggcagcacacgagcgagcacaacgccgtagtcgggaccgagc

SEQ ID NO: 694586 - DNA, 489 bp, Homo sapiens
tagaggatcctaatcagtttacacaagttccactcaagggatgcaaaactttgtgcccagatcagctgcagacgatgaacaaagactttcaaatttcaagtggaaattttaaacaagtaggatcaagaccctgaagcatttctgtgaagaactataacaggagatgaaacatggctttaccagtacaatcctgaagacaaagcacaaccaaagcaatggctaccaaaaggtggaagtggttcagtcaaagcaaaaacagactggtcaagagcaaaggtcatggcaacagttttttgggaagttcaaggcattctgctggttgactttctggagaaaccaaggaaaatactgcttattataagagggttttgagacagttaaccaaagctttggcaggaaagcttcaccagagagtcctttctactgcaacaatgctcctgctcattcctctcatcaaacaagggtaaatttgaaagtttcagtgggaaa

SEQ ID NO: 694587 - DNA, 1084 bp, Homo sapiens
  misc_feature (3)..(3): n is a, c, g, or t
  misc_feature (47)..(47): n is a, c, g, or t
  misc_feature (60)..(60): n is a, c, g, or t
  misc_feature (69)..(69): n is a, c, g, or t
  misc_feature (74)..(74): n is a, c, g, or t
  misc_feature (81)..(81): n is a, c, g, or t
  misc_feature (93)..(93): n is a, c, g, or t
  misc_feature (113)..(113): n is a, c, g, or t
  misc_feature (217)..(217): n is a, c, g, or t
  misc_feature (237)..(237): n is a, c, g, or t
  misc_feature (249)..(250): n is a, c, g, or t
  misc_feature (256)..(256): n is a, c, g, or t
cgngtagcgctcgtctccgtcgcctccaacccccccggtccgaccanggaaggtgggatnctctgatgnccggncctgcgngctgagctggcnggcggcggcgtgctctggcngccgcatcgctcctgctgcgtcgtgaggacccggggccgggggctggcccagcatggccgaaacagaagccctgtcgaagcttcgggaagacttcaggatgcanaataaatccgtctttatttngggcgccacggnngaaacnggcagagtgctcttaaaggaaatcctggagcagggcctgttttccaaagtcacgctcatgggccggaggaagctcaccttcgacgaggaagcttataaaaatgtgaaatcacagaagtggtggactttgaaaaagtgtggatgactacgcctctgcctttcaaggtcatgatgtggattcctgttgcctgggtaccaccagagggaaagctggggcggagggattgtccgtgtgacccgagattatgtgctgaaagtctgcagagtttggccaaaagctggagggtgcacaaccattttcaactttgctatcctctaaaggagctgataaatcaagcaatttttatatctacaagttagggagaagtagaagccagggttgacagacttacaaattgactcgtactctgtattaggcctggagtctgtagtgtgataggcaagaatctcgccccaggtgaatggctggttagaaagttctggctccttacagactcttggccagggggcatctgtggcctgtggtgaccggggttagagcaatgctgaacactgtggtgagaccaggagaaaagcagatggaactgctggagaacagggcatccatgacctgggaaaagcgcatggtctctcaaagcatgacacactggagaatggtttaatggtaaccttacacccatcacaaatgcgatccgggctaaaaaagtcagaggttactttgggtacaatctcaggccatcaacagaaagagggccgccacgggacagcggtacataaaaccgggggtggaaaaaatggccctcacggacaaagggggccacggactttc

SEQ ID NO: 694588 - DNA, 257 bp, Homo sapiens
cccggcttattctctgatcgctccacacacacacgcagtatacacatatacaccctaaggatccaagtggaatacgtgaaaagaacatcacttccttgaaacttttattaaaaaacaaacaaacaaacaaaaagcctgtccacccgttgagaatccttcctctcctgggacacgtcaagtgtgatgtgtagatagaaacctatctcactgctctgctggctccagggatttcgtgtcacatattatatgcacgtggg

SEQ ID NO: 694589 - DNA, 329 bp, Homo sapiens
aggcccggggggccccaaaatttttttcccccccaaaatttttttttagggttatggaaaagggggccccttttttgggcccccttaaaaggtcccgggtgggcccaaggaaaaaacccggggggttggggccaattaaataaggtccaacccccggcccccccccctttggcttgaaccttggggggttggggggcctggttggttgggggggggggggttccgggcccctgccacccaaacggggccccttaaaagaaaaggaattgtggggattttgggggttttgggtggattccccttgccccttaaggccttttgggttccca

SEQ ID NO: 694590 - DNA, 209 bp, Homo sapiens
agcaacagtgtagatagtccgaggatgttacgctctgctagactaggttaggggtgtagagcacctgcagtagtagtagactgtacagaggatagtaacgctactatgctaggctaggttggggtagtgagcacctgcaagtggtagtagatagtacagacggatagtagactctacctgactagacgggatagggatagtagagcacc

SEQ ID NO: 694591 - DNA, 843 bp, Homo sapiens
tgaagagcattttatagccttaaggatattccctgggggctttaaggcgaatttccgcgatagatttgtcgaagggggaaaaacagttgtggtgcgaaaaacccttgctagacccatttgggaagtcgtccatattggagaaaagtcgttatatcaaggttcgggtctgggaccccgggtgtttaataataagagcgtatatatgcgcttttctttacttattcggagagtggttgtcgaaatcgcctaatatcatgtttggaaatttaaccccttgtccagaaaggttggttttgccagaataataatgtttctccatattctgccaggttgtgtccctttacgtctggttccatatatatttttgtgagtttatgccagaagaactttgtaggatttcgatagtgaataccccagatttggcccaatatttgcttttgttgcttgtcaatattgggggacaataacaccccatagattgagttttaagccccaagggctgagagaaagtcgatttgggtgcactaattataaaaaatcccttcgcccagatcccatattatggaggtgtttttttctagggttttcctttctggtgaaagtttatagtgttcaacggtgcttaatgtttaaagtctttaaaccacttttgaagttgacttgttttaacacaaagtgtgagagatgaggggttctaattaatattttttttttttgtaaattgaccaattatagttgtaaatatttatgggggacaaagcaatgttttggtttattaataccatgtggaattattaaatctaggttgatattaaatccataaaattgacatccatcacttta

SEQ ID NO: 694592 - DNA, 231 bp, Homo sapiens
agtccccatagacgtgcacgcaaggcacagggccacgcatgggtggggtctggcggcagtgaaaggtcacagatttgcagcaaggctacggagcagctgcagaagacagctgtcggcaccggagtcactgctgctgcttatgtctcccagcatggccttcagggtgcacagccgcaacggcaagagttacacgttcctgatctcctctgactatgagcgtccagtgtggag

SEQ ID NO: 694593 - DNA, 329 bp, Homo sapiens
catggaagatgtttacggcacagaggctgtagttgttcacatcaccactctaaagaaatgcagaaacgaaactgaaaagcattcagagtcttacaagtttctaggctcctgtttcaatgtttattccacaaaagggagaggaaaatatacaaaatatgtagaatgcatatcaatcatatttatttggtatgagctaagctctgctggagaggaagttcttggctattattaagtttgtgaatttttcatttattcatatgattcttatattttactacagaataagcgatcaggccaggcatggtggctcacacctgttatccactgta

SEQ ID NO: 694594 - DNA, 504 bp, Homo sapiens
  misc_feature (296)..(296): n is a, c, g, or t
gggcagcctgcgtcgagggggggcgcgggaacgagcggcgggcatggcgggctcgcgggcccggagtgtcgcagactgggtgctctgtgtcccggaggatgccattccggctacctttcttcactgcggcggctctcggcatgcatggtttccgtggcactcgcgctgttcccttgcgtgcatgcaggccccgtggcggcccgtcgggcgcgtcactgctgagagtctcggagcgtcgctttcggcacactggtcatagctttgacaaggctgggtagaccctagcagtctgtggntcgtagcgaagcaaatcgccaaatctgccgcgtggctgtcctggacggccggcctaatccatgcgaatacctgggggcggcctatttggctaggtccaaaagtttcagaggtaggagaccggtgggcacgcgtgccgcacagctgggtatcgatcgaccgtgatcttcagccagcttctccgctatcatcttcctgtcattcgaggcg

SEQ ID NO: 694595 - DNA, 132 bp, Homo sapiens
ttgtggcacaaaataaaccagattacacaaccacgccttactttatcaaatgtataagaagtaaatatgaatcttatatgacaaaatgtttcattcattataacaaatttccaacaatctgtcaatcataat

SEQ ID NO: 694596 - DNA, 752 bp, Homo sapiens
  misc_feature (159)..(159): n is a, c, g, or t
  misc_feature (290)..(290): n is a, c, g, or t
  misc_feature (292)..(292): n is a, c, g, or t
  misc_feature (734)..(734): n is a, c, g, or t
cccaggctggagtacagtggcacgatctcggctcactgtaacctctgcctcccgggttcaagtgattctcctgcctcagcctcccgagtagctagaactacaggcatgtgccaccacgcttggctaatttttgtatttctagtagagacggggtttctncatgttggccaggctgttctcaaactcctgacctcaggtgatccacccgcctcagcctccctaagtgctgggattacaagtgtgagccaccgtgcccggcctaacttaggtcttttatttactgacacatncnctgcataccttataatgcctggcacatgttaaatgatgaataaaagaatgctatgcttggctgaactgaactaagaaagatattcatgttttcattttagatccaagaatgtaagatattctgtaatagaagaaaaaatgattatataaaaactggactgggataaaacagtaacttatggagtttgtgtggttcttgatcaaaacaaaagtcatgggaaaaaagtcttacttttaaagacttggatttggctaaaccccaaagatgggattcagtttgatctgagtcactattaataaggggttccagcatataattagccctcatagaaaactcaatgggggcaggcgcaaagggtcatgcttgaatcccagacttttggaaggccaggggggcgacccaggtcaggaaatggccctcctcggtaaaatgggaatcccgntttactaaaaaaccaaaa

SEQ ID NO: 694597 - DNA, 923 bp, Homo sapiens
gattgacacctgagccccaatgccagtccgagcttagtagcaatgacaaccttagatgaacccatttaaccagaatagagtatagtgggaagatgaagtcgaatgctggtgccctggatatcgatacgcgcattcgagggaaagatgacaaacatgatagaccagagcactagatatagcaatatggactaatgctcgcgtattcctctctgtcttaattggaatttcatctagatgatacatcttccgcaatggggagccgaatgctatagacccgcacgaaagtcctacgtagggagctatccgtaagaagactacgcttgaagagagatgcaccaagccgatgctgagtggttgcaatgctagattggggcacgcactttcctatcgagtagaagaatgcagtaccgaatgattatcagaggccgtggtgattagtgcgtgagagttggtccccagagcgattgagaaatgctttcaagtgtgcgaagcttgtttcatttgttgcccccgcgatgccattctctgctagaaattcgctccgtgttgttaaaatttttcaagctttgtttagttcgcaaacagaaggaaacaaggcgtctgttgggagcaacttaaggaagacaaaacctctttgtacgaagaggaagtaaacaaatcagttgtaggacaaccccaattagataggggggcgttagagaggcaaggccacccaaatgtagaggaatagcggtttccaacgtctcaaatgcacactccacgtagcctaaagaaaatgccagtggacaatattaacttgaaatgtttccgtcaaaagccccaattggaggccaaatctattcaccccttatttgttaaggaaacctaaagtgttaaggtattacagttacaaccatggaagaacattgcttcctttcccgcca

SEQ ID NO: 694598 - DNA, 989 bp, Homo sapiens
  misc_feature (1)..(1): n is a, c, g, or t
  misc_feature (70)..(70): n is a, c, g, or t
  misc_feature (88)..(88): n is a, c, g, or t
  misc_feature (148)..(148): n is a, c, g, or t
  misc_feature (150)..(151): n is a, c, g, or t
  misc_feature (396)..(396): n is a, c, g, or t
  misc_feature (491)..(491): n is a, c, g, or t
  misc_feature (582)..(582): n is a, c, g, or t
  misc_feature (629)..(629): n is a, c, g, or t
  misc_feature (639)..(640): n is a, c, g, or t
  misc_feature (646)..(646): n is a, c, g, or t
  misc_feature (689)..(689): n is a, c, g, or t
  misc_feature (697)..(697): n is a, c, g, or t
  misc_feature (708)..(708): n is a, c, g, or t
  misc_feature (717)..(717): n is a, c, g, or t
  misc_feature (725)..(725): n is a, c, g, or t
  misc_feature (739)..(740): n is a, c, g, or t
  misc_feature (749)..(749): n is a, c, g, or t
  misc_feature (754)..(754): n is a, c, g, or t
  misc_feature (773)..(773): n is a, c, g, or t
  misc_feature (777)..(777): n is a, c, g, or t
  misc_feature (802)..(802): n is a, c, g, or t
  misc_feature (805)..(805): n is a, c, g, or t
  misc_feature (815)..(815): n is a, c, g, or t
  misc_feature (817)..(819): n is a, c, g, or t
  misc_feature (834)..(834): n is a, c, g, or t
  misc_feature (843)..(843): n is a, c, g, or t
  misc_feature (846)..(846): n is a, c, g, or t
  misc_feature (851)..(851): n is a, c, g, or t
  misc_feature (855)..(855): n is a, c, g, or t
  misc_feature (873)..(875): n is a, c, g, or t
  misc_feature (877)..(877): n is a, c, g, or t
  misc_feature (881)..(881): n is a, c, g, or t
  misc_feature (884)..(884): n is a, c, g, or t
  misc_feature (889)..(889): n is a, c, g, or t
  misc_feature (900)..(900): n is a, c, g, or t
  misc_feature (925)..(925): n is a, c, g, or t
  misc_feature (928)..(928): n is a, c, g, or t
  misc_feature (977)..(977): n is a, c, g, or t
ncgagtgtgttctctaccatgcggtaatgctttggtactattcatacagggtcttgcctatcctaaaganttgccatttccccaagangagctttgattctgctttagaagttttacataaattaaaatctttatcaaatattaatangnngggaggcacaggatgcaacatatatagtcaagttacctctctgtatatttagaaattactttctcctccaaggtatttgcaacagaaagctcagtctgtcctgcttaataatcagtagtacaggtgtgaatcatcagaagcttggcaagaccttaatatttcaaaattattaacaactacctctaggggcaagttcatgttactgagttatgacaaatttattatcatgagggaaaacaagagtngccagccatcttaaaaatgccccaaccactgcttctcaaaacagaaagactaaaaactacatacagtttatcatacaacaaatcccatctctgtnccctgaaattcccctagtttcattcattagaaggggattaaaaaaaaaaagacttaaagagcactttacagcagcattcagctttcctatnaaatactcagcatcttaaatattatatacaactctttttttattaanctatacactnncttcanatttttttttatttttttaaatcaacccattcaaaactactcnagaaattntcttttggcanaatatcatntatccaanttaaaaataagatnntcatttaanaccancctttccaacttttttaancccntcttctactaaaactaaaaaattanccnggtctggttncnnncacctataaacccanctacttttnatncttangcangagaatcactttaacccnnnanactnaanttcanttatccaatancactccacttcactccatccttttnaanatatcaaaacccttctcaaaaaaaaatattttattttttatcttttttnttttcaaaatca

SEQ ID NO: 694599 - DNA, 282 bp, Homo sapiens
cccccccccccccccttttttttgggggggggggggggggttcaaaaattttttttttcccgcccccccctttttttggggaaaaaaggggggttttttaccccccccctctttcccccccccaaggggggggggggggtgttgtgggccccccggggttttttttttgggggggggggggttttattttttttttttttaaacccggcttttttttgggggaccccccccccccaatttttgcccgggtttttgggccccccttaaagggtttttggggga

SEQ ID NO: 694600 - DNA, 235 bp, Homo sapiens
agtgcagtgtcgtgatcacagactcattgcacgctcaatcccctaggctcaagcaatcctcccacctcagcctcccaagtagctgggactacaggcatgcgcctctatgcctgactaagttttaaggtttttttttttttttttttttttaaaaaggggccttcccttttttgtccccaggcgtgctctcctcaagtggaggtctccccattccttatatagggagaacacaaaa

SEQ ID NO: 694601 - DNA, 211 bp, Homo sapiens
tggaaaacaagcaataaaataagactggattcgaactccagatgtgctgttaatattgaacagtacactccctgaccatgtgttaatcctcttttactaaataaaacagaaaggcgcttaaacaactttattaaactttatttgaaaattatcattagtgtttcttttcgtttttctcttgaactgaagaagagtcacacttttggtacca

SEQ ID NO: 694602 - DNA, 481 bp, Homo sapiens
acggtccacggaactttgatatgaaaagaagtgacaatggaattgaattgaagtgtgtgtatgtattgggggagcctgaaaatatggggaaaacagatataggcctataaagcattgtgctttgtgtctattttatgtagagatcaatagtcctacatacctgagcattctttgagtatgtgacagcctcagattgactgatgttgtcacaatgatgaagtggagtcatccaaaaaccatttaagaaagcagaaagctgggcatgatggcatatgcctgtagtcctagctgctcaggaggctgaggcaggagggttgcttacgtccaggagttcgagtccagcctgggtagcatagtgagaccttgtctctaaacaacaccaccaccaacaacaaaaagaatgcagaaaattaaatgttagcttagctttccattaaaatggttaaattacaaaagttccgttgaagccgtcgggtaccga

SEQ ID NO: 694603 - DNA, 90 bp, Homo sapiens
gggcagagtcacggcacgctcaaggctcctccacacacagcacccgctgaaccctgatgcaccctgatgctgctgagatggggcgggccg

SEQ ID NO: 694604 - DNA, 768 bp, Homo sapiens
ggtatacaagtatctgtttgaatcctactttcagttcttttgggtatatacccaggaagtagaatctctggatcatacggtcattctatttttacttttttgaggactaccaaacggttttctgtagcaactgcaccattttatattcccaccagcaatgcacaaggattccaatttctccacatccttgccaacatttgttattatttatttatttattgagatgaagtctcgccctgtcgccaggctggagtgcagtggcgcgatctcggctcgctggaacctctgcctcccgggttcaagtgattttcctgcctcagcctcccgaatagctgggactacaggtgcctgccaccatgcccagttaatttttttaatatttttagtagagacagggtttcaccgtgttagccaggacggtctccatctcttgacctcgtgatctgcccgccttggcctcccaaagtgctgggactacaggcatgagccaccgcgcccggactagggttttttaatatattctagatattaatcccttatcagatatgtgatttgcaaatattttctcctattctgtgggttgtcttttcagccctcttgatcatgctctttgatggtacaagacattgtagttattaggtgaacgtacaatttatctttggttatataatggtatggagcatatggggcatatatccaagaaatttttaataaaatccagttgtaatgaaatttttgcgagtaaattaatgtaagaaggtttaaagg

SEQ ID NO: 694605 - DNA, 1441 bp, Homo sapiens
  misc_feature (314)..(314): n is a, c, g, or t
  misc_feature (368)..(368): n is a, c, g, or t
  misc_feature (416)..(416): n is a, c, g, or t
  misc_feature (496)..(496): n is a, c, g, or t
  misc_feature (627)..(627): n is a, c, g, or t
  misc_feature (1347)..(1347): n is a, c, g, or t
  misc_feature (1409)..(1409): n is a, c, g, or t
  misc_feature (1411)..(1411): n is a, c, g, or t
  misc_feature (1413)..(1413): n is a, c, g, or t
ggcccaatggtgcgcccccgctataccgcgtcccgtaaaggggaaaccagccacccctgacaactcagagccaccgtggacagaccagaggctaaaagcacctctcgctcggcctgctcaccctacgcaccaacccaaccctgcgctacaaaatctatgagagactaacaggtcggggtacaaacccccgccacccctataccgccagccgccacccccacgcggcacagacgctaccctcagcccagctataaccagtatcagcagtgatggcccagcagtggaaccacgtacctactcagaaccacgggccnagatggccgccatactacgggaactacgactacgggagcctactccgggaacancacagggtggcacaagtacacagtagccagtgtgacccagaggctccncggaggcccctgccggcgttccgtccaccgagcgcctgccatcggcccctcctcgtgcccccagccagatcccgtggtgnctgggcgatggggtcatcccagggctgccatccctaccagcccactgcctcccctcatgaggggcttccttcccctccatagggccaggcatttttttctggaattcaaacaggcaacaatgaccttttanttttctgtttgtccccacctccccagccttccacctcctgttcttcctaccttcttcctttttgactaaataatccccacctcccttgatcatacagtgaggctacagtgactgaggggagaatcccctcctgttcactctcccaaccctgctccagcccctcagcttcccagaccctcatgcagttggttgtaaattctcccaggagctgttttactgtctacttttcaggattaaaaaaaaaatcaaaacttaaaaaaaaaaaagtttaaaaagcaaaatggggagggggaggaagcagtgactttttttgggtaattatgcgcttttttttaatttttagaattggtctttttactggtgggtgggctgttgatatttcatcaagataagcatttctttcctgagttcaggtgactgaggaagagccacaaaacaaaacacaacaaaaccaaaccacagaatcatctttaacccaactttttatacgatgccccagttccccataactttgcacacaagcttctgtgttcagtggaatcgtaactgctttggtattcggagagagtgactatggaacttgaaaccttttattccgggcgtctgggagtactggggggatccagggggtgagagggaagaagggaaggtggggggctccttcccttcagaacttgaagtttctcccagtgctcctctccaagtggtctcccagggtgncagacccaaaagttttcctacagtgataccctttatttttacttccccttgactcatatgtntnancatgatttaacacgaggcccttattaga

SEQ ID NO: 694606 - DNA, 391 bp, Homo sapiens
  misc_feature (373)..(373): n is a, c, g, or t
gtgcaatacggctaatgagtcgttttaattgccgcataacacggcactcgccaaccaattgttcaatatgcggttcatcaggtgcatttgctacagaaaaactggtatgcgattggtgaaacgccattaaaaataattgtcggccctgaatgttatgcaattgaccaatgattaattcacttttatcgtcccatgaaacaatatgctgcatatgtccatgggtaaaattactctcaaatgttaatggtctgaaacggataggttcccaataatattattttgcacaacaccaagtgtttttaaggcagtctgattaacaaactgacccgattttcatcatctacaactaatacgccctgatccatattatcgntcatggtcgaaaatattt

SEQ ID NO: 694607 - DNA, 184 bp, Homo sapiens
  misc_feature (90)..(90): n is a, c, g, or t
  misc_feature (119)..(119): n is a, c, g, or t
  misc_feature (150)..(150): n is a, c, g, or t
  misc_feature (175)..(175): n is a, c, g, or t
ccatcactcactctcttctctacctaaccacttaagaagtaaatggaggaattgagataatccagtgtgaaggatgataaaaataggttnagagtgggtccaatcaggcattaaaaaanatagttatgaaaggtaaattaggatcagttncaagagtttggggacctaaaacaancccaaatta

SEQ ID NO: 694608 - DNA, 375 bp, Homo sapiens
  misc_feature (51)..(51): n is a, c, g, or t
accggcacgctatccggttcaatattcaaaaaatcaattaacgtgctctantaacaccctgagtacaaattaatagataaacagtggtttctagcctgggcacggtggctcacgcctgtaatcccagcactttggggcctgaggtgggaggatcacctgagcctaggtgattgaggctgcagtgagccctgattgtgctaccgcactccagcctgatggatagagtgagaccctgtctcaagaaaaaaaaaacaacaacagcagcaacaaaaaaacccacaaaaacaaaagccgaaaagaaaaggaaacttagttttatcttgacaaagatatctaatttgcttctaagctttttaaattgaaccggatagcttg

SEQ ID NO: 694609 - DNA, 87 bp, Homo sapiens
  misc_feature (36)..(36): n is a, c, g, or t
  misc_feature (51)..(51): n is a, c, g, or t
gatcaagttgccatgaaaaaccatctactatatgtnagacatgacattctntttctctccttcctgaaaaataaagtgtgggaagag

SEQ ID NO: 694610 - DNA, 321 bp, Homo sapiens
ctgaccaccgaccccagctgcatgcctttgggcaacgcctccagggcgatcttgacctgcacagtgccggtgttggccgccacggcgggcgtcacttcgcgaactttgccctgggccttgatgctggggttatccagcaggctgacggtgatcggcgcatcaggcggcggctccaccaacaacgactcatagacgttgaacaccgcatcgcgctcgccgtcctgggccaggctgaaaatcggcacggtggcttgcaccacttggcccacttccgcctggcgcgcagtaatcacaccgggcgcgtcggcgatcaaggcggtg

SEQ ID NO: 694611 - DNA, 268 bp, Homo sapiens
cccttgcaccttcctgtcaccaatggaaagtgcgtcatcctaacggaacatctgactaccccagcccttgctgacagtctacacatgagcacgcccatcaggcttgtggtggtcaagtatgcgcccagcggattctacattgcctccggagatgtgtctgggaagctgaggatctcggtataccacgcggaacaggagcacctgttgaactatgagtaccagcctttcgctgggaagtatcaaagactttgcttggactgaacactgt

SEQ ID NO: 694612 - DNA, 129 bp, Homo sapiens
tggaccgggcgaacgtgaacaggagtctggctgagggcggagctggctgcagcgggctgtccgccgacttggccaggccgatgccggagatgggcgagaaggtggacttccacttgctgctattgactg

SEQ ID NO: 694613 - DNA, 141 bp, Homo sapiens
tgggtgtatccatttgcctccgtgtgggagtagttcctcctctgggaaggtactgcagccttcccgcgacagaaaatcgcgatccagtacccaatccataggcaccaccgccatttacaactatctataataccatcaccc

SEQ ID NO: 694614 - DNA, 128 bp, Homo sapiens
ggccccacccccggcccctcccctgaaggggaggggggagacgtagaatgcgttacctacctctgactcagtccgatcgcgaggcgatgctcggcgtgatcggtgccgcctcgatcgatgatctgttc

SEQ ID NO: 694615 - DNA, 259 bp, Homo sapiens
ccaacagtactgccagcttgacttcttcaatgaccaccaccgagaccacctcacacagtactcccagcttgacttcttcaatgaccgccaccgagaccacctcacacagtactcccagcttcacttcttccatcaccaccaccgagaccacctccaacagtactgccagcttgacttcttccatcaccaccaccgagaccacctccaacagtactgccagcttgacttcttcaatgaccaccaccgagaccacctcaca

SEQ ID NO: 694616 - DNA, 423 bp, Homo sapiens
accaaacacagagcacagctgtgtaaggtattcactcccgagcattaggcaaaggagtcccacagcactcttacatgtcattatatttcaacagatgattcacctggtcctgtagatccgatgactgttcacacattcttctgaatagcttcttgcgtggtattgaagatgtgtgtgttattatcgccatctctccttaacctatcttctgagtgcaagatggcttcttcgtggagtcctatgtttcgagctgcctgacataacagctcgagagctccggaacgcctttcagcacgtgcttggtgagcgcgattacgtcagtaccacaggtggtcactttctccgtgaggagccctttcgcggactgaccgacgcgcgcttgagtctctggcgttacagtcgccatcatttcagatagcgacc

SEQ ID NO: 694617 - DNA, 365 bp, Homo sapiens
aaggccagaagtggcaggcccagtaatatatcagacaggcaaaggcgaaggatggtgagaacggtcagatacagtccacagaccacctccaaagacatacaacatcatcctgctgcagatggtgtcactgtgcatcgttcaacaattcagcgcactttgcacaaggagaagctgtatgggagagtgatgcggaagaagccttttctgcacacacgccacaaacagtcgcttgaggtatgcaaacgcacatttggacaatccagcttcattttggaataaggtgctgtggactgatgaaacaaagattgagttatttggtcataataagggacgttatgcatggcggcaaaagaacacgtcgacgc

SEQ ID NO: 694618 - DNA, 305 bp, Homo sapiens
  misc_feature (42)..(42): n is a, c, g, or t
ggatttgtttacccttggtcaaggctcttgccaacagtgggnccaaaaaccagaggttcccagaaactacaatagtccccgtgagtcaggccagtttgcccaaaggatggcctgcaggactgcccccagcatttggaggccaggcctcaactgcattttttaagcccaggcaaaggcggccctggggaaggtggaaccccagcatttttactgatgctttggggtcctgcagaaccctgactgtgcccagaccttttggaccgtgtccctttccatataatttaataaatccttttttcaaagga

SEQ ID NO: 694619 - DNA, 237 bp, Homo sapiens
cattacagtgtgtcacaccacacctgctaattgtaatcttttagtagagacggggtttcaccatgttggccaggctggtctcgaactcctgacctcgtgatccacccgcctcggcctcccagagtgctgtgattacaggtgtgagccaccgcgtccagccccagagtgctaggattataggtgtgagccaccacgcctggcccacccataggatagaccccccagagtgttgtcttg

SEQ ID NO: 694620 - DNA, 195 bp, Homo sapiens
aaatcaacatgtcctggttggttaatttggtcaatggatggctgcggatctgttcggtgctcgaacgtttcatcaatgcacttgcaggatcaccggctgacgtgcattcggttgacagtcttgcgcgacggttgctgacacgacggaggacctttcgacgcattggccgggtcgttccacgtggggactcctcta

SEQ ID NO: 694621 - DNA, 270 bp, Homo sapiens
gtcggcaatactcattttgttgtgctgcactttactgcacttcacagatactgtgtcttttactaattgaaggtttgtggcaaagttgtattgagtaaatctattagtgccattattccaacagtatgtgctcacttagtgtctctgtcttacattttggtaattttcacatttcaaaacttttcttatatctgttatggtgatctgtgatccgtgatcttttttttttttttttggaaacgggttttcacccctgtcccccaggataga

SEQ ID NO: 694622 - DNA, 645 bp, Homo sapiens
tgtggtggctcatgcctgtaatcctagcactttgagacgccgaggtgggcagatcacaaggtcaggagatcaagaccatcctggctaaagtggtgaaaccccatctccactaaaaatacaaaaaaattagctgggcgtggtggcgggcacctatagtcccagctactcgagaggctgaggcaggagaattgcttgaacccgggaggcagacgttgcagtgagccaagatcgcaccattgcactccagcctgggcgagacagtgagactccgtctcaaaaaaaaaaaaaaaaaaaagaaaagggtattttgggaagcccaaaaaacaaaaaaccgggagatatccaaatatttttcccacccttgttgggggagaaaaccgcccgggcgatattctatcagaacaagaaattttactctacgaggttgcaagcaaacgcaaccacctgcgcatatagttctcaacaagtgttgcggaacaagggaacgcgagaccccagggattacaaaccgggctggattcctattttataccacacacaacggggaaggactatctcggatgacccagcgataggggcgcaatcggcaagggaaaaatgccgagaaggggccgcaaggaaccatccgggctctgcaagcgccca

SEQ ID NO: 694623 - DNA, 725 bp, Homo sapiens
  misc_feature (630)..(630): n is a, c, g, or t
cctgtgcccagctttcagtatcttgtgtgagtcgatcatttctcaaactaccgagcggtctggccacaaagagagagccccggagcatagctgctactggccatgatgccccaatacggtatgttctctaagatctaggacaagatagaacggctgaccttgaccaccgttattaaacatactgctgccaatcctgtcgagaggaataaactatgatgatgaagggcgtccaaactgaccaagaagacagattctgcagaagacaggagcttatatacttaataacctagagactgcaccagaaaaccgctagtactgagacatgaattcagtagtgctgcaggatacaacatcaacatatcagaatcataacatttaatatacactaacagcagataacctgctaaaagaaatcaaggacagcaatcacacttaagaagctactaagaatagaaaatagctaccaagtatagaaaatacctaggaatgatgttaaccactgaagagaaagatgtgtatgaggaaaactatgataaactgctgaaagaagtagaagatgacacacacaacaggtgaggatattccatgctcatgcgttagaataatttgacagcactactcagagcaatntatagattcaatatgatctctatcagaaccacacaagagcctgcgtagccaaaggtaatctgagccaaacagcgcctggagacatcatattcctg

SEQ ID NO: 694624 - DNA, 715 bp, Homo sapiens
tggcccaacctcgattgtttattccaacaaacttccctggtttaaaaaaaaaaatgggtgggggggaggttcaccacattttatcacccctgtgacagacaagcaaaactctcccacccaaaaattctcaggagcccctctcggaggcttcctacacacgcttattggttagccctccaggacaacaagggagcgttgaattttccatacgctggctaaaaaacaaatctcttctcaaacatagtgttccaactactcgcaaaggcaaagggctgtggagccctctggggaaacagaaagactccgggcgcatacaacgcaccagctgtggaggctcccaagaaggtagacaactgtggggccccaaggcacacctgtggcctcgcccacgacagacactccagtgggaaccgcaaaccagcacccgcacaggccctaataaaaaccgcacatatcatgggcagacatgcgggcatctctatgcaccgagggagactaatgaaaaccacatagagctcacccagtgttgaaacccaagagtggtatcccatatccaagaaataccacagaacttcccacgagaaaccacgtgagagccctgtagaagaaaacaaatacgaaaaaataagtgaagacaacaccagtgagaacagtataaccaccaccaccagcgaatgcacgagaagcccattgataatgaggaagtgacactaaa

SEQ ID NO: 694625 - DNA, 204 bp, Homo sapiens
cccttgtttccctgggtgccttttttgccccttgtccttaaacccaacgacacaaaaaggggtggggcgggtttattgggaaaaaaggaaccaggtcaaaagaaggcatgggttggcaaggtgggcgtttggggccctttatgctggcttttcaccccaaaggacacaggcagcttcccaaatatatttattttcttcccggga

SEQ ID NO: 694626 - DNA, 157 bp, Homo sapiens
ctcatttgcatggctcactcacacaccacatcaagcaatagggccacaccgcacataggaagacccccccagagagagggtcagcaggggggcccacgcatgcgcctcccctcactatagccaccatggtggggctaggctacgggctgagcgccca

SEQ ID NO: 694627 - DNA, 143 bp, Homo sapiens
ttgtgattgagcgtgtggcgtataagccgcttcgtaaatcgactcgtgtggctgcattaattacagccattggggtttcatacttattagaaaatgcaatgagttatttctttggagcggagtctcgtccgtttccttcagat

SEQ ID NO: 694628 - DNA, 304 bp, Homo sapiens
attgttttttggttttttttaaaaacccccaaaaaaaaccccggatggggcccctgggcccttttgggaaaggggaatccccccaagggcttaaaagggggtccccttagggccaaaaaaacccaaaaaggggggggttttggaaagtgggcctttttttttccccccccttcccctcccccaaaaaaccccctgggggggtgggccccccccgggtttaaggccaaaaaaaaaaagccccccgtttggggaaccaaccctttccccccaaaacccggggaggaaaaaaaagaaaaagggttta

SEQ ID NO: 694629 - DNA, 548 bp, Homo sapiens
  misc_feature (71)..(71): n is a, c, g, or t
cgagatagcggcgaggtccgctttcagtgtatggttttccctgccaaacggttctggctgtggtgtcatcncatggagggcgtgcgcgtgggccttttccttgcggcactgtggcttgccgagccggagccgaatggctggctggcaagtggcgatcgattcagcccgaggagcaaggagcgccatgggccgagttcgtcttgtgcccggggagcgctaaggcagcctatggcgtggtcgtcgtgatggatacggaacattagtttgcagagaaatggaatatccctgtggaatcatattcgttgtgcaaagaactgcaaaaggaaaacccagttctgtgcaaaagggactcatcgaatccttacccgaatttcaactttaacatctctcatcagggagacctatgcagtgctgtgctgctgaacctgagctggcaagtgtggcactggatctactggaagactagttttccaggtcgtggttcaattccagaattctttcatattatgaccacgaacgtttaccaacaaagaatgggaaacaatcag

SEQ ID NO: 694630 - DNA, 116 bp, Homo sapiens
gctacctatgtgctaatgatagataagagtgaaagcattgggaagcctgagaagagtgcagtcagaactgtcagttcctggctgtttcattgagcagcttggcccttatcgatggt

SEQ ID NO: 694631 - DNA, 576 bp, Homo sapiens
tctccatctgccccagcgtcctctctttacaggcagacccagggagctggaggtctgtgcaggctgcctgagtttctttacaatttcagtagttctgtcgagcctgttccacaacagacacaaatgggaatacaacaagcaaaggtcttgctaagtgagactagaaaacgatgctgaggaatagcaaatagctctcatgctgcagctggtctgcttgaagagttaatggttaagagtttataaatatgcaaacaccaaggtcgaacagcaggagttcccaagatagcagagaaacaggaacctaccacaaaggattatggtactaaaaggttaaaaatccgcccatccacatggcaaagggcagggaataaataaaccacgacatcctgttagagggggattcacagagaaggcagactcctgggaataggaaagaaaaagaaaaaaaaagatacaagacaaaatagaccaaggctaagtaccaactttgtgtagttaagaatccgcatatcctcggagtgaccttaacaataaaaatccaacactaaaataaacatgtaagagcggagttacatc

SEQ ID NO: 694632 - DNA, 288 bp, Homo sapiens
tccatatgttgcccaggctgtctcaaactcctgacctcaggtaatctgtctgccttggtttctcaaagtgctgggattacaggtgtaagccactgtgctcggtctttttttggtatttttagtagaaactaggtttcaccatgttgcccaggctggtcttgaactcctgagctcaagcaatacacctgctttggcctcctaaagtgctgggattacaggtgtgacccactgtgcccggccctatcttcttttcattcaacaaatattttttgggcacacattatggag

SEQ ID NO: 694633 - DNA, 300 bp, Homo sapiens
  misc_feature (28)..(28): n is a, c, g, or t
  misc_feature (32)..(32): n is a, c, g, or t
attgagcccctggagcctcagttgccangtgncagaattcacttgccattttcattcttcttggtgggagcctccgactccaactgtttctagtcggccatctgcgccccttcccctgatggtttttattgaaaatgtctatctgtttagaaaagttttcattcatatcctgaattttaaaaaatttctttatattggcttttacctttctcttgtattaccttgagtaacttaatgatcaaccttttgaattatttctctggtatttcaaagatttcatttggtttggatccactgctg

SEQ ID NO: 694634 - DNA, 967 bp, Homo sapiens
  misc_feature (6)..(6): n is a, c, g, or t
  misc_feature (65)..(65): n is a, c, g, or t
  misc_feature (131)..(131): n is a, c, g, or t
  misc_feature (157)..(157): n is a, c, g, or t
  misc_feature (159)..(159): n is a, c, g, or t
  misc_feature (163)..(163): n is a, c, g, or t
  misc_feature (170)..(170): n is a, c, g, or t
  misc_feature (191)..(192): n is a, c, g, or t
  misc_feature (212)..(213): n is a, c, g, or t
  misc_feature (216)..(216): n is a, c, g, or t
  misc_feature (225)..(225): n is a, c, g, or t
  misc_feature (227)..(227): n is a, c, g, or t
  misc_feature (230)..(230): n is a, c, g, or t
  misc_feature (242)..(242): n is a, c, g, or t
  misc_feature (249)..(249): n is a, c, g, or t
  misc_feature (251)..(251): n is a, c, g, or t
  misc_feature (257)..(257): n is a, c, g, or t
  misc_feature (259)..(259): n is a, c, g, or t
  misc_feature (263)..(263): n is a, c, g, or t
  misc_feature (267)..(268): n is a, c, g, or t
  misc_feature (271)..(271): n is a, c, g, or t
  misc_feature (282)..(282): n is a, c, g, or t
  misc_feature (284)..(284): n is a, c, g, or t
  misc_feature (290)..(291): n is a, c, g, or t
  misc_feature (313)..(313): n is a, c, g, or t
  misc_feature (321)..(321): n is a, c, g, or t
  misc_feature (326)..(327): n is a, c, g, or t
  misc_feature (332)..(332): n is a, c, g, or t
  misc_feature (334)..(334): n is a, c, g, or t
  misc_feature (403)..(403): n is a, c, g, or t
  misc_feature (406)..(406): n is a, c, g, or t
  misc_feature (445)..(445): n is a, c, g, or t
  misc_feature (455)..(455): n is a, c, g, or t
  misc_feature (486)..(486): n is a, c, g, or t
  misc_feature (540)..(540): n is a, c, g, or t
  misc_feature (567)..(567): n is a, c, g, or t
  misc_feature (571)..(571): n is a, c, g, or t
  misc_feature (576)..(576): n is a, c, g, or t
  misc_feature (586)..(586): n is a, c, g, or t
  misc_feature (589)..(589): n is a, c, g, or t
  misc_feature (601)..(601): n is a, c, g, or t
  misc_feature (610)..(610): n is a, c, g, or t
  misc_feature (613)..(613): n is a, c, g, or t
  misc_feature (660)..(660): n is a, c, g, or t
  misc_feature (663)..(663): n is a, c, g, or t
  misc_feature (669)..(669): n is a, c, g, or t
  misc_feature (671)..(671): n is a, c, g, or t
  misc_feature (681)..(681): n is a, c, g, or t
  misc_feature (709)..(709): n is a, c, g, or t
  misc_feature (716)..(716): n is a, c, g, or t
  misc_feature (772)..(772): n is a, c, g, or t
  misc_feature (786)..(786): n is a, c, g, or t
  misc_feature (795)..(795): n is a, c, g, or t
  misc_feature (803)..(803): n is a, c, g, or t
  misc_feature (808)..(808): n is a, c, g, or t
  misc_feature (810)..(810): n is a, c, g, or t
  misc_feature (821)..(821): n is a, c, g, or t
  misc_feature (837)..(837): n is a, c, g, or t
  misc_feature (845)..(845): n is a, c, g, or t
  misc_feature (856)..(856): n is a, c, g, or t
  misc_feature (878)..(878): n is a, c, g, or t
  misc_feature (933)..(933): n is a, c, g, or t
ggactnagcattcacagacgacaccacacaccactgtcacgagcggcaagaaagaccccggcgcnagccagcctggagccccgaggaggcggccccccctccaagagtcggagggggcagggcctggagtntcgggggcagcctgggaacacctccncntaanaggcgtnggtagagacgaagagggactnnctggcagccgccccagcctnnccncccggagtntnccncccttgacaggnaaggctntnggccangncccncctnncanactcctccccncnccttcnngttctccttctccccgccccangcctccanggcanngcctncngggctcggccgtggagaaggtcagggcccagggcttcagcagggggcacttgttaatggcattgaggtnganggacgcctccccctcactctggcctccagaaaggaaggngaccccagtnacagcggggggcactgtgcggcgcacgctgntaacggtcgccatggcaatctcctcaagagaaaacttctgagttccagcatggnctggggtgaccatgttgggcttcagcnaggngcctnccaggtagangtngtggtcactcanagccttgtnganagccgccagccccttctcggtcacaaactggcagcgcttcaagttanggncccatnanggaggatctnaggctccacgatgggcacaatgccattntgctggnagaaactggcataacgggccaaaacattggcattttccatgaaggcgaaggctganggggtgtgtccccnaatcttcancacaaaangccantnggcgaagtcanccccgtccttcttgtnctgggcanagcgctcaaanagccaaccaaaccttgggtggnagtctcgcaattgtccctccaaggggacaagccctttttacttgaagccaaaaancgccttggatttaaaattgggggaggaggcataa

SEQ ID NO: 694635 - DNA, 217 bp, Homo sapiens
ttttttaaaaaaagaggggggtaagttataccccaagcccccctttcaaaaatttttccccgggtttttgcggaaaacccccaacaaaaaagcccttttaaaaaagggggttttttttttttaaaaaggaagcccccccaaaacaggggcaattttttttgtttgtttttttgggcccaggaccccggaaaagccccaaaaaaatttttgttgggga

SEQ ID NO: 694636 - DNA, 470 bp, Homo sapiens
tctactgggttcgtgttcacagtctgataagtacttaacgtttttatcctcaattgtattaaatatcattgggggtggcttaacctttttaaaaaaatcccttggattttcctccctgcttaaaagatttcaccagaaaaccttcatataaaaattcaggccctttttggacaatttttaaaatttgtatctttactagaacatgagaatctttttcccttggaagcttgaattataaatgtggtgtttggcctgcctcagcagcaccagttgactgctcgtgtgccagcggtgtggggaggacggggcaggacgctgcagctctctccagccctgttggcgtcctcagtgcctgcaggcctctcgctgcctgttgggctgtctggggggtggccatttagggatcgtggggacgggggccaccccaagaagaaagaaaggcccgtccacaggcccggctctgggcacgt

SEQ ID NO: 694637 - DNA, 979 bp, Homo sapiens
ggactatgtcaaacgaagtcaccaagatggaaggaggtccttggaaccagcctctcccagtgtctcctactccacaatgctcatccacaataggcagagtcagcaagtctgggaggcagctcgcagcatgcgaagtcgaacaggctccagaaaccaggcgggcggaatgtcaagaaaccgacaccaggaggtcctatcagtctacagaatgcttgcttctcgttatgctagcgccatgggccaggatgcgtatggaaaatagtgcacacaaatgttactagaagctaaataatcctttagccatgtgttatagccaaccgagtcttcaaaacgaagtaacaagtggattaccttgggcaggcacactggccccttgtctatcatagtctgtatgtgttcagcatcctagagtgagtcgagctagcccgctgacatctgttctccattccgtggtgatgctacggtcgtgcctacgcgtagcttcgttgcacctattgccaaaggtgtttctcgagggacttgctccccgaggagaaaactagcgccgactcgagaactggcttagagactgtcaaaaccagcagaggtgaaacgtccctgtgatcgccttgcagatgccatacgctgcggatcggcctatgcccgagaggtctgatctctgatgctggcatgggtggccgcctcctccgttcccatgacgtgtgctgagatggcgttatatcagcctactcgaagtggctgtgctgaaggcctcctgtgagatgaatgttcctttccaattgcctgtactcgggcaggggcataccatgggacacggacgaagacttcttttggcctttgggtttcaattcccaagcctgaacttgagttgccaagtaaactattggggccaggtttgaacgtaacttggttgaaccctcccagatatctgggggttgaaagccatccggttttcccacatgctatattttaaccggta

SEQ ID NO: 694638 - DNA, 286 bp, Homo sapiens
  misc_feature (264)..(264): n is a, c, g, or t
  misc_feature (268)..(268): n is a, c, g, or t
  misc_feature (277)..(277): n is a, c, g, or t
aggggtgcccccagcacaggagagagactcagctcctctagcccccacgcacggtggggtgcctgtcaccctggtctctgcccaagcggccccgagggacagcatgtggtgtgtgagaggcaggcccccggccctccccaagagcagttgagaggggatcccctgcgggaaatccgggcctttgggtgcatccgatctgatctgagttgtttctgacagtgacagagtgacaatctatcagtatctcaagatcaaatggttaantaanacataaganatttaaacg

SEQ ID NO: 694639 - DNA, 1332 bp, Homo sapiens
  misc_feature (379)..(379): n is a, c, g, or t
  misc_feature (474)..(474): n is a, c, g, or t
tgtggtggctcatgcctgtaatcctagcactttgggaggctgaggcaggtggatcatctgaggtcaagagtttgagaccagcctgatcaacatggtgaaaccccgtctctactaaaaacataaaaattagccgggcatggtggcagatgcctgtaatcccagctacttgagaggctgaggcaggagaattgcttgaatccaggaggcagaggttgcagtgagccgagactgcaccattgcactccagcccgggtgacagagtgagactctgtctcaaaaaaaaaaaaggaatataaaatgttgctcctaatgtctgctgttttaggtggaagaaatatcccaccacacagaaaagagatgcttaaaaagcaaacacccnctaccttctggagcattttagaagactctgaaatcacccagacatttgagtcgtcagctgtgaaaggcttcctgactggacagtgagaaattgtncttatgcttattatctcacttcttaagaaagtctgagaataaataagaggaaaaatatgacggatgcccatgatgatcacttgagttgaaagactttgaaaatggaagtcttaagcttttgaaggttcataggtaaatataaaatgcatgattattttgccacagattttaatggttaattttggatccaactttggggccatttaataacatttggcctttttgaggaaataaacttggctaatgatacaagctggtttacccaagccacgaagagttttaaaggttggtaaaatgcctggtatttacttgcagaatatattctctgggttacctcaggctctttttaaaggggacctctttgcttcccctcgaggccaaatttaggggacctaggttaagtgattaacctattgaactctctctaactcaaactctattgaacatttggcccaccaaaggtctaacgctgacatctgcaattgtgatgctccgccgtgttctcactcgggccaggtcccgaccatctcttcacatcgcggataagtttctttctacaccaatactccactcgtctgggtccattccgctgctcctccttagtcgctgtgcgcgagaacttctatcctgctctgtgtctcactcctcgtcctgctcctctctgtgtctacgattcgcttactacacaccatccatcatctgtgcgccctgtctactcgtctcggcatgttatctctccatctctctctcgtcgttctcatctagctgtctcgatctcttcctgcttactatctcaatcacgctatcgtctctcttacgtgtccatcatcgaacctcgtcacgctatgctactccctc

SEQ ID NO: 694640 - DNA, 81 bp, Homo sapiens
ttagttgcattttatggggtaatttgaattactttttaaatgacatggagttccattttgacctggtactgcacttgaaga

SEQ ID NO: 694641 - DNA, 470 bp, Homo sapiens
  misc_feature (13)..(13): n is a, c, g, or t
  misc_feature (75)..(75): n is a, c, g, or t
  misc_feature (79)..(80): n is a, c, g, or t
  misc_feature (131)..(131): n is a, c, g, or t
  misc_feature (143)..(143): n is a, c, g, or t
  misc_feature (173)..(173): n is a, c, g, or t
  misc_feature (227)..(227): n is a, c, g, or t
  misc_feature (241)..(241): n is a, c, g, or t
  misc_feature (245)..(245): n is a, c, g, or t
  misc_feature (255)..(255): n is a, c, g, or t
  misc_feature (261)..(261): n is a, c, g, or t
  misc_feature (282)..(282): n is a, c, g, or t
  misc_feature (285)..(285): n is a, c, g, or t
  misc_feature (289)..(289): n is a, c, g, or t
  misc_feature (292)..(292): n is a, c, g, or t
  misc_feature (294)..(294): n is a, c, g, or t
  misc_feature (302)..(302): n is a, c, g, or t
  misc_feature (307)..(307): n is a, c, g, or t
  misc_feature (414)..(414): n is a, c, g, or t
  misc_feature (443)..(443): n is a, c, g, or t
  misc_feature (446)..(446): n is a, c, g, or t
  misc_feature (449)..(449): n is a, c, g, or t
ataagtagaaatntgtcttcatactgcaaacaatcacacagattttatattgtccatggaattaatacttaaaanaatnnttctttttagttaagaagagtcttcagagcaccattattctaatagaagtnattttggatatnagagttcatctttggtctttttcctatggnaagtacaagggaagaggtcgtcctcagtctgtggttctacccttttcatgcccnctcggatttggggntcantcacttgtancatggnctattcctggaaaagtttganatncatnccngnatatgtcntcgcncatgagattatttcttgcaaattcttgtcctgcttttgctatctttttggcctcttcatcgtgatctttcgcccatttaagtttttctagcagatcgctcaggttgntcttaactggaatgtagtttttccagggntgnagntcattgtaaaaatgttcatag

SEQ ID NO: 694642 - DNA, 191 bp, Homo sapiens
agctaacatgactaacacccttaattccatccaccctcctctccttaggaggcctgcccccgctaaccggctttttggctcaaatggccattatcgagaattcacaaaaacaatagccttatcatcccaccatcatagccaccatcaccctccttaacctttacttttacctacggctaatttattccacc

SEQ ID NO: 694643 - DNA, 327 bp, Homo sapiens
aggaggcacagactgctggaaataaggcggagccaaccaccatctgctaagtgtgctacatagctaatgtttccacgtattatctcatttaatcctcagcacctctgcaaggaaaaggctaacttccttttgaagttaaagaaacagagacttagagatgcaaagtagttgaattatgaccagtggaaccgaggccggaatccagtttgaatctaaggagtcttttttgtttttctgtattagtattgtttagagagagtttcactctgtgtcccaggctgcagtgccagtggtgcaaatctcagctcactgaaaacttcatctccc

SEQ ID NO: 694644 - DNA, 1128 bp, Homo sapiens
tagggtacattttaaatacagaaatacgtttaagataacaagattattttagatatctggtcatattttcggatcccagatcatttaacattcatcttcttctggaacaacatccatcggcgatggcacttcaacataaattcttccttctcttctatcctatctatctttcttctccttccttccttcctctcctctccatcttatccactcctgggattccagtccttacctcctcgcattgggtcttcccaggcgtggagcgtgcaccgtgggtgacaactctacagccctcattgtgcaaccttcgtgacctccgtgggctcacaagcgacattcgtgcatgcacttcagccctcccgagtatagctagagacgtgcagggccatgcacataccagccccggcgcaacattcgcgcactattcacacgtacaaacacgggggattcccccacagtgttgcggccacgcgtggctcctcgaaacctccgtgaccctggctaaacccgtgccgtgccctgtggcccctcctaaaggcgaccccccaactggcccccctggcggccacggcataggcacctccaggcgtacacccgacaacgctctcggtcccacacaacgtcaaccactactgcgctgtgacgacaaaaccgcttcctcagtacgctacaaaactcacagagtcacccaatcgtgtgcacaacatttattcccccttttacgtccgcccatccgggcaacggggaacttcctcccccataatactgcaaacactccctccgggggatccctatagttgttcctgacaaacactggatttccccataaggagaacccctactcccaacaagctgtcatgtccgcaaccaaatctaatctcgcaccactttgcgacaacggcttatacgcaacccttctccctccccccctttggagcgatttaggacgtccggcgaaatctcggccgggaccaacacacggccacttccagcttttcccgggtttccgtacgtgagatattttacgcctacgttagtctgtacgccacatcttctgccacacttaccaaaccttctcttccacaactctcctcctcgctcagccctagcgatgaacaagcctacaag

SEQ ID NO: 694645 - DNA, 260 bp, Homo sapiens
aaggcttcagtttatatagaacagaaattgaatgagagctgaatgagtgagccttccatttaagtaccagatcactcttccaaatttcagcagtgtccagacagtctgttatcatctttgcttttggaataaacacctataaatacatgttctgatagtttttttttccatcaaaactagtgtccaacgcttttaaggtctgactgggcaattttccacagtgctctatttaatgcagtctaaatgtatcaccaatgaga

SEQ ID NO: 694646 - DNA, 231 bp, Homo sapiens
  misc_feature (227)..(227): n is a, c, g, or t
cctgcctggtcggagaggagagagaggcttcccttggtcttcctgtgccctctggtgaaccttgtgaactaggtccctctggagcacgtcgtgaacgtgctcccccttgtcccatgtgcccccctggattggctggatcccctggtgaatctcgacgtgaggtggctcgtggtgccgaaggttcccctggacgagacggttctcctggcgccgagggtgaccgtggngaac

SEQ ID NO: 694647 - DNA, 239 bp, Homo sapiens
tcagattcacgatctgacagcaattaagaaagagtgaacaaagacaagattgtatcttatacttactaaatcatacaataacaaaagatccaggaccttataaacaaagatactccaaagaaaaaccatactttcttcactctacaacatgtcaatagacaccacattataactccaacagccaggaaacactttgacatgggagattactagcgccatgtattacattgcagacagat

SEQ ID NO: 694648 - DNA, 963 bp, Homo sapiens
  misc_feature (650)..(650): n is a, c, g, or t
cgcccagcctcccgcctcgcggcctcccgcctcccgcctccctccagactgcgatgtgcggcctcggctggcggcggcctctggccttcagtttgtaaggcgatcttgtggctgtcaggatggcggaggcacgcaggacgttctcccagtctctgcaagttgcctgcaccaggcctcaaacccacactgtggtgaacaacagctaccggagcgcacagcactctccatggctctgctccgtagggcatgtctggcatctcacgggatcagcaggcaatcactcattcgcagtgattgctgctggatggctggacggagcatactacattcagaggtcctctagtcgcgattcgcatgctggtctgcggtgtccatgctgagtctcactttcacgagcgaactagtgctgctgtggggagcgatcttgagagtcgaggagtcggcaactgaggaacgacggtccttgtagtccgatcggtgatgctgattcctacagaatgctaatgatgccgaagaatctcgtcactattgtacaagtatactacgcgtccggagcatggcagctcaagtcctgagcaaggttacaggagacactggtggctgcctgccagcttcagatcccgagaaattatccatttctgctgtgattntcctcatgtcctgggtggacgaagagaacattctcgatgtctaccggctggcagagctgtttgacttgagccgcctgactgagcaactggacacctatatcctcaaaaactttgtggccttctctcggactgacaagtaccgccagcttccatttggagaagggtctactccctccttcagcagcaatcgcctggaggtctcctgcgagaccgagggtatatgaggggggcccttctctaccattatagcctggagcaggtgcaaggctgaccagaatctcgctgcacgagaccccaaagctccttgagacag

SEQ ID NO: 694649 - DNA, 205 bp, Homo sapiens
tgatgttgcggctatactgtatgcggctatactgtatgcggctatactgttcgcggctatactatagcggacccttcgcctcgtctgtctcatgtatcatctgtgcattaaaaccccttcccctagttgcatgtttatacttgaaaccccgctcctcatggccttggcccttgctgaagctgcttcctcttataaaatagctttt

SEQ ID NO: 694650 - DNA, 440 bp, Homo sapiens
gaacgggtgatgcggtggggggggggaaagagagagagagagggaaagaaggagagagacagagagaggagagagagagagagagacagacagagagacagagacagacacagagagacggagagacagagagagagagagagaaagagagagagagacagacagagagacagagacagacacagagagacggagagacagagagagagagagagagagagagagagagagagaggagagagaagaactcggggggggtcccattcctttaaggggtcgccacccactcgagtgccacggtgagatcctagggagctccccagagggggagggcggggccttcccagagcgcagtagccagggtggacacgagagcgtgccgtataagcctagtgtataccacgcgtatcacgcgtgcggggtacagagctcgatattcg

SEQ ID NO: 694651 - DNA, 373 bp, Homo sapiens
  misc_feature (299)..(299): n is a, c, g, or t
ctactactactaaattctgcggccgcgtcgaccttttaacaggcatttttatagcaacattgttttgtttttgtgtttgagacagagtctagctctgttgcccaggctggagtgtagtggtgcaatcacagctcactgtagcttcgacctcctgggctcaagggatcctcccacctcagcctcctgagtagctggggcccacaagtgcatgccactatacctggctaatttttaaaacttttctgtagagatagggtctcacacctgtaatcccaacactttgggaggctgaggccgancagatcacaaggtcaagagaacaagaccatcctggccaaaatggtgaaaccatctctactaaaaatacaaaaat

SEQ ID NO: 694652 - DNA, 937 bp, Homo sapiens
gtgttggtcatgagcacagggtcgcatggatgcgacgccgggcgaaaaacgacctgttaggatggatgaattgtgttgccgcgccctccgtgttcgacctttgaggaaaggtttcccgagaggtaccgcccaattgagaactctggcgtgaattctgcaaagatgggggcccccttttcccgtggggacgcagtcatttcagagtggagatgtgacccattgaaaatggtggagcccctaccggattccagctgtggagggaaggaattccacattctttggaaaagatattgccccacactccagccagatgaaccgctagccagaggatgggcattacagggtgcgatacgtttccccggcatttttaagttagagaattttccgtcacagaagcaggttcctttttcccatatctctgatctggaaccctgattcagaagatactgaaggtgttcatgaagatctttagtcgaaaccatgctgctcccttctcccaaggtcgtcacccttctgagaagggggccttttgagctagaagctttctattctgatcccccaggagttccatatccacgaagccaaaataggccgctttgtagttcagaatgtgttctgcaccagaaagatggagaaaaatctagagtaaagtcacaagtgcgaagtccacaacccactggcattttcaccatctctacggcatctatggtggagaaagtccccactgaggagaatgaaatgtcttctgaagctgacactggagtgtctgaatcagagaccaccagaaacccagacactgattaaaatgtccagcaagacaacagtgaagctgggacacagccccaggtaccaactgatgctcaaccaacctcacagtttcccccttcacctggacttacctcagaagaaaaccaaatccccgatgctgacaaagcca

SEQ ID NO: 694653 - DNA, 137 bp, Homo sapiens
cctggcctccgcggacgcgatgccctttgcccccagggcgttcctactcaagaagcctggctgcaccccccctcacgcacagcctcggtcgtgacagccgccccctgttaatcacgccttgtgtgtacaaggaaaat

SEQ ID NO: 694654 - DNA, 648 bp, Homo sapiens
ggcttgcctggttccgccgtagagttgtccgttgttgggtggtacagggcggttgttgcggacagcgttgtgggcgttggggggtgcttccgctggggaggcttgtggtggaactcctgcgttggatgtctttgttctgcagttctcctggagaagtttaacgtgcccactgcgtgttggatagcgtgctgttgtttggaaagaatttggggtttataatgttgttctctaagatgatctgttgctgctttccagactttgaaaacttttaagcttcttgacggcctcttaccggaatacttctggggaaacttgcagggtccccaagtgtcgttgccatacaggttcactagagttctttgaaccacagctgaaaagagctttgtattatttttgtaatgtccctcccccagatatcgatttaggagtattatataaaggtggtggcgccaaaatacctatgtaaggaacgcctgttcccagtgttatctgtgatctgccagctctgtgagtttctgtgaggcccgaacaccctgtattttacaagtccaaatatatttacattaatcactatgttaatgagtatgtaaacatttttttgcattgatgaattttgtatctgcttccatttaaagcatacagccatta

SEQ ID NO: 694655 - DNA, 1237 bp, Homo sapiens
gtgttcttggtgttcccgtttgtggcttccttgtgctgcatttgttcttgtatgtgctctcttcattctgtgctggtgccattttgtttgcttcaggtctgcttaaggttattgctcatgtgcctcctcttacttttgtcggtgtgaggtttcctttcgctttgttgtcctttggtctttctctacaatgttgtctttggtcccgtctcagcgtgttcttttccgggggtttgctctccctggtcagtgtccttgtcgtttttgatgtgtgactgtgtttctctaggatagaatctggcttgtgcattgcttcctcactcaagtagtgcgatgcgcattcccttcatgttgcgatcttctacctaggggctttccagtgaactttctgtggtcatcattttctgcttgctgtggtatggtcaatgtaggtcttggcaacatccttggtatgcaatattgatcttactctccacttcatgggatttctatggattccaacaatggacttactaccaagcatattgtaaactatcgtgatgcccatcagttgaccaggtgaatctcagagcttcatgacttcatgcagagtgctgagtagggaaccatctttgccctcagctggctcgatcacctgatttgggcatgatcctgtctgacttcaggcacgtcgtgcggtttatatgacttcttccatggcctgccatcccactgatgccgatgatactttgcagccgtgattgtgcttgtatcgcgagcaggaagtctctggactgtgactgtgacatggcctcggtccaccacgctgttgtcaccagatccctcaggacttgtccctatgagacactgatcagcagagcatggagacctttttgttcagtttcccccatctgtactgtgctcgggaggcacgctgcccaacagcaagctgagagcgacggcagctctctactggtcaaagactttgagctggcatcagctcagcagaggcctgatatggtgctacggcatacggttatcggggatttctgtcggcctaaagatcgcacaaaagatgtcctgaccaagccaaggaccctaaccgctttgtgaaattgtcagtgatggggctgacagtggcacttggattcggctgcactggctgtaaggtgtaaaaggtgcgcctggaatgggcccctaagtttcagtctgcagctcgtttacctgaaagccagagaagaccttcctcttacataaatcc

SEQ ID NO: 694656 - DNA, 715 bp, Homo sapiens
tgcaagggtgatgtgtgctgcggcatcgcgaggtctcgcatatgtctgccatatacaagttttcagagtctatggagtgtcatcttgtctgctaatatgtacctgtgctaatatacgatccttggcacccagacctcctggtacagaaataacaatggcacttgtcgggctatatccaggaaagtgtcgccatgagattgtgaaccggaagagtccttatgttgcagtatgctgtcataagctaatggccttccagaattcctcttcatacagtacgctggggaacacttgccagaactgtagttgccactcagagttgatgtgtgaaccaaggacctgacttgcagaacaatcctggacaaggatgtttaactcttttatctccgaacatttgacatgagactaaactttccagatgctgttctctattttcaactgcttacttggacccaaatgtttctgtataaacaattaaagattgtaacgcattacaataggtctggtaaccaactccacccttcaggtactgtgtccatctaacaaattatttacacattccttggccaacttgtaactccgtggtaggtcctcacgataccacacattataggtggagggtattcctcttacagggcacccatagtacgaacaccaaacatggcttaactcacctccaaagtcctttcactgtgattgggaaactgtccaacttcaa

SEQ ID NO: 694657 - DNA, 724 bp, Homo sapiens
ctctcgactccggccagtcagtctcttcttcttctctagcgagcgagcaagctaggcttggaggtgaccgaaaatgccggtcagcaggatcgccgtggggagccaccgtgaggtgtacgaggtgggcgccctcaaggcggcgctcgccgagttcatctccacgctcatcttcgtcttcgccggccagggctccggcatggccttcagcaagctgagccccgacggcgcggcgaccccggccggcctgatctcggcggcgatagcgcacgccttcgcgctgttcgtggcggtgtccgtgggcgccaacatctccggcgggcacgtgaacccggccgtgaccttcggcgccttcgtgggcggcaacatcaccctcttccgcggactgctctactgggtcgcccagctcctgggactccaccgccgactgcttcctcctccgcttctccaccggcgggccgcccaccggcaccttcgggctgaccggcatcggcgcgtgggaggcggtggtgctggagatcgtgatgaccttcgggctggtgtacacggtgtacgcacacggccgaggaccccaagaagggcagccatgggcaccatcgcgcacatcagccatcaggcattcatcgtgggcgccaacatccatggtcggcaggcgccttctccggagcgtccatgaaaccagccgacatccttcgaacccgaactcgtcagctgggagatgggggga

SEQ ID NO: 694658 - DNA, 159 bp, Homo sapiens
ccctcttcctccagagtcacattgactcggaacgtggctgggatacgtgggctgaggagatcccctaggctgatcctgaacctccgcctcaaatccatgtaccaccagagtaaccacctctctgcccctgatcccagctcgaccctatatgattgtggc

SEQ ID NO: 694659 - DNA, 635 bp, Homo sapiens
acgtggcttctctcgccggggcaggggggcgcggcttcatcttactcccagatctcagcatattccacgccgtggtacgattaccagagagtgcatgttcgacttatgtccctcaccacttgtcagcgcatagatcatcgcgtaacgggacatcgcaataaatattggaagtgggacttaacatggatatgggagtagattttcctgtggggggggatgatatatgtatgctgacacagcactactgggtattggaaatgttctatttgtagccgcattggcttttgtatttgctttaggaagaacatgcacactcttcctccaatatcataaaatgaaagctacaggttgctctctgagtggcgaattcgtagttcttattgggtggcctcagataggcaagatcttcgcaatttatggacaggactgcacttgtccagcaagcttatatggtgacctgggccgaatgtataagacgagtcctcactccttgtattcctttctaaaatgacctgcaaaaagattttttggaagtaaaattcggagaaggcgaccaaatggggtaaccaccagagattttaaagagtttttagataagggcggttgttacaaaggcatttgagaatacccgcggg

SEQ ID NO: 694660 - DNA, 794 bp, Homo sapiens
ggagacgccagcctgcgtctgccatggggctcggggtgaggggctggggacgtcctctgactgactgtggccaccggcctgatgctgcccgtgaagaccacccgggcatcctgggggagcccagatcatcggggggccacgaggtgacccccacactccaggaccctacatggcatccgtgcgcttacgggggccaacatcactgcggaggcttcctgtctgcgagcccgctgggtggtcgtcggtcggcccaactgctttcagccacagagacctccgcactggcctggtggtgctgggcgcccgaagtgctgagtactgcggagcccagcgagcaggtgttcggcatcgatgctctcacgcacgcatccccgactaccagcgccatgagccgagccaacgacatctggctgctgcggctgatcgggtctgctgtcctgggccctgcaggtggggcatgctgaggcatgccagggagaagggccaggaccccacagcagcggggacgcggcagccgggctggctggctggaggctgacgtgtctgactctagaggaggcatgccgccatggaactgatggcaggccagaggtccgagctgctggtacccggtacgtctggcgaacgagctcctggaaacaggggcaccatgactcttacacatggctctggcacccgtaagtggggggacaggccaacagaacgggggctacttgcaccggccgacatccggaggtgccccttggtgtcgacaggaaacaggagcacgatggacttcgtacacattatcgggc

SEQ ID NO: 694661 - DNA, 781 bp, Homo sapiens
  misc_feature (1)..(1): n is a, c, g, or t
  misc_feature (86)..(86): n is a, c, g, or t
ngaaagaagcggcaggttcttctcaaccaaagttgccgccctttggtgagcttgaccaggccattttccggaaggcgacattagtnggtccccccaaaaaggtgcccagggtccaggttccacccctggagaggtctcactaaacgtagaaaggctccgcagcaaatagttgtgaacgtcttcacgagaaaataatccctgtcataacaaactgtctgtccgtggacgtcaacgacttatgtatgtagcgtcagcagctgcaagtaactgtcaaactctccaaaggctgcccggagtcattggtgcctgtcccccatcgcttagtggttgtgcaagcctataaaacgtgtgttcacatggtcttaaggaccagcacgttctcctcgactctcctaaaagcatgcgttgtgggaaggaggctccagtcactcacgaagtgcacttgctaagctcgtaaaacgcaagcccaaggcagcaaaagagggctcaaagctgttatggatgatttagcagcttttgtatggcagtgtggcaagtctcacgataatgggccctgcttccccgaggagggtaagggacttgttcccgcgagtcgatgggcctgagaggcatcaaatcacattttgaggcctatcagcggtctcttcatatgacacttaactaaattgaggtcggcaggtagggccctgagtgtccagtaggttggcgtgttgtcaacagggggtgtccggagggaggggttccggcatggatatgccggttttagggtttcttcaatcaa

SEQ ID NO: 694662 - DNA, 103 bp, Homo sapiens
cggtccagaatccctttcatcaacgaggatcattggagggctctggtgccagcagccgcggttctattttgttggttttcggaactgaggccatgattaagag

SEQ ID NO: 694663 - DNA, 497 bp, Homo sapiens
gattttttccgttttttattaatcgaagcactcagtaaagttggggaacgatcgaagatatgtatgcctcttgaccgggtggtggctttacaccaacgtataagaaacccaggtgaataatgcttggaacgtgattttcttttgttattctaatggtaggctgggatacttttaaacgatatgttctaggctcagggagtttggcttgcaccaacaaggtttataccctgctacgctgagcaagtgtgaatatagactggcttgcctcactggtttgcaaaaggtgtaaaatcatacctaacagatttgaactgagctttcgttgaattgggcttgagctgtacaagctcaacaggtgcaggagagttcatgatatgtatctccttgtcacgaagaagacatatatctgtatgggagggaaatgtttgggatttaaaattttggagaccgtttgtttataaacctcctcaacttgaagaggatgggtctctcggtca

SEQ ID NO: 694664 - DNA, 142 bp, Homo sapiens
attacgttggatactcaggccctaaactgccagcaattttcaaacctggccaccaggttatcattctcaaccagttgaacatgaggccacgtcagacagatgcctcctcaactcatgctgcatgtgtacacgcaccactatc

SEQ ID NO: 694665 - DNA, 459 bp, Homo sapiens
agtattgtatggcggaaagggatgatactggatagtgttctttggcagtatgcatgagatatgtggcatttgtgggtgcagtgttgttgttgcttgccgctggttgtgactgttgttgtggtggcattggatttcttcatatctgttacaaaatgctgccttcggacagaaggtgaactttggacttgccatttgtagatctacctatgcaccgttgaatctgatgaactggttgtagttcttgggcttgacaggtttacgaacctggttaatttatccttgtaaaacaatgctatgctgattgctattgcgagacaccatgtgaggcttaggcgagttagtagctctggcagggctcaaaggcctgacaggaaacggaccccaagtggattgagctggtggaaaagtacctccaaagtgggtcatgggcaaccttggtggacggatctgctggaaagt

SEQ ID NO: 694666 - DNA, 138 bp, Homo sapiens
ttttggtctgttttggtcccccccctcgtgggcttgggctcgggatcaaccccttttggcctgttatgattttgaacctttgccttgacccccaagtgaatctttttcctggggacccaaataaaagtataattttta

SEQ ID NO: 694667 - DNA, 1332 bp, Homo sapiens
  misc_feature (66)..(66): n is a, c, g, or t
  misc_feature (68)..(68): n is a, c, g, or t
  misc_feature (113)..(113): n is a, c, g, or t
  misc_feature (118)..(118): n is a, c, g, or t
  misc_feature (120)..(120): n is a, c, g, or t
  misc_feature (138)..(138): n is a, c, g, or t
gggcgagtggcgagcagggcctcggccgccacccacacgccccgaagcgtgctcgtcccccgcgcngnggctcccggccgccgccctcggccatcggactgctccccgtgtgncccangncctcgtgactccgctggncggcccggcgcggacccagaagccctcagggatcatggaccagtgtagcagtgtccaccctgcctgttgaagaagagtcctcctcagagaccaggatggtggtgacattccatcgatgtccatgccctcgaatccatgtgtcaagaactggccaagtccaaggcagaagtggcctgccatcgcacgttgtacgcaaccagacgtgtctgtcggccggaacccgattcgagcgatgcgcctttccgtaatgccaggccgcgcatatacagcacacgacttctacgcaacccatacctgtacggatgctttacattacaaatccatttggtatttccccaacatctcccaaagcaggagtcgccaggccacagcactatccaccgaggaattgtgccatatctctagcacttactgactacatgccagtttccatccctaaacaaaacactgaattctccataatccaccacgtcgttaactacgcgccaattacccacgctatcctctaactctcaccccacctggcccctttaatctcaccttcccacacacccacacctcacccaacaacatacctatcagcacaccacacaccacactcacaaccactccatacgctgggcactcacaaccagccagccaaggcagcgaggatgaaaaaaccacacaggcacccacatcagccgcctcattcgttcccaccaaacagagtcatccaccgccgctccatctgctcgcactcgcaccccccacccacaactgatgtaagctctttgttactccgcacaaactcagagcacgtaccacccgtccagccggcccaccccccacccacacacccgtcgcagtcctcattactacgctccccacgccctcacctaccaccccacgctagcttatctacgctagattataatatctcgtaccagtctcatcagatcaatctcacttcctatcccccacccccccactcctacggatctcttccgctctccattcttcgacacacacaacaccacaacacccctccaacccatcacacctccttcgcaccttactagagattcttaaatcaccaatcacacaaaccactacacacacatcactactatcacagtataacatatactacctcctacactacctatcgatagcccattctccaccgatctcatctcctctcacaccctacac

SEQ ID NO: 694668 - DNA, 302 bp, Homo sapiens
ttcctccaaagagatcactgttgacttttggtccaatgatgcaaagggctgcccctggggggtgtttttaaatggagaatccaaattattaacaccgacagcttgaacctctttcaaccttcctgctgcatagaccccaatgaatttcctatcttgggcaaaattcaagcccccaagggcttcctatggcaaacatctgaccaaaccgtgaccggaaaaaggaatcaagaactggcttggcccaagtgtcataagaaacactttcatttccataacttgcctcaacttgagaaaaagctttt

SEQ ID NO: 694669 - DNA, 382 bp, Homo sapiens
  misc_feature (8)..(8): n is a, c, g, or t
  misc_feature (10)..(10): n is a, c, g, or t
  misc_feature (20)..(20): n is a, c, g, or t
  misc_feature (344)..(344): n is a, c, g, or t
tcggcgancnttcttttccnttaaacctcatgaaccaacctctgctggttttctgcttttcttccgcagcttccctcacccgtctcggccttcatagaattgaggacggttaggaccttgctgtggattcagctttggttgccagtcacaccagccgtcgggcaaagttgttgttttaatctctccagaccactcagacttcttccacatcagcaataaggctgtcttgctatcctgtcatttgtgtgttcactgggagcagctcgtttaatttccttctgggggcttttcctttgcattgccgcttcagccgtttggatggcaaggagggcccggcttttctngacttgagtttttaggacatggcgtttccttcacaaag

SEQ ID NO: 694670 - DNA, 478 bp, Homo sapiens
tggagggtgcactttgggagatgacaagatgcacacaaacctcctctcactaattatccactaccacacactcaaaacaaccctgtgctccagaaagggatacgtgcctgccgaaacaaacagagcttaagggttttattacctggtaaatatactgcccaaaaccacacgtttcaggaagattagctcagaaatgttcaccaattgactgaagggcagtggcgggtgaggtgatgggacagcctcagggcgcacatgaggagggctccctcccccatgcaggcttttctccaggagcttcaccaggaactcaagggggatcagggagaattctgagaacaccctactgtggagctgcctagagaggaagaataaatgatgaaaaataaaactctgagtaacgtatgggcatttgttaatgaaaactgtttttctgaaagcttgtgaaggtcttgaaatgcccctgagtagctgaggg

SEQ ID NO: 694671 - DNA, 961 bp, Homo sapiens
cacttgctgaagcaggcagtggtgctgaggcggatatgctgagatgtcgggaacacaggctgccgatgaatgactgaaagacacaagatctgcaagagagttgccatggccctaggtccatgcacccgcatggatcccggcttgtttgcgctgctccagtagtccctggtgtctgtctcgggcggaggcacgtcatctctcgtgagtttgtaggagggtcttgtggtcacgatgaagaggtcgcatgggcctggtggagtggctgcggtgatccttgtgactcgaggtgcagggggttggcttgcgctcgtcttgcttggtctggtgggagtttctccttggcgagaggggtcactgtcgcggaggaataagatcctctcccgagagtacgtcgagtgatcgatcggggccttctgcaatatcatgaggggattcttgctcatggagtctctcttatgacggattcggaaggattcattgaaggaatccgtgggcaaaggctttgtttccatgatgctgatgtccggttgttcccgatgcagcactcagtaggaggtggcgagttggtcatttgctgtcctccaaagtatcagagcagggagccgttcaagaggcagagatgctgggagtgtcgccgaaagtcggcaggcattccttacgtgtgatcttcagcgaaagcttccaggtcccttgcagcatggtaatagggctccgggtgaatggcagtggtccaatggccatgtggtttgggccctgggggctctccagaggcggggcggaaaaatagcgcccggggaggccgaaatcgcgcggcacaatcgaacagggatgccgcgagagaaatgggcaggtgtgaaggtgggggaaacattgtgcgccacgacgagcccagtgaacaggagagcgccgcgaccagattagcgagcgcaaataataaggcacccagtgaggaaccagatcc

SEQ ID NO: 694672 - DNA, 554 bp, Homo sapiens
  misc_feature (259)..(259): n is a, c, g, or t
  misc_feature (391)..(391): n is a, c, g, or t
  misc_feature (510)..(510): n is a, c, g, or t
tacgccaatcctcaggggcagactggacaacataaccagtaagacgacgaactgcctcaacatcaaacccctcaatatcagtgtaaaaagaacgaggaacagcaccagacttaacaagagatttatcaatctcaatctgtctaattaaccaatcaacagcatataaagtcttaccattgcctggagcaccagtcacaagatttaacattaagtagtcgccttcactattccaacatggagagattgcaaggctaagcgngtcaacatggcactaccaataattgacaacgcctcaccaaaacccattaacaaagcaatatttaatacatccgcaggaataccagagatcttagaaacaataagattcaacgcagaagtaacaagaggaatnaaaggaacagtagtcactaatgcaaggccagcacccactaaaccacgtgcaaccgtctgacccaagatattacgcaacaacattgctaaccaactaaacattcttcacccccagaaaancaccggcaatataagcagcaagaatcgtagcaatcacaatcaca

SEQ ID NO: 694673 - DNA, 236 bp, Homo sapiens
ctgtatagggagcctaactgctatttcccagggacttaaggcctttgtacaactgagtagccctttcatcctccagaataaagggaccctcttgagctcagtgccttctcagtactggcatgccccagggatcgtcctccctgcctggatactctggccagctccattgataacccagcccagtcactcctagtccaggtgaatcccttcagtgacatggcccatggcttgcatgg

SEQ ID NO: 694674 - DNA, 884 bp, Homo sapiens
gcagaacccaaggtgaacgtcatggaggccactatggggccatccggctccctcgggatggctccggctggactttagaaaccccggggtgccttcaacgtccacattccaggtgaccacacgtgtctcctcctcctcatcttagcttgccaggtgtcaccctaactcgctggtacttaacctgactatggttgggcttgagaagaagactatggtttctggtcgggtagataggagagacggggcctcgcatgctacgcctgttgaccagcaggatccccgagaggccatcgaccagtctctggatcatcaccgcccctgggaactggggccaccaggcctgggtcagcgagatttgctctgactttatttatatggcatgaaatctctggttttatattggggactatggtggtggttggtgtggatcaacagttcgtatgtaattcatagagtagtgtgattatatatttgacatgttacatttcaaagaaaggtagtgttggctaccaggggaccaacagaaggtagtctgactatctgtgcccgcttcgactggaatactatggatttgaaaagagaactgtaactgctggctgatttataaagatgtcatgagtttcctgtgcttgttacactctgcacggtggccgtgcaggtgtcgtacgagaccggtatcgacgttggtgattcctgtaccccacaaacctacgatttcatccgagcgtgggtgggcccggtgtttacgaactccgctctctttggagttgactgggtaccaggggcttgagaggggggccagcccagggtttggaagctggaggggggattggggcccccttgagggggccctgttcccccgggtttaagggtcccggggaacc

SEQ ID NO: 694675 - DNA, 182 bp, Homo sapiens
ccgggagcccttaaccctagatgacgcagagaacctccgagagcgcttaaccctccggaagcccttaaccccgccagcccttaacccttggctgagatttcgctggagagaaggtagggacagcgtgaatctagatcatacattcatgcgcgtcactaattagatgacgaggcatttggcta

SEQ ID NO: 694676 - DNA, 674 bp, Homo sapiens
acacacacacacagagagataaggaacaagaagtgttttctggtgttgtggggaagtgaaatatgtggttggtaggaagaggtaccaatgacttccaaacatgtgattccgtcttaaaagttttccatttttacccgtgtcccccttcccttttgcattacagaagttagatatttcatattcatcgcttttcgttgtaaagataatctctttactccccgtgtgagtgattcacgtgcgcttgtcattattacagatagatgtgtgtgtattgtttttattttcgtagatgatacgtagatgtagatgaatttttaactctattatgagagtgtggtagagtcggggaggtcttcagggttttattccccctcttttacttgtccattgaggaagggaactgagctcctttctcctctccttcagaccaaatcattatcaaagtgttccttcagccctgcaggttgccccaatataaccctttttacagcatcctctgttcctcagtcatgcccagtgctggatcatgctccggtagtcgccctggtgaccaaaacagttgtctccagattattaccccttaattttggcttttacacgtgctgtctacacggtactgagaagggatcacaaaaccaaacagaagcaaggggagtctcagactatgatgatgc

SEQ ID NO: 694677 - DNA, 981 bp, Homo sapiens
gagagacaatgaacttcatggctcttggtttcagagccacggggccatccaggcatagttctgcgtcgtgcgtgaaactgccataaatgaactggcgcggcataagcaacatgtttgtttggcgacatctccatctgcgcattcatgcatccgtcggtccatagggcctggtcagcaccaccgcaagtggtcagatcatccacactgtaggggctatgtcagcacattccgcaccagcaacagtaagctaggatccccaaggatagcatgttggttcgagcaagagccctggctgacttacgggtgatctatatgggagtgctattaacctgcgaggagatccaagcctggcgataggatctaaagcaattgagcgattccaacgctggtctaggtccctaggggagccatatcacggaacgagataaggggattgtcttttggggacctcagatgacggtttgatcggggcagaataggtggacaaatgtctctgtcagtaagggaacttcgcagttattatctgcgctgtcttttgggttattcaacgtcctacgaatgagaactgggaccagtcatgtctatcatacttgaagaacgagtctgaatatcccagaagcaagaacaaaggggtcagtctgcatacataaacgttgaacggcgtggtcgtcaataggttcgccctctgttaccctattgatgcactagtgttgtgtccacgttgtgtctccttgggcaagaattggaaccggccactcaaagaggccccagggagatgtattcgctgagacagcttccgatggcatggcttaagatgccacactgttctcgtgattgcggttgctcacgaaatatccggtatcctgtctggcgggcttttgtcgccttggggtatacctgcaaagagtggggccagacagcgcggtttgatggggtctttgtgatatggctctccctctaagccgattttgtagctatccg

SEQ ID NO: 694678 - DNA, 368 bp, Homo sapiens
attttgaaaactgtaagaacagataatcaagagttgacaatatcattatttgtagcgactgctggtacataaaaactaccaatccggctgagcacggtggctcatgcctgtaatcccagcactttaagaggtcgagatgggcagaccacctgaggtcaggagtttgagaccatcctgttcaacatggcgaaaccctgtctctactaaaaatacaaaacattagccaggcgtggtggcacgtgcctgtaaacccagctacttgggaggctgaggcaggagaatcgcttgaatctgggaggcagaggttgcagtgagccgagatcccaccactgcattccagcctgggcaacagagtgagattctgtctc

SEQ ID NO: 694679 - DNA, 214 bp, Homo sapiens
cgcaatgatgtcggggcgatccagagatgactatgagcgagatgctctatgaacttccactgcatgggtggacgtcgtggataaccatggccggacctgcagccggggtactgagggctggcaggccctggacccacatgccccaggagcaagagcgaagggacgtactagctgaggaccaagtaccagtatcgtgccatcacaggagggcgac

SEQ ID NO: 694680 - DNA, 161 bp, Homo sapiens
tgttttaggattagaggctcaccgattcatgtcgggatggtcagaaaaccactctccataggacgtggtttcagaagcaaccttgggcttagtccacccttttaaggcactcttgagattcagagtgcctaagaaagatgacactcacgcaccgcgtttac

SEQ ID NO: 694681 - DNA, 202 bp, Homo sapiens
aagatccatgaaggattacctacccccgtcctctatcgagaccccagatcctgatgtggaggaagagccacctgcaagatggacacgagaccacaagctgcactgatgaaccatggcactccgcgccgcatccaccggcctgtgggtctctgaagggacccccccccaatcggactgccaaattctccgcgaatcgaagtgt

SEQ ID NO: 694682 - DNA, 919 bp, Homo sapiens
tccccaggctcaagggatttctcccaccccagactcccaagtagctggaactacgggtgtgcaccacaacaacctggctaatgttcttttttggtagacacagagtctcactatttagcactgatgggtctccaactcctgacctcaagcgatcctcctgcctaggcttcccaaattgctgggattacaggcatgagccacaatgcctggctctgtagttccgtactctctagcagtggtctttacttgtgtgctagccgtgtccctcattgtgctgatcctctgtaaaaattaaataccttttttttttttctccgcacacagagttcccttcttggttgcccaggctggcagtgcaacgggccgcaatctccggccacagagaaacttcacacttgcggggttcaccgcagttcttctgtgctacagcctcccgggtaacgtggcactttcaccggcttgtgccacccatgccccaagctaatttggatttccagcaaaagcagggcgtttctccactgctgggcacagggctgctcctcagaacaccttgacctggaggtgactctggtctgcttgggctccccaaactgggctgcgtctacccagggccttgcacacctgtgctcgctggccaacatcaacacttttattctcacttccgcttctcttatcgtgtccttgggccaccgggtttccacttgctccccccggtggcgtcgggggccaactctgtctcaggtggctccactggcggcaaggactctctgtcgggcccccgggtagtgtcgtgccgagtgcccccccgtggttgggtttgtgcacaggtcctgcccctgtcagctgcgtccgccccgtcaggggtcggacgctctcaacgcggggccgcccacggcccgcacaggctcgccccttgtcg

SEQ ID NO: 694683 - DNA, 454 bp, Homo sapiens
gcaaaacaaaacaaaagcaaaagcacagctgctcacgcctgtaattttagcactttgggaggccgaggtgggaggattactccagcccaggagttcgagaccagcctaggcaatctagtaagaccccatctctaccaaaaataaaaataaaaaatattatcaaggtgtggtggtgtgcgcctgtagtcccagctactcgggaggctaaggcgggaggaccgcttgagcccgggaggtccagggggcagtgagccatgaccccaccaccccactccagcctgggcagcagcatgaggctctgtcccaaaaatgaatgaatggccggagtgcaatggctcacgcctgtaatcccaccactttgggaggccgagacgggcggatcacgaggtcaggagatggagaccatcctggctgacacggtgaaaccccgtctctactaaaaatacaaaaaaaa

SEQ ID NO: 694684 - DNA, 571 bp, Homo sapiens
  misc_feature (434)..(434): n is a, c, g, or t
atccccagacttacccttactgagcggcctctactatagtctgtcattaaatgtaccaagcaaggataaggaaggggaatggattgagcctcgggagatcatagtcatcaatccttgctcatagctgtttggggtcagtggaggagcaaaacctatatgaggacctgtttggggcagcagggagcaaaatctcctttaacaaccaagcagttcctcattcacatcaacagagcgaggctgtgataacttaggaggcagcaatcctaatagtccttcagtgcattttagtctgtctccaactggacaccagtaggtagtgtcaagccagagattcggggcagtagataaatgttcattttactgatgcactttagtttttggtctgttacctgttttccagaaatttgtggccttttaggcgggagttaggcgancaaaccagtgagagccccaatccctgcagttttgtggcttcaagtgtgggtggacagtcctaatggggatctccagctccttccctgtgggctgtcacagacaggtaccccagaaggtcaatgtgggagtggtgtgc

SEQ ID NO: 694685 - DNA, 271 bp, Homo sapiens
  misc_feature (22)..(22): n is a, c, g, or t
  misc_feature (75)..(75): n is a, c, g, or t
  misc_feature (172)..(172): n is a, c, g, or t
ctcatgccctgtaatccccaanactcccgggaggctgggatgggagaatctcctgagccccagggattcgggaanagcctgagcagcagagtgagaccctatctctacaaaaagttaaaaaattagcccgcatggtggtatgttcctcttgttccagctactcaggaggcanaggtgggagggttgctcgagtccgggggggttgatgctgcagtgagccgtgatggcatcactgcactccaccctggtaacagagtgagactctgtctca

SEQ ID NO: 694686 - DNA, 1463 bp, Homo sapiens
acttttcgaggtacaccgatacattttgtaatgtgcaccaattttagacttcagtttgatgaatcctcacttacatgtatacattggggcagtcaccctccagatcaagatacagaacattgccaggtccctaaaacattccctcatttcccctcctactcagtatcccccagaagcaaccacgtatttcgacctcgatcattatcgcattagctcttagcttgctcttgcgcttcatactaaaaatggaactcatacatatagcacaatattcgcttgtggaattcacccatgtcactgtatgtctcagaacgttcacgttattctctctcttctcagccaaggcacccagacggctcatgccatgtaagtcccagactcttctgcgcgacggcccgcagcgcgagcacacacctaacattgcaagaatcaaacgaagaccaccacgtcaaagcaagccatctacctgcaaacacaatggaaacacccccaccgcgcgaaaaacaaaagaggtagaagcacacacacatcaaacaacgcagaacgatacgcagaataggaaagagaatgcatcaacacacgccgcacgagacacgcagacaacaagcagcaagagaccgacgaccgaagaagacatcacaacagaaagagagtgcgggacaacacaccatcacacaagccaacacacatcaaccacaccgccccccacaaaccaacaccgcaccacacagcactaagaaacactaacgaaacatcagcgcgaccgaggaagcgacataaccaagcacgcacaacagccaggagcgcgcacagaaatcaacttcaatccgacagaagcgaagagcgacgatcttgagctacgatcatcaagccccagacgacgatcagccgccacagtagagcgaccgagatgaaagcgcatgacaagaaagagaaaaacagcaacagcaaagtaacgtacaacggtccatcacgtagatgcagcaagactacttaaacagtccacatagctaccacactcgacctccacacgcgcctagccacttcagcacccatcactaccccacactcaccaccacccacgcagagcaaagacactaacagccacactaacactgcaaccgtccacacaaccgattgcggagcgaaagagggaacacgcagactgaggatacacagaacagacagcaacagacacaacacacaccatgaacataacgtgaatcacgtgaccgaagcacacacaacacgagagcacacggagagaaacgactagaacgcacggcgaggacaaagcaacgaccgaatgaccctaaaacaacacagtacgcgtggacgagcagatcacacaccagagatgacccacatatcacgccacgaaccacacgagcaacgaagaacgaaagccaagagagagagagggcccgcaccacgcgacagaaccagaccgacctcacagtcag

SEQ ID NO: 694687 - DNA, 423 bp, Homo sapiens
  misc_feature (276)..(276): n is a, c, g, or t
gcggctttgcgccacttctttatgcacttccagtcgctgggtctcgataggcttcggctgactccgccgtcacgcttgagcgtcaattcccaggcgaacaggcccaggcgctccgcttcggcttcgaaggcttcgtgcaggcgttcggcgcggtactgcgccagggtttcgcccttggcctgggcggcgagggggttgagggtgtcgagctgcgtgacgacctcagggtgttcgttcaagaaacggtccagcgcgcgctggtggttatcgccgggntgggacaatgcgtgactccaaatagaaaaggcttcaagcgccgctgcgatgtcggcgccgggcgtttttgcgcaggcggcgctggatggcgttgcgtatcggctcaagcaaaaacagcagcaggtaagccatcagcaccgtgaccag

SEQ ID NO: 694688 - DNA, 521 bp, Homo sapiens
agacggagacttgccctatcgccaggctggagtgcggtggcacaaactcgcctctggggttcaagcaatactcccgcctcagccccccgagcagctgggactacaagcgtgcgccaccatgcccggccaactttttgcattccagtagagacagggtttcaccacgcaggccaggatggtctcgatctcctgacctcctgatctgcctgcctcggcctcccaaagagtcaaaaataaaggcatgagccactgagcctggcctccaatttacctttagagactgagcccagctctgtggcccaggctgaagtgcagtggtgcggtcatagctcactgcagcctcaaaccccaaggtgaagccaccctcctgcttcagactcccaaaatgctgggattacaccacgtgagccgccccgacccgctggggcactgtgattattaaaaaccctcaagccaacccagttgtctacaaacccagggacaaaaaaagcttcgggacccccctctctacaaaaaaaaag

SEQ ID NO: 694689 - DNA, 708 bp, Homo sapiens
gccggagatgtagacttaagcgtttagccccgactaggctgcgtgcccacttgtcatccgtccgcctatagataccacggactttgacttgaaagccgtgaaggggatttgcgttcctctggttagtgtaaagtttctgcggtgtgttgctgttaatgtgaagacggatgtacacgttgtgtgatagtgtgtgtgaccctgcttgcttttttcttggaactcctcagcaccgtattggagggatttgttcacggtttgcacgcactgaccactgggcttcttggctgtctggtgctctctgctgcacgtaccacgttcaaaggtgtagccagtgtacccaccccacgagtagcacttcaaaccaaagctgcctcaaactttttcgagaaaaatactttattcataaatatccgttttattctcatgtacctaagttcgtggagaaaataattgcatcctataaactgcctgcaagacgttagcaggctcttccaaataactccctggtgcaccacggagcaccctgcatcccagagcatgcttaccttttactgttctgcatattaccaaaaataacttgccacttcataacttctttgaccaagtaaattacttttttgattgccgtttatatgaaaatgtactgatttttcttttaataaactgcatcgagatcccaccgactgaattgttaaaaaagaaaaaaaa

SEQ ID NO: 694690 - DNA, 876 bp, Homo sapiens
gggagccacactgaaaaaaaaatttccccctgcaatctactcttaactgatagtcgctaacttggttatgtgtgtctattcagactattaccataatgatttctcaaacaaaggtcctttctgaaatggtatctatgattcagctattcaaaacctaatgaagtgggtgactatgacaatgtggagaaatcatgacagaaaatgtggttgtactggggctgtcaaattgctgtaaagggaagttggggaaacaaagcactaaagaaactcaatgaagacctgaagcgaagagaaggaatttcaacaaagctagtgcggatctgggaggaacgagtaagacttaaccaagctaagagaaaacaggtcaccagggaagattggaagagtcatttggaagatcgacacacgcaggcatggaagacctcccttcttctctgctgacacttgaatcacttaaggactggcaattcatagacatggtttgctgaaaatctgaattccttggaacgatccagaacctccatggtgtcagattatctcgaaaacaatttaagagataccagacaggatgggaatgcattactaagacattcagggacaggggattacacacgctaccaacaaaaatcagagactgtacccgagggcactaagtccatcgggcagcctggggaaacataaaagtggggtcacaagagatactttgtgacgtcaaaaggagatacaatagcgtcaatgcacacctggcacggagacgcaagtaccaaaacccttgggggtagattgctgcctgaggggggatggcgaaagaattgacatcgacaaaagaagaaaacaaagaggggacaagaaacgggcacacaaaaacacgagggc

SEQ ID NO: 694691 - DNA, 122 bp, Homo sapiens
  misc_feature (31)..(31): n is a, c, g, or t
ccagccgcgtccgtaatcaggtaagtgaacngtgtttacatatgcgtgtatgcatacgtgattcgtggtcatgaacgtagtgcgtggaatactcatctaagtaaaaaatgcctggatgtaaa

SEQ ID NO: 694692 - DNA, 393 bp, Homo sapiens
  misc_feature (155)..(155): n is a, c, g, or t
gcgatccgagtcacgagttgtacagggtacctggtgacgacgttctgttggcctgggggccgcttgttgaacgtagcggttcatgcatgatgatgcgagggctgacagttgagtgccaaatccaaccccgtgatgaccccagtggtgaggtaganctggatgatgctccgtgcaaaaggacgcagccaaccatgcccagtgatgcacagagaccccccaaaagcatgacggtgcctgtgcagcccaaaagcggttcatgcacacacttgcagaagcggacctgtcccgtacacgcatgggccagcaggatggaggaagatccaggcttgtgtcgcttatagccgaatcccaaaactccttgtattagcctcctttacaagaacagacacttga

SEQ ID NO: 694693 - DNA, 523 bp, Homo sapiens
ccggatttctcccccccctcccttaaaaatttctcccccctcgaaatctgccccctgaaattagaggacttttctcccccggtgttctcctcctctcagagcttcatcaaaaactactccgcgcgcgcatacaaatctgtctataacgaacttcaagttccacacactcgtgtattattaaacaacaatatgccgtcggagatcatgccttttgtgaaaacacacccatcttaaacgattctttcttaaaacaggattttattatatattcttcaaaccacgcttctctctttttaaaacaaatgtgttcatataagtccctttccgtcctgtaaatcatgcggtgagtaaaacaaccattttttctagaaaaatttcgcacggctttccacacagattttccacaaccgtgatgaagagagaaaaaattgagataaaccaccaccccgctttctccctcttagcggccgacacaccaccattaaacttttctgaattcaaacgccccataatatacaaactt

SEQ ID NO: 694694 - DNA, 463 bp, Homo sapiens
  misc_feature (14)..(14): n is a, c, g, or t
  misc_feature (117)..(117): n is a, c, g, or t
  misc_feature (141)..(141): n is a, c, g, or t
  misc_feature (145)..(145): n is a, c, g, or t
  misc_feature (153)..(154): n is a, c, g, or t
  misc_feature (156)..(157): n is a, c, g, or t
  misc_feature (159)..(159): n is a, c, g, or t
  misc_feature (162)..(162): n is a, c, g, or t
  misc_feature (170)..(170): n is a, c, g, or t
  misc_feature (180)..(180): n is a, c, g, or t
  misc_feature (207)..(207): n is a, c, g, or t
  misc_feature (254)..(254): n is a, c, g, or t
  misc_feature (277)..(277): n is a, c, g, or t
  misc_feature (293)..(293): n is a, c, g, or t
  misc_feature (297)..(297): n is a, c, g, or t
  misc_feature (302)..(302): n is a, c, g, or t
  misc_feature (337)..(337): n is a, c, g, or t
  misc_feature (365)..(365): n is a, c, g, or t
  misc_feature (370)..(370): n is a, c, g, or t
  misc_feature (380)..(380): n is a, c, g, or t
  misc_feature (388)..(393): n is a, c, g, or t
  misc_feature (402)..(403): n is a, c, g, or t
  misc_feature (449)..(449): n is a, c, g, or t
tttttataaaaatnatccaagtgttcaatgcacaaatttttctctcaaacagcagaataagatgcacccaggaattctcatataccgcaatagaatgaagaaacagtactttcaganaattatctttaggtgaagaaattnaaantgtcaatnntnntntantgtacatnaacatatacntaaaaagtctaaaaaccaagctgtganaagggacctagaactgaaacaaaatttgagaaaaacttacttaaaancatttgtttcctgtaatctctanaaataattttagaagnaganatttntgaactcaactgttatgactaatacaaccaaaaanttcacttaatggcattttgtgtaatggngccgntatccttggngtattaannnnnnaaattattnnctttttctttttcaaattcagctatttgattaaatatattcagtanattctggggtaaat

SEQ ID NO: 694695 - DNA, 84 bp, Homo sapiens
  misc_feature (26)..(26): n is a, c, g, or t
  misc_feature (49)..(49): n is a, c, g, or t
  misc_feature (54)..(54): n is a, c, g, or t
  misc_feature (75)..(75): n is a, c, g, or t
ttactcaggaagggaactgccattgnccccaaggcttctgtctactaantctantggtcttgtgttttgcttgantgcttggca

SEQ ID NO: 694696 - DNA, 149 bp, Homo sapiens
actatctaaggtgtagatgtatgcctggggctgtcccccaagtcctccccaaagccactcccgtgcccacgatctgctgccaccaaacacccagggactctgcccaaagtcccatttataagcctatttacatgaaaagtaataaaatg

SEQ ID NO: 694697 - DNA, 474 bp, Homo sapiens
agggggagggtgttagggagagtagcctttgatcctttgttactttgggtgggaagatggggtttttccttttagtctagttttggaaagttcgcgttaattggttttagattccctgcctccctagacccaggacccatgtggttttttttgtttttgtttttgtttttttgatggagatggggtcttactctgttgcgcaggccgaagagcggtgaccggatcacagctcactgcagcttcaacctcctgggctcaagggatcctcccacctcagcctgcagagtagctgggaccacagccgcgcgccaccacaccgcgccaatttttgtgttcttggtagagaccgggttttgccttgttgtctaggttgggctccaactgcagggctaaagcgatccaagagcatcagcctcccggggtgctgggattacaggcttgagccaccatgcccgccttattatattaatttaa

SEQ ID NO: 694698 - DNA, 685 bp, Homo sapiens
agcggactcagtccccacatcaatgggcactgcccacccagacagcacctactcctgtgggcagcacccagaaccggtgctcacgatggggaagtcaggactgtggagaagcgggaaactggagcccgagggcagggtgctcaggagagacccatccagacagcaatgctcaaggccaagtgagaccaacgacctggaatccagggagaaagcagtgccagtcctgtttctctgggcctcatcctctcctccatcaaaatgaggaaccgtggactgcaggagcattgaggaagccacgtggagtccccgctctgtgttgagccccgtagggtgcccttcctgtgggcggccattctgggcgtggcgccccctgtctgaaatcagcagcacaccagctccctgtgctccgtgtgacaagctgccagggacaaagagaaactcccctgggaccacagcagtaggcacggcattcctgtgacagaaatcaatgccacagatcgagggatggagccaccggcttcccaggttgagtccccttccggtaacacgggcacactcctttctccctccaagaagatcccagggagggcgatcccgcatggatgcgttcctcactccctttcaggtggccccagacgctgggcattgggaggtggccacgtggggacatggacatgaaggctgg

SEQ ID NO: 694699 - DNA, 162 bp, Homo sapiens
cggggggccaaaaatatttatggggggtttacggggtccaccgaaaagggctgaagggtttgggatgcaaaaaaaaaccccccccctgggaccctgcagctccaggcccctgggggggtctttgctggatgggacacaaaactggcccctctttccaacctt

SEQ ID NO: 694700 - DNA, 211 bp, Homo sapiens
catgcagtatactggtggtgccgacagacagcactgagtaggcgtacaggtctaagcggatgtccacgtcacacttcatgatggagtagaaggtagtttcgtggatgccacaggactccatgcccaggaaggaaggctggaacagtgcctcagggcagcggaaccgctcatagccaatggtgatgacctggccgtcaggcagctcgtaact

SEQ ID NO: 694701 - DNA, 701 bp, Homo sapiens
aaatttgccatccttttgccccctaagaagtttgaggccaagtttaacccaaactacctcccttgacagagtgttggaccggaaaacaagtttgtctcaaggtaaaacaacatcttgtattgcaagcaaaaggaaagggcccagtcaacttcagtttgttgtgcctcaagctgaaagctttcagaaaccagaaaaaagaggaaaggcttacctctcctaccaaagttaagtgttcaaagggaatgtaagggcctcacttgaacaaggaagcaacttgtgtaatcttatgtcagcttttttaggaagcccaagtacttatattgggcatgcacttgcctttaaaaacaatgatttgtgagtccaggaacaatttactatttttaaaatattttgctgcttctgttctgggtctgaattcccttttgtgccagatgccagtactgtctgcccattggctccaggggctgtatgggcagattcagtctccagagggtattcagatcatctgcttctttgaaggagtaaatgtgttttgttcctagggccagaggagcttgtcttccttgtcctctgttcccaccctcccctgaacagaacccagcccataagagacattctcagatgaaactctgttttcttgccccagtcaggctcaagccctgtggttgtaggaataaagcctgtgatctccagaaaaaaaa

SEQ ID NO: 694702 - DNA, 436 bp, Homo sapiens
  misc_feature (52)..(52): n is a, c, g, or t
  misc_feature (174)..(176): n is a, c, g, or t
  misc_feature (178)..(178): n is a, c, g, or t
  misc_feature (188)..(190): n is a, c, g, or t
  misc_feature (193)..(193): n is a, c, g, or t
  misc_feature (199)..(199): n is a, c, g, or t
  misc_feature (206)..(207): n is a, c, g, or t
  misc_feature (209)..(210): n is a, c, g, or t
cccagccgggttcgtgtcgccatggggcagatcgagtgggccatgtgggcanacgagcaggcgctggcgtccggcctgatcctcatcaccgggggcatcgtggccacagctgggcgcttcacccagtggtactttggtgcctactccattgtggcgggcgtgtttgtgtgctgnnngngtaccccggnnnaanaggaanaagggcnncnncatggacgctggggacagaagcacatgaccgccgtggtgaagctgttcgggccctttaccaggaattactatgttcgggccgtcctgcatctcctgctctcggtgcccgcggttcctgctggccaccatccttgggaccggctgcctggccattgcgagcggcatctacctactggcggctgtgcgtggcgagcagttgacgcgcattcgagctcaaagccccggg

SEQ ID NO: 694703 - DNA, 376 bp, Homo sapiens
taccagggtacgagcagtgctatagaattgataatgctggtacatcgctataccagatgaatgtggactgactattcaatgcgtcccattgggactgtatgatagagagctcgtcacctcaatgcggtaggtctactgcttctcgtagtgctcgtgtagtatacaccactcctttcaggttttcatccctcaaggcaaaaggaacagtctgtatcctcatctaccatgaggaccgttgtcctgggatgcatcactccatcctgtgtgtatgcacccagccggatacaaatcttgattggtggctattccaaattgggagggagacgagatagtattccaaagggcatctgggctcaaggcaccattccaaatccat

SEQ ID NO: 694704 - DNA, 257 bp, Homo sapiens
tatcaccgcctcggctccgaagtgctaggattacaggtgtgagctactgacctggccaggcttagaaacttttttagactaggcctcattcttggacctgtcctctagagcccagttttagcaagaatcctggcagtttaaaaagaatccccttgaccctttatatctgaccaagctaacctgtacttaagcaagaatcctgtctggtcacatgtagcatgaatttcccttacccttcattggaacacggtctctca

SEQ ID NO: 694705 - DNA, 636 bp, Homo sapiens
  misc_feature (288)..(288): n is a, c, g, or t
  misc_feature (294)..(294): n is a, c, g, or t
  misc_feature (361)..(361): n is a, c, g, or t
  misc_feature (586)..(587): n is a, c, g, or t
  misc_feature (593)..(593): n is a, c, g, or t
  misc_feature (596)..(596): n is a, c, g, or t
  misc_feature (598)..(598): n is a, c, g, or t
  misc_feature (620)..(620): n is a, c, g, or t
  misc_feature (629)..(629): n is a, c, g, or t
gagacttaagctgaggatcgttggatctctggggggtgcagaactgagcccaggccacagtaccctattcacgctctgtgcttgtgccaaggtttcaagtgatcctcccgcctcagcctgcccaggtgctgagattacatgtatgagccactgcaccctggaaaggagccagaaatgtgaagtgctagctgaaggatgagcagcagctagccaagggcaaaagggggcaacggccgggttcccggttgtctaatggcacatcgtggcccacaaagatgcctctgatgntctggntacctggaagagtgagcctggtcaggtaaaagcagctgttaagtatgcccttagcgtaggctaccgncacattgattgtgctgctatctacggcaatgagcctgagagtggggaggccctgaaggaggacgtgggaccaggcaaaggcggtgctcgggaggagctgttgtgacattccaaagctgtggaacacccaagcaccaccggagatgttggagccgtgccctcgggaaagactctgggtgacctccagctgagtatctggaccctgtacctgatgcactgccttatnncttttngancnggggagaacaacccctttcccnaagaatgcntgatggg

SEQ ID NO: 694706 - DNA, 904 bp, Homo sapiens
  misc_feature (749)..(749): n is a, c, g, or t
tattctggtctggttctggcctcactcccggagctctattggactcccaaaagaagcgcccaaaaagaaaaagggccataagtggagtcccgtggtgctaggattttttcattcatagctggtgctgatgagcgctcaggaatcagtgggctatcaaagaagaacttgtgatcatccaggccgagttctatctgaatccgtgaccaatcaggcgagtttatgttggactttgagtggtgatgagattttccagtggtggattattggcaaagaaggagacggtctgggggtttgaagaattgggacgattggccagcttgtgaggcctcaggggtgcattgggccaacatatagctgtggacaaagccaaccgtggaaattttgtgacaaagggcctccaattattacttcggattcaccagatgtggtaccctccgagagaggttaacgtggtgcctcacgaaacaggcccttggtggacacgtgagaagaagcccaaggttccctcaatcgtggtttacatcgaccaagtttcaccccaaccgagtgggtctcaagtgtccacggtgggcttctcgaaaatgtggaaaacccgtgtgtcacccacgagggagtgtgttcgagaagaacgaggtctttcctgtggcccgggggggaagaaccaccttttttcgcgcaagtttccacttattctcccctttccgtggctctcaatgtggggacgttttacgacgtgcagggtgtggagncacttggggctgtggtatgagcctctttctcagagcactggggagttgtgatgctccagagccctctcccagagatctacggaagaacgtggctgtgtgccctgggcctgactgggggctctggggggcatcactcatgtgggaccatcttcatc

SEQ ID NO: 694707 - DNA, 496 bp, Homo sapiens
  misc_feature (148)..(148): n is a, c, g, or t
  misc_feature (154)..(154): n is a, c, g, or t
  misc_feature (221)..(221): n is a, c, g, or t
  misc_feature (446)..(447): n is a, c, g, or t
  misc_feature (453)..(453): n is a, c, g, or t
  misc_feature (456)..(456): n is a, c, g, or t
  misc_feature (458)..(458): n is a, c, g, or t
  misc_feature (480)..(480): n is a, c, g, or t
  misc_feature (489)..(489): n is a, c, g, or t
gagacttaagctgaggatcgttggatctctggggggtgcagaactgagcccaggccacagtaccctattcacgctctgtgcttgtgccaaggtggcaatggcggcttcctgtgtctactgcacactgggcaaaagatgcctctgatgntctggntacctggaagagtgagcctggtcaggtaaaagcagctgttaagtatgcccttagcgtaggctaccgncacattgattgtgctgctatctacggcaatgagcctgagagtggggaggccctgaaggaggacgtgggaccaggcaaaggcggtgctcgggaggagctgttgtgacattccaaagctgtggaacacccaagcaccaccggagatgttggagccgtgccctcgggaaagactctgggtgacctccagctgagtatctggaccctgtacctgatgcactgccttatnncttttngancnggggagaacaacccctttcccnaagaatgcntgatggg

SEQ ID NO: 694708 - DNA, 164 bp, Homo sapiens
cgatggaaccactactcaagctcatctcaggtagaacttcagaagagcttgagtaggccaaatgttgaagttaacgttttccaataatgtgacttcttagaaagttttattaaatggggacggggcagacttattggcaattagtctggcagtgcgcctgttca

SEQ ID NO: 694709 - DNA, 209 bp, Homo sapiens
cgcccggcgtgggcagagcgccctggcgcgcatcttcgggggtgtggaggacgggcctgaagcagaggcagcaggacacacctatgatcgctccattgtagtggacggagatgaggcatcactcatggtctacgacatttgggagcaggacgggggccgctgtgttgcccggcccactgcatgggcatgtggggatgcctatgtcgatt

SEQ ID NO: 694710 - DNA, 171 bp, Homo sapiens
atgtttttttaaaaaaaaaagccaaaaattcttatggcggagttttttgtttgtttattttaggagctgatgcgggcccctccttttgctggagagttttttataaactggagcccgatttcatattggtttttaaactggggggaattaaaaacaaagaatttccttcca

SEQ ID NO: 694711 - DNA, 194 bp, Homo sapiens
ccagggcagctagggaggtataatggtggggtactaggtgggtattggtcttatggtttctctactaagaaactcttccttaaaggtggttggtaatggtagcacttttaacacggaaactatactggaacagttccaacggtacatacggtatgaagctggtcctcactacatgccaggggtaccggagctcg

SEQ ID NO: 694712 - DNA, 124 bp, Homo sapiens
gtggacgtgttacacgcagagggtaataagagatgggcagtatggacactccagatgatggtcagtgacgggctagcctgcaccaatgctcactatgtggtcctctggtgtttctcttgtataa

SEQ ID NO: 694713 - DNA, 142 bp, Homo sapiens
gatattagttgccgctttgacattctttcttgggaaagatgaagatgaaaaacaggacagtgactccgaatctgaggatgatggaccaacagcaagagacctgctagtacaatatgctacagggaagaaaagttccaaaaac

SEQ ID NO: 694714 - DNA, 850 bp, Homo sapiens
taaaaacggtctcactctgtcacccaggctgaagtgcaggggcccgacctcagctcacggcaacctccacttccggggttcaagtgattctccgtgcctcagcctcccaagtagctgggactacgggcaaggcaccaccacaccaagctaattttggtatttttagtagagatgaggtttcaccactgctggccaggcgggtctgaactccgtgacctcaagtgatccacctaccacagcctcctaaagtacggggattacaagcatgagccaatacacccgacctcatagtagtttggattcacacttccctaatgatggtgtccagatctacgggccattggttaggggtttacttctctctttaaagaacggctgagacctccataaacattttcaaaatgcaggctctgtatccagggtcaaggcacctgtttctgatgtgttttccctgtgtctctatcaccaaatactgtacatataaatagtaagactgcgctcgtgtttgtccatggttaatcctaattgcacaaaccctgggaacttggacaaatccttcagaatacgctatagccaacaatgggctaaagccaagtgtttttcctaactcctgaagcggataagtgccagaataaacacacggatgatcctttgcgggcctggtcccccgaaccttctggcacttccggattggacacacacttggccgcccatggggcaaccttgcagggaacaatgtgctaccacgctcagacgtggatggaagcgctcaaggcgcggatttggcagaataagactaccctaggaggcctgatacgacgagaaaacagacctctcactctgttctaat

SEQ ID NO: 694715 - DNA, 143 bp, Homo sapiens
cgacatcctacaatagcgcggctatgcccctgtatgtaattgcacacggtcacgttgcatgcagtttgctgagctgaaggacaagattgatcgccgttctggtaaaaagctggaagatggcctaaattcttgcaagtctggtg

SEQ ID NO: 694716 - DNA, 347 bp, Homo sapiens
tggttttttaatttaaattttttgttattttttaaaaaatatttttaatccatggttggttaaatctgtaaatataaagggccaactgtactgttagacacaagggtttcgaggcttgcagataaagactgaataaccctttccatgatgatcccttagagttcccccactgtgcctttttttttacatgggcatgcaaacatgtgtttccacatacattttttttaacaaaaattgaattatgttgaaatatgtcctgtaatttgtgttttaaacttaataaattttaggcattttccctgtgtgtgtgtataatgcagctattaaaaatgagtttgaggccagga

SEQ ID NO: 694717 - DNA, 413 bp, Homo sapiens
tggagtcggggggtttgggcggggcctgtcttcctggggacaggccgtttcttcattcaggaaacaaaaagggcctttgggcttcacccaacaggactcttgaggtgaagtgcagatgccacattcaagggaagaaccttttgccccagctttgcaaaatgaaaagctttcccccttgggttttatttttccacaagagctttgtcaggaccaggttgtttctggttcagcaactttgcaaaaaatgtccccccctggggcttccttagctcctgtttttggcctgaagcctcccagctttgatggcagggcctcattttcaacttttggggttccctttacctaaactgtcctgccccccgggcatttggactccccttgtgccccccattgcatttttaaatgttttccca

SEQ ID NO: 694718 - DNA, 993 bp, Homo sapiens
tgtgatacgggtgctctacctaatgcggactaggcttttaccgcgggtcgttatgccgctttctgatactccatgtgcctgcacggttctcagagagtacataacgtgcgctccagagactgcgtgtgattttccgagggaacgcggtcctggacagctctgcgcgtggcgcgctggtgcgtcgggacccttcacaggttgtcgctttgggctcgtggtcgacccgtccgctgcttaggcttacgaggttggtgaagtagacatcatgctcgctatcagggttgcgttcaggtgcgggagatagacgtccttaatcattcactcggaatcggaggtaggagtcgccagggcagaacgactaatcgctagggacgagagaggggctatcggtatatccatgagtcaccgtaagagatcttgcacattatccaattttattgatactcgaaacatctaacggggactttatcacccctcggtacacaccctatctcatcccgcgcgtcatcatgtgacatcccaaaaaaaggatccttgacgaaaaaatcgagttgacatattgcgtccctcgtagatgtacgttgggtggcccttctgatgctcaagagagtcttgctagcgcatgcatcctctttaatctaatgttttaactatacagccacgtaagggactcgagatctatcgtagggagaccagaagtggattcctcgctgctgaatctgccctgggcgggacgtggtggcgccacgggacgattgtgggcaaggtctacagctatcatggttgccctcaaacaccgtgggatcttagggctcgacgcccgcgaaccccgtggtattttcgaattgctctcgactctcaggcctctatgtgatggaacatcaacgatgtggcgcatggtgagcgtgttatgcctttccttctttggcgtatgatgtgtgcctactactttacccttagaggtgacaagcccgagaaggtacttcgggctgt

SEQ ID NO: 694719 - DNA, 1213 bp, Homo sapiens
aaagagcaagagggcagggagggagcacagtggtgtggccagcgtagtggtccagcactgtgtgggtgtgtaccccatgtgcctgggtcagacatgggacatggcatgggtgacacatgtgacagagtgggtccccagctgccacctcacccacctgcaaattcatttagtagcatggcacatgggtgcatgctcctgtgcactggcgtttcctcatgtgccttatgcctggacgcctctgatgggcttggagatgctgggaatgacagtgcatgttgcatctggtgagagttatgcagcagtgactgtcaccatgtgatggcgcgaatgctgggccacgtgagacgggggggcccctgtggaccattgcggcaggcaagggaggtgctggcagtgggctcagggccctgctgaggccggccgggtcccaacagatgcgcacttgctgggcccaggggatcataggatagcagagagcaggggcccgacaagtgtgcgacatttggagatgacctgcttgtattgccgctgtcagcgggcatcaggcccccttggggggcctgcgctttggggcaggaaccaggtaaccaaggcattcccagggggcaggtccaacagggggcattaggcggccgaagacccaggactaagagccgaaggccgggacacgagaggcgcgagaacgtttgcaacctgaccgcgctcttcaaggggaacggcgggcacgcggaatgggttgccacaggcccatgtggcggcatgaagcggcacgcacggcacacgccgtcaggcacgtgcccgtcacgacgggtgacagaagtcccctttgggcccattacccaggaagtccaccgtggttgagccacaaacgtggccgggggggcacaatcccgctgcagaggaccaggcgacaaacacagcggggaaggcacccggagaagcaacaccaggaaggaccccacacaaagagacgacaagtcaggagcgaggcccagtgggcgcacgcacgcgaagaggagcccgaggggtcaacacccaagaagcatgaggacagactgggtagacacgccgtgccccaccacagaaacatgcgcaccgcagagggcgcacaaggaacaagcgcacacggggcaccacccgaggagagtacccacagcgcttaaacaccaggcgagccagagagacaccgagagaaactgtgtagcacaacgag

SEQ ID NO: 694720 - DNA, 954 bp, Homo sapiens
ccatatgacaataatcgaatccttcaatgtgtgcaaaggaagtttctagaagtatgtttagaatgaatacaaaaggtgcgatggtcgggattgacttcacttaggaatgtaagtgtgaggtagatatgtttaaaacccttcatggatcagcattattctcaacgaggacacacacaggtgcttgtaccgttacatttgattcattagactctggtattaagtcagatcaagttataacagctataaatgggatacaagataacaatttcatgctgcactacgagtctcctccttatgcacctaatgacaattggccaagtcactggttcaactagacaggagaactcgggccatggtgctcttgctgagaaagctcgcgtatcctgttattccccgagattttcctttcaccactcacgagtcacactctgcaaacgtcctagagtcaccactggctcatcttcctactggcactctgctgtgccggcacgctccacccattcacaggattcacgggcgctccaacatccactctgctgttgcacgcgctacccaaccacggatggtcacccacaaccgatcctgacaccgccgcacatcgccgatcctcgcacgccgacaccactatccgcccactggagcattcacaagggacagggacctacacaccagccggcccctaaattaacagggactccacgccattcccaggccggaaactccaataaccgggactacgccctccacctgcacggaggccaccaccaccgcttcgcggccacaacggaccttgtaccgagtcagaccaccgcccccccacccagccccccaacggacatagcccgtgcaaccgacgccccccccacgggacaccgcgccgcgccacccaaccacagcccgccgcacacccggccaccacgcacgcaaccgccacgcggcaacgccccgcgcacc

SEQ ID NO: 694721 - DNA, 183 bp, Homo sapiens
agctcgccctggttatggcatggatgggaaataaatccgactaatatcaggcgcttccacctcagtaaaatgtcaggggtccagcggtgtggggcctgtcgagatattccttttaagatgaaggacaagtcgctgcatttggcccctcctccaacagtctaaataggcccactaagcaggggt

SEQ ID NO: 694722 - DNA, 864 bp, Homo sapiens
tcgctgcgacgataccggatctcattgtcacgcgcccccgaagaccgcccgacgtgcattcccgattccttaagggttccaagtccaatatggcaactctaaaggatcagctgatgttataatcttctaataggagtaacagatcccccagaataagattacagttgtaggggttggtgctgttggcatggcctgtgccatcagtatctctcactggaaaggatcctttgtcgaggatgagagcttgcgtcttgtttcgactagtcaatacgagaggacaaaattgataggggagtagcactgaatagggcactcgtccacacagttaggtcagcgctttctatcctatagacacgacctaaagattcgtctctgtgcacaagaacttagtaatgtaaactggctaaaactccatagctggttcattatcaccggttgctgcacgtcagctggagggagaaagccgccttaatttggtccagcgtaacgtgaacatctttttaattacatcattcctactgttgtgaaatacatgtccgagactgcaagtcgccgtgtatttgtcttgcaaatccagtggagtatcttgacctacgtggcttggcagatacgtgggtgttcccaaaaaaccgtgtttattggtcagtggtgtgcaagtctgtgatgcaggcgcgattctggttaacttgatgggggtgaaaggctgggagttcagcctattaagcttgtcatgggtgggtccttgggggacaatgggatattccaggtgtgccctgtatggcggtgggcctgaatgttgccggggtctctcggaaaaccttgtggcaaattaggattgctcaataagatcgggaaggtcaacgg

SEQ ID NO: 694723 - DNA, 758 bp, Homo sapiens
tgtcatggactggctccgtgttaatcggccgagggggacgcaagattgttgcggaaacgctagctgtacagtttgttagtgactgctgcttctgggactcctgttacccgcaatgtctgacctgtgcggtgtcgtggagcctgaacctggatgtgagctgatgtgatgatgcgttatgtgtgatcgatgatcctgcctgttgcctgtcatgggagtggcagagccaatcttctgtgacgtggtgattgtctcctctaagtacaaacagactgctatgagtgtcacctgccagctggagctatacacttccagcgtgaaagggaggagagaaacacctgcttaccaagggcctgggatccctgagtatgttgagcccaatgagagatgctccctgcttgctgaagacaaagtgactggtggacatatgaattctgttattggacgccacatccagcaataccacatggaagatacagagatcaaaggtgaagtcctctatctcggatactaccaatcagacatcgactggagatgatgaaacagccaaggactccaagacagcatcgtcttaaacgcaaccacagacagacctattgcaatagggtccaagtgcgaccttatgggagtgcccgagatgaccaaggaacagggatcatctgtaaacaaaagtgcaagtatcactaggaggaataaataaatcgagatgaaaaaagccatataacagcaatatagagtagacaatcgaaactataaatagc

SEQ ID NO: 694724 - DNA, 923 bp, Homo sapiens
gagccgcgccgcaggagaggcaggctggaccgggggctccccgggcccgcgagccctcacgttgactcccagcgatgcgcctccaagctcgtcccccaatgatgatgaacgaggcagctgcaccgcaatgcggcagtgtgcgtccagacggagcacgcattgcgagacagcaccccgcgagaccgcttgagattcctcggggtgagcgaccatgcgtgcatggctacgaactcagcggcatgagacgcctggaccaaggctggcgcacgcctcactatactatccatcaactcaggtctgcacgcgccgttgttcctgcaagaggtccaagaagccgggtgcagcactatggcacacagcgcgtgtgcaagcacagccttcccacttctatgggcctcatgtctcgatccatcgatgcgctcgcacgcacgcttcacaggcacgcctggcaccccttgtcattcccacgcccattgcgcgcgaacgcgcgctttcggccgactcgaccgctcgtgccattccaccgacctctatgcctgcgcctcgctctcctctcgcgccgccgtcttcgccgcttcgacccttgtgctgcgcgcgtaccggtcccttgttcgcctcgcgttcagctctcgcgcctgccagcctgcagcgtagggaccgcttgccctgtgcccatctccttcctgcgccctccccacccgctgccctcgcactcgcaccccctccgctgttccccgacctgtgcgcacacgcaaccacccatcccaccaacagccagcgccttccagtcccagtgccaagcccacaaccaacctttcacaggccacgccatattctcacgggcccctacactgaagcgccagcccccgcgcgttacgttcaccacgccaaaacagcacccactggcccaacccccaccggtg

SEQ ID NO: 694725 - DNA, 511 bp, Homo sapiens
  misc_feature (17)..(17): n is a, c, g, or t
  misc_feature (27)..(27): n is a, c, g, or t
  misc_feature (247)..(247): n is a, c, g, or t
  misc_feature (286)..(286): n is a, c, g, or t
tggaaaattactgggangagagattgnagccagggattcccagagctggagcatctggatgtggtggagagaagaacccggaggactgggctccggaatgcctggcagagaggctcccaccctttgtccacagaggacaggacagagtgaacattctgcaacattccccaacagcctgcagagtggagaatgtctttgccagctatgcctcagacaggggctgggcgtctagaatatataaagaacntgcagtaattaaacttcaaaatagctagtcaataaatcnagccaatgaatggaagataccgttcgcaaaagtaggaccacatatggacaccagagattaaaaaggcgttcagcattcttagttaccagctgagtgaaaattgaagctacgttttggattccatcttcccctagtgacaattactaagataaagaaaagagacagcagtgctgttgaggtaatgtaacctagtacagccattatataaattagtatacatttcta

SEQ ID NO: 694726 - DNA, 149 bp, Homo sapiens
acaataccaatccattactctccacttccgttcttgcccttatgctgacttacagcatagttgagcctccatgtactgcgtagtaatcttctccatttgctctctttactctatttcatgctcccactttatctataccagcttatctg

SEQ ID NO: 694727 - DNA, 127 bp, Homo sapiens
cacgtggtaagagaacaagaacaagaactgctgcggcagttctctgatcttctccatttggcgtggtcagtcctctactcgggcctataagggcggcggtgctcttctatggtgccagagtagagta

SEQ ID NO: 694728 - DNA, 220 bp, Homo sapiens
ttcagcccatacaaacatattgcaatatatagcattctaggccatcgtagggtgtttattcaaacatggaataatcattcacatttctgtaactgctctttctctcttactatattattgacattccttcagatcaatctacagagattatccgtataccttttaagagctccatgttattttatcatatgggtttatgctaatgtgttaaaccagtccc

SEQ ID NO: 694729 - DNA, 1426 bp, Homo sapiens
tccgcacacaaggacggttatattgggtcaaaagagcaacacgcaggcaaaattaaaaaccccaatataaaaagtgtagagtgtggtgtggaaaggttgaaaactgtgcggcccgctgtggactttggctttgaccttgttaaggggtgtggagaggggaggattagccaccgaaaaagtgcttgctctccggcgcccaaccaccacccctgtggccagggcttctctcccctctcccaggggggccacggcgcccagtgtctcccacagggggggcttcgccaagaggccctgtgtgtgtcgtcgccttgtgcacggatattctcccctgtgtatgtgcacgctttttgtggcaacctgtgaagaggcgaggggtctctctctcgctgtgagagtgtgaccacctgtggagggtcttctcctgtgagagagcaccctttctgtgtggcggctgtgcgccccacaccctctgtggcccctatagcgtgtggctgtggagtgtgccagcctgtgtctgtgtcagagacacagagggccccctctctctctctctctctctgacgtgtgcgcacgcacttgtgtgaccacgagtgtgtgcgccgagtgtcgctctgcgcgcggacatgtcgcccaggcgccagagggcgtcgccacacgcgggtcgcttctccttgaggagaccgccccacacgaggcgtctcaacacacaagcacaaagcgggtccagtcgtgggggagcacgagagtgtgtggagagcgccccacattctacagacgccctcttctgagggcaaacaccttgttgcactaatctctctctctcggagagagggccgccctctctgtggatgttatcaccccttatatcaacaacgagacacatttcatcacccgctctctgtggacccgtgttgtgccacgcgggcacaaaagatgcggcggggactctccccgcctgtggtggcccgcctcattaggaagcaccatatccttctcgacaaaaaagttgttcgcccacagggtggcaccacaaaaacagcaggcctatctcgtgggggcaatgttggcgcggtctcatccgggatacccccctctctttcggtggtttctctcctgttggcccctactccgcgtgtgccttactatcttgtgtgcaacccatactagtggagggcccctcgtcgggacgggcggcaacttattttatgcctaaacggccgaccctctccacgtttctcgtggtcaaccacactctcgtgggcgaccgcccccccaagagcgggctgtctgtctctcgcacgaccctcttcccgacgacagatctcccctacacaagccctttttagggcgcgtccctccgtgcgcgtggtgtcgctctcttcaacccccccctttggtgggtcttctgcggtggcgggagccccta

SEQ ID NO: 694730 - DNA, 307 bp, Homo sapiens
  misc_feature (1)..(1): n is a, c, g, or t
  misc_feature (29)..(29): n is a, c, g, or t
nctcagagtaacttcaatgagcttcttgnaggataccagactctataaccgccaccacaatcaagatatcaaagttttatcaccccacaaaattccctcatacccctttgtagaaaattctcgcccacacccagccacagacaaccactaatctgctttctgcccctatagttttttgcctttttcaaaatattgtgtaaatgaaatatcgccttttatgtctggcttctttcatttttcgtgatacttttgagactcacccaagttgttgcatgtatcagtagctttgatccttttcattcgagca

SEQ ID NO: 694731 - DNA, 427 bp, Homo sapiens
tctagcaggacctgtggtcgatcactgtactccagcctgggtgacagagcgaatccgtctcaaaaaaaaaaaaaaaaaagattaggcttggtgggcacacgcctgtagtccctagctactcaggaagctgaggtgggaggattgcttgagcccaggtgttggaggctgcggtgagccatgattataccactgtagtccagcctggacaacagaacgagaccctgtctctaaaagtttttttgtacacataccataatacccagctactgaggaggctgaggcagaaagagtgcttgagtccaggagtttgatgtcagcctgagcaatatagcaagaccctcacctcttaaaaaaggtagattaaaaaaataccacaatggctcaggtagatggaaaaacaggcttatagtacagtgatcgaccaagg

SEQ ID NO: 694732 - DNA, 177 bp, Homo sapiens
gctccctctgtgtcagtgaagcctccggacccaggctctgctctgccctgccctgcaccccctcgtcagaagtacatgaggggcgcagagatgagcacacagcttttggcacggtccagggcaaacttaaatttacgccttaattttttaacagaggttttaatgcctttttttcaa

SEQ ID NO: 694733 - DNA, 122 bp, Homo sapiens
aatcgagctcgtacctctttcaccttctctcctcgagctggctgtatgacctcacctcccgtccccaaaaatcccacaccgtgcagcgcctgcagcaagccgggatctccctgtccctggca

SEQ ID NO: 694734 - DNA, 299 bp, Homo sapiens
  misc_feature (23)..(23): n is a, c, g, or t
  misc_feature (51)..(51): n is a, c, g, or t
  misc_feature (66)..(66): n is a, c, g, or t
  misc_feature (145)..(145): n is a, c, g, or t
  misc_feature (182)..(182): n is a, c, g, or t
gctcctatgtctgaaaacatctntatttctctctcactttggaaagattanctagtctgatggttntcagaaaagagaatcagaagttttctagatcttccactgaggctattgacagggaaaagggaggggaaactgttaagcnggtaggatatgggttctacattccagccgtagcgatnccctctttattacttatatatatatttacatattgagtttctacataatattgtttagaagaaaggatcttattaatagataaaatctaaaagatgttattataatctaatccatct

SEQ ID NO: 694735 - DNA, 564 bp, Homo sapiens
  misc_feature (2)..(2): n is a, c, g, or t
  misc_feature (150)..(150): n is a, c, g, or t
  misc_feature (154)..(154): n is a, c, g, or t
  misc_feature (182)..(186): n is a, c, g, or t
  misc_feature (207)..(207): n is a, c, g, or t
  misc_feature (222)..(222): n is a, c, g, or t
  misc_feature (226)..(226): n is a, c, g, or t
  misc_feature (237)..(237): n is a, c, g, or t
  misc_feature (248)..(248): n is a, c, g, or t
  misc_feature (257)..(257): n is a, c, g, or t
  misc_feature (284)..(284): n is a, c, g, or t
  misc_feature (300)..(300): n is a, c, g, or t
  misc_feature (306)..(306): n is a, c, g, or t
  misc_feature (318)..(318): n is a, c, g, or t
  misc_feature (324)..(324): n is a, c, g, or t
  misc_feature (337)..(337): n is a, c, g, or t
  misc_feature (385)..(385): n is a, c, g, or t
  misc_feature (414)..(414): n is a, c, g, or t
  misc_feature (431)..(431): n is a, c, g, or t
  misc_feature (460)..(460): n is a, c, g, or t
  misc_feature (551)..(551): n is a, c, g, or t
cnctttaattaaaaaaaaaaggaaaaaggggaaacagaggtaaataaattaggaaaacacacacacggagaaaacaaacaaaaataaaataaaataaaaaaaaaaggtgttaactaggaaggatgggttaatccaaaacccagccctgantccnggctcccccccagaaaggtggaccaggnnnnngggggaccccaggggactttnaggcccagggaagtnattnataactcaganccagaggcctnctggaagcngtttccatggattctgccccaaaaccnggaatggaagagggcnccgccnccggctgaggangggctncggggggaccggnggcagccaggcccccctgagccctgagggaggcggaggtcaccgcccncccccatgtccttgttagtggacacaggngaccgggaatccgggcnggcaggcggggcgggccgtggcacctgcngtcttgggaaacacaggtcaatacatccacacacacacacacacacacacacacgcgggggacgccggcccccaccacccccccacccacnccatggagaggca

SEQ ID NO: 694736 - DNA, 179 bp, Homo sapiens
gtctgaaatgtgttctgtcagcattcactgaagcagaaaggggtgtgagagatgggagggaggaccgtgaagtacaatgtggcttccatttatccaggtcagatgacacactgggacacctccacactatccctggctgaatccagtgctggctctggaacacgagtcgcctaggacct

SEQ ID NO: 694737 - DNA, 210 bp, Homo sapiens
gtggttcggcaacgccggatcgttgacccatggagcaagggcagggaccgaacccgcaacctcatggctcctagtcagattcattaaccactgcgccacgacaggaactcccccatttcttattctgatacttgcttgtggcctgagtctttttcttcaactgcaaagtggtgatgacattaacatttacctcaacgacgacgacgacga

SEQ ID NO: 694738 - DNA, 187 bp, Homo sapiens
gctatgatctttgtacctttcatcattataggacagaaatgtagtatctattcatcactcttcctctcatttgctccaacgttattcatttcagatcgttacaagtcttaagtaaatacactagtatcctattaacatgacactgatatccatatcacacccttcccttcctttatctgctgtaccc

SEQ ID NO: 694739 - DNA, 331 bp, Homo sapiens
  misc_feature (121)..(121): n is a, c, g, or t
  misc_feature (128)..(131): n is a, c, g, or t
actgtctggcaaagggtgcgaaagggagcttgtgctcaggagtccaaccgcccagcctcggggtgtaggttttttaggtgtgccattggggcctcagccttttttggtgacaaagggtcanctgtggnnnncacacacaacccccacacacccaaccacacacccaaatgggggcaaccacatccagtacaagcttttacaaatgttattagggtccttttttatttttaatgccttgtccttttaaaagttattttatttggtattattatttgtttttgactgttaattgtgaatggtaatgcaataaagtgcctttgttagatggtga

SEQ ID NO: 694740 - DNA, 329 bp, Homo sapiens
atttgacacctttcttttgttttatcaaataaataaataaataaataaagaccagtgcgtgaattaacctcagtggagcctcatttgcagaagaaccattattttactcaaatatctagaaaacaagccttggcagggtgtgggggctcacgactgtaactccaacaccttgggaggccgaggcaggcaaattgcttgaaccccggagttcaagaccagcctgggcaacatggcgagacttcatctctgcaaaacatataaaaaatggtggtgcatgcctgtgatcctagctactcaggaggctgaggtgggaggatcgcttaagccca

SEQ ID NO: 694741 - DNA, 916 bp, Homo sapiens
gtgacgcgtgaggtcgacccacgcgatacgggaaaagctagtcttccagcagcctccgtgtcctcgggttcctaccggcttctctgcattcggtctgctgatcatgttgccagtaatgtgtctggcaagtgtaacacattcttactggttaaagacgactaccaggtatctaacttgtttaacattgagtttgtgtgtgtgtgtgtatgtctgtgtgctaggtatatcgtaatacattattgagaggtagcattctgtttcaaatgctttcagtacttctgacagtatagtagactgggatcataacatttacgagctgtaggttagagtggatcatcaattcaacaagatttcaacaaggtacatacgctgatgctatcttcaaaacctctgagtactggcccccaatttcgggcatacaaatgtataaaagctattaatcttgagattcaatacaagatctccttactctatctatataggctcatggtatcctactccggtctgacagcttctgaatgctagagaaagtggaactgatcccccaaagcgctagcactgacacaccacacatactaaaacaccataggagaccccgccacacacatacacatggagccagccaaagaggacatacgccacgcagacagctgaacctgccccacaagcctcactcccctggaggcacaagaaacacacacacggcctaaaccagctctacgaatgggcaatcctccagcacacaaaggtcggaaaacacccccaagcgaacacacaaagggcaggtgacgacaatccgaaggaacatagggcatgacataaggaagaacgcacaccaggcacacagcgcatacacgagagccgcggacttcctgggccggtggcaacacaaggcgacaacacccgtaacagcacc

SEQ ID NO: 694742 - DNA, 692 bp, Homo sapiens
  misc_feature (126)..(126): n is a, c, g, or t
  misc_feature (138)..(138): n is a, c, g, or t
  misc_feature (140)..(140): n is a, c, g, or t
  misc_feature (151)..(152): n is a, c, g, or t
  misc_feature (156)..(156): n is a, c, g, or t
  misc_feature (168)..(168): n is a, c, g, or t
  misc_feature (174)..(175): n is a, c, g, or t
  misc_feature (183)..(183): n is a, c, g, or t
  misc_feature (189)..(189): n is a, c, g, or t
  misc_feature (199)..(199): n is a, c, g, or t
  misc_feature (201)..(201): n is a, c, g, or t
  misc_feature (204)..(204): n is a, c, g, or t
  misc_feature (206)..(206): n is a, c, g, or t
  misc_feature (212)..(212): n is a, c, g, or t
  misc_feature (215)..(215): n is a, c, g, or t
  misc_feature (218)..(219): n is a, c, g, or t
  misc_feature (227)..(227): n is a, c, g, or t
  misc_feature (230)..(232): n is a, c, g, or t
  misc_feature (234)..(234): n is a, c, g, or t
  misc_feature (243)..(243): n is a, c, g, or t
  misc_feature (255)..(256): n is a, c, g, or t
  misc_feature (272)..(274): n is a, c, g, or t
  misc_feature (282)..(282): n is a, c, g, or t
  misc_feature (288)..(288): n is a, c, g, or t
  misc_feature (293)..(293): n is a, c, g, or t
  misc_feature (307)..(307): n is a, c, g, or t
  misc_feature (310)..(310): n is a, c, g, or t
  misc_feature (312)..(312): n is a, c, g, or t
  misc_feature (318)..(318): n is a, c, g, or t
  misc_feature (321)..(321): n is a, c, g, or t
  misc_feature (324)..(324): n is a, c, g, or t
  misc_feature (332)..(332): n is a, c, g, or t
  misc_feature (335)..(335): n is a, c, g, or t
  misc_feature (337)..(337): n is a, c, g, or t
  misc_feature (347)..(347): n is a, c, g, or t
  misc_feature (349)..(349): n is a, c, g, or t
  misc_feature (352)..(352): n is a, c, g, or t
  misc_feature (354)..(354): n is a, c, g, or t
  misc_feature (357)..(357): n is a, c, g, or t
  misc_feature (359)..(359): n is a, c, g, or t
  misc_feature (361)..(361): n is a, c, g, or t
  misc_feature (363)..(363): n is a, c, g, or t
  misc_feature (367)..(368): n is a, c, g, or t
  misc_feature (370)..(370): n is a, c, g, or t
  misc_feature (381)..(382): n is a, c, g, or t
  misc_feature (396)..(398): n is a, c, g, or t
  misc_feature (404)..(404): n is a, c, g, or t
  misc_feature (408)..(408): n is a, c, g, or t
  misc_feature (422)..(422): n is a, c, g, or t
  misc_feature (435)..(435): n is a, c, g, or t
  misc_feature (443)..(443): n is a, c, g, or t
  misc_feature (447)..(447): n is a, c, g, or t
  misc_feature (452)..(452): n is a, c, g, or t
  misc_feature (477)..(477): n is a, c, g, or t
  misc_feature (483)..(483): n is a, c, g, or t
  misc_feature (500)..(500): n is a, c, g, or t
  misc_feature (523)..(523): n is a, c, g, or t
  misc_feature (540)..(540): n is a, c, g, or t
  misc_feature (542)..(542): n is a, c, g, or t
  misc_feature (546)..(546): n is a, c, g, or t
cgcggcgactggtgggcttggcgtccctccgggctgtcagcacctcatctatgggcactttaccaaagcgggtgaaaattgtggaagttggtccccgagatggactacaaaatgaaaagaatatcntatctactccantnaaaatcaagcnnatanacatgctttctnaagcannactctctntcatanaaaccaccancnttntntctccnaantcnnttccccanatnnntnaccacactnaactcttcaagnncattcacaactctccnnncatcaacnacccantcctnaccccaaatttcanacncntccacncanccntcaccaanaantnctactcaatngnctncnacnanancncccnngnggacaccattnntgtgggcaccccannnatcatnaaanacatgctgtctgcngtcatgcaggaantgcctctngctnccctngctgtccactgccatgacacctatngtcaanccctggccaacaccttnatggccctgcagatgggagtcantctcgtggactcttctntngcangacttggaggctgtccctacgcacagggggcatcaggaaacttggccacagaagacctggtctacatgctagagggcttgggcattcacacgggtgtgaatctccagaagcttctggaagctggaaactttatctgtcaagccctg

SEQ ID NO: 694743 - DNA, 359 bp, Homo sapiens
  misc_feature (5)..(5): n is a, c, g, or t
  misc_feature (100)..(100): n is a, c, g, or t
  misc_feature (102)..(102): n is a, c, g, or t
gactntgcgacaccaaacactttacttccaacggtattattaatatgacaacgaaatacttctgttcaccttttcaatacattcaaaaagagagagtaananagagaatgttcccatgctctggggtggacgtggctcagctcagagaggaagccctggctgaaaaggctgcagcttaggctgttactcttcttcactcagcccagcatgtgatcacatcttctgtcactcaggtcctgagggggcgggaccttaagaattatccaatcagggacgctgggctggaaacgtccaatcaggcaagcagccggaccgaacagggcggcttctggtttggcgggcccttctgtcgtcttctc

SEQ ID NO: 694744 - DNA, 111 bp, Homo sapiens
acacagcgtgatgtcccactaaggacgtactggataacgcgtgagcaggtagttacctactgatatgtgttgtgcatggtatctgctcgtacgagagacgagtcagacttt

SEQ ID NO: 694745 - DNA, 1690 bp, Homo sapiens
ctggttctggttgctttttctcgttgtttttcggtcgtgttttgatgatgtgtagtcttgctgtttgttctcctgtcatttgtcctggttttctttcccccgttggttagctcctcccggttatgtctcctggtgcctgttccctctcttgcttagttgttgctgtcctagttgtgtcctctcggtctcggagtttgcctggtttgtacctgcccgggttttacttgttctttttactccatttttgggccctcactgttatggcgtgttctctatgttgtgattcacttgttgtggctgcctgctatgtggtcctgtgtgctgtgtgttctcctgctttcgccgtaacttgacccccgggtactgttttccgtttggttccctatcgggtgttcccgttgtttatatggcctctttggctctgtttggtcctcagttgtcctgggatctatatccttttttggtaaaatgtctacgattgccgggatatcctcttaatatacggtcaatcttctgacatatgttcctaattatactaactcttttgattattatactctttttcaataattctcttccatacctcttccgaactctttaactcctttttaaacattccaattccttgtgtcatttttatgtgaatactccttcaagctatgtctaggccaaagtcgtgctggaatcttccctctgtgttgtcctctgggatttttcctcttttttttacagtgaacttagtagtcttttgtggtcgtcatgcccctatctcattgtgtatcaatgaatatttatggtgttagtcgtgtgtgttcggtctcttggagatttttgattcttttgaggtgggctgttccatggatagttgaattgtgtttggtaggtcatttcgtatacaattttgggttattgcagcgtaatccatatggacctgcatttttgtgtgttctactcttggtgggctctcttttgggcactgtcttgactgatcgaacatcgtgtactcgtctgagtaaaactgtgcgggtttagaggtaggcatacacgcccagaatgacttttcgagaggccttcgcttgtgattttgaccttaaactggattgaaaccgtttgcaactgctgtcttgtgttatatgtggctgttcaggtatgactatactgttgttttcattgggctcttttattttaggacgaaagaatcctggattgtgcactatggttgatgtgcttgcttaaagctgaacatgtggattgaaagatggtgaggttgtacaaagattaggattagtattgtgtaatgctgacacttaatagatatgggttgcctacggctagactctcctttcagtagacctgcccagagcagaccatgcctgtgactgtgctctgcagtgatgtattgaattgtgcactctcactgtgtaactggggtgccaagtgtcttgtgcatttggaagtgaacttacctgccagtgtattgaatgtttatcatatgcataatgttgcattgttgtccaacattgataggtaattttaataagtcactaagagattcattcttttacttattcaaatacaaaaaaatagtgtaatgatcagaatttaagatgtgtgattctttttcttctgtaagtatgtattgaacctgctaattaatactggacgacctgttcctttctctcctttcctt

SEQ ID NO: 694746 - DNA, 163 bp, Homo sapiens
aggggggggcccccccccccccccccttttttttccccattcccggcctttttttgccgggggggttttttggtccccccttttccgggggggggggttttggcccttttgggggcccccctcccccgggtttttttccccttttttttggggggccctttta

SEQ ID NO: 694747 - DNA, 433 bp, Homo sapiens
ggagcatgctaagcagactggtgtacaaggcctacgaaggagcggcgggaaagcatcaagcagcggcttcgcaccggttcatccagccccatggaactcctatcctactatcaagcagccggtggcagccaccatgacggcggcgagggccgctgactacctgcacgtggctctagaccgtgcctggagagcgaagctcgcggtctcctttcgcgatcgccttccaatgtctcgtgctcttctgatgcccgtccttctgcgtgtcttgtccaggtccagcggctccgcctaccaagacgtgagcttcacttgccccgagcaggccaaataccgcgccaatcaccgggatctgcaacccccggacgccgcccctcgctgggggcctccgccgcgtgcctttttgcgctggctgccggccgcatatgaggactgc

SEQ ID NO: 694748 - DNA, 203 bp, Homo sapiens
tgctcacagattgagcgaggtagcacctcctaccagcactcaagtttatcagggccgcgttctaaacattctactgaagtttgctaagaaaccattaggtgaggctgggcacagtcgtcacgcctgctatcccagctgctcaggaggccgagacgggagaattccttgaacctaggaggcagaggttgcagtgagcctagatc

SEQ ID NO: 694749 - DNA, 121 bp, Homo sapiens
cctttgtaattttttcccccaaaaaatgggcctgtgatatatttttaccgctgaaaaacgcaataagagaagagacagcttgcatccttgatcatagacacgcagctattacattcaggta

SEQ ID NO: 694750 - DNA, 219 bp, Homo sapiens
tctattttcattctttttgtctttagatctgctaattgcgggggtttcttaacgagaaattcacacacccagtgaggctcctcataactttaaagattatatagaacttttcaaagccttggtgttgatcgcctttgctcacaatctttagtatagttcattttaagatcatgtcatctataaattgtttctcttcatatcttctatctacacatattt

SEQ ID NO: 694751 - DNA, 306 bp, Homo sapiens
cgacgtttttagaaaagcagaaggaaaaaaaaaagaaaaaaaggaaaaagcaagcctgctagagccatgtctttgagctggctggacttcctgtcagttatgaaccaccatgtgcgtgctaggaatgaaacctaagtcctctgaaagagcggcagcaagagtctctaaccacttagccatccctctaagcccgacagtgattattttcataaccttctggaggggggttagatttttttttaatctgggattgttcttactatatcagaaagtaaaagggatctaaaaaaaattttttgtcgacgc

SEQ ID NO: 694752 - DNA, 1410 bp, Homo sapiens
ggacgcgtgggctcggcaagaaccagcgcaagagggaagcggagttatagctacccctgtgtctgctggagcctggctcactgcactaccccacgcccccttcttatcctccagacagcctgaagatcgctggtgctgctcaatgtgctggtgccttggcaggtacatgttctgcgatcgtagcagctgcacggccaatcgaccgtgcatggccagtgactgctgctctgtcttgcattctatgacactctgtggaacgatggtgacaccacaggtataccttgcgcgcttgggcgtgtcaggatgaccatgcactgaggtcacccaatgactcaacgcaagtcacgcacactgctggccagactgtggttgggaaccaaccaaatcaaaagcaccttgtcatgtccctccgcgtcatgcaggtcatccagggcattgggtccaagcaacagcctcccttgttgcaacagccatccaccagtggcagcagccagccatgcatcactccaatgtgactgggcactactggctcacgacgcacaatgtgtgccagcacttgaaaccccatggaactctggggctcgaccttcatatccgactgccaagcaaacacacctggggctgaacattccacccagggaccataacaatgacagcacgtgacgggacgctctcaggatcctccgctaactaggctggtctggcacaatccactccacacccttactcccatgaggcaactggcggaaccaaacgtgctacactggtcacagcacggttccaccaaacggggagaggttccccccgcatgccttacgcgcccaagacaaagagtgagacacaacacatcccgagcacattccctcccaacacagccataccaacacagccaagacgggcacagccccccccatggtggagaagaccccgagagagcaccgaaagctcgaacggaaggaaacagaccaaagaacacatatgaggcaccacggagcacgttcgacagaccgataacaaaccccggaaaagcggacgcgccaaggacgacgatcgacgcgaacacaaggcgacaaaaccgacacagaaaggcgtggtacccaggaaggggtagccccatggcacatgggacaagacgacacgagcgagcagacacacagcaaaaggacaacaaaggcgaaacaccccaccgcagagcgtagggagcaaaagatgcaccaacaagctgcaacagaacagaagagagaagcgactagaccgcagcggtcagcgagagaacagagacacgaagagacgctagagaacaagcagcaccaccgcgtcgtgcggccgtccctccgtaccccgaacacgacaagcacagaacagagcagagaacaagagagacaaggagcaacaacaacacgcaacgac

SEQ ID NO: 694753 - DNA, 370 bp, Homo sapiens
tagtgcttatacttaggataacagctttacttagaaatgtgagttacactgaggacatagccgtatcatcgcaaggccaattactatctcacccatcttttatcattacatccctaaatatcaacaaacgatgtgtcactacctgagtacagtgcactgtgctggacactgttgagagcacagaatgacacaccttgatctaaatgtcatcctaacttgtcccaagctcttgataccccatcactctagggctggagagaggatttgcattagagttcttaccagtgagggcctctgaagctgtgcagtgcttaacctgggccatcatatgcaatgggctgattgtcagcgtgtgattggaaacgtatag

SEQ ID NO: 694754 - DNA, 274 bp, Homo sapiens
agtaccctcccaagcgggtgggactacaggctggtgccccatacccaaagaattttttgtagaaagagggtctaaccctgttgcccaggaggggaaggctgtaatgagccatgactgcgccactgcactctaccctgggcaacaaagcgacaccttgtctcaagaaaaaaaaacaagaggactgacaatagggtgaagaacttcctatacctgtgaaaggattaagttaccaatgtaattcgcatgaaaactattaggccctgtttggactctg

SEQ ID NO: 694755 - DNA, 302 bp, Homo sapiens
tctccacactggctctctctctctctctctcactctctctctctctctctctctctaccccagttggaagtatctctgcaatagagtggaaagtaaagaggaccaaggtgaaaataaaggctcggaaggaggagcactcttcgcaaacatgtcatcccgttggtggtgggaagtccctggagaatatcaggagaaacacagtcataggctgcaagtctataagcataattccattggggagggcgcccatttgtcatgcatggctgcaaggggcagatcaccagtgtggcagcagaggggtc

SEQ ID NO: 694756 - DNA, 1082 bp, Homo sapiens
agatcttataacttgggttttattggcagcataaaccatgtggagcgatcctgtcgttagcgtggcattgcctatatacagcagaacgtcagctgttgtcactggtgatgcgatccccactgtctgcgtcggccttgcttttgtggatcttcctctgtgagtcagacacgttatcatcaccaagacctcactgatagtgctagtcgcccctttcatccccgtatcagtgtttatcaagaattaactgaacagtactttcctgctgtatccgcatgatatgccgaagatggtacgaggcgcgctatgcaatataaatgagtcgtaagtgcattgtgattctttcaggcattcttctaatctaagtcttgtcttgattcatgtaagatgtctcaatggtgtgccatttacgggaattagaatggtggcatacgatgtgaagacgtctctggatctagatgatatggtcccgtgtttgttgcttggactttcggatctccgtgtaacgtgggcagttgtatttatccacaattgcaagactagaccactatgttttcactatagtcttccatttgtaggcattcctacacccatttctattattataaccattcctcacacgtctcccttgacagtctgtctgacccatagtctgatgctgtgctcgtcctcctgcttcatccctctgaaaagagatagtggtcagatcccacttttgagaagccatggctgtccctatcctccctggaagaggctccgccgtgggctgttctttgtcatgtgccgccgctcttgctagcaggcatttttggggccttgaaatggttgagccctggtttagcacgaacccttggtccaagcctcctgaccgctgcttaccagcttgcgggtcttgcgtggcgggcggtgcccgggacttgctggttgggcacacggactcttggaatttcgccggggtgggttacgcgccccacctcggggcgacgggggtgcttcctcgcgccgggcgcggggttgcagcccggggtacccgttggccccgtgatcgcgggtacttggagggcccgccttgtggaccccgtcgg

SEQ ID NO: 694757 - DNA, 311 bp, Homo sapiens
agccaacggccacttattcagtgaagcactatcacgaaggaaaagtactacctctactatactaatactcggctacaaatctccttaattataacattcacaggcacagaactaatcatatatagtatcttcttcgagaacacacttattcccaccttgggtatcatcacccgatgaggcgaacaggcagagagggctgaaagccggcgcctacttcctattctacaccctagatagtgctccctatcccctgactcatacggctcttttgacaaccaaacgcctgttacggtgtgagcggacgaggggga

SEQ ID NO: 694758 - DNA, 271 bp, Homo sapiens
gactctacaggatcccctaatctgtactcattgcgcgagtacaggaagaaactgagacccctaagatcgtatgctgcttggaactgtgaagacgatcatggtgtattactcttagactgtcactgacattctcattaccatctgtgcccgccttggcctcaccaatcatgatcaatattcattggttcgagagctgattgacgagaccatggaggatataactcgtaccttatcacaggacaagacattgctgcgcactgagtacagatta

SEQ ID NO: 694759 - DNA, 806 bp, Homo sapiens
aaatgtattgaggatctgtgaaatgctaagtgcccaaaataaaatatgctgattgtcttgttattaaaagtacaatttcctcattaagccaaccttgccttctgtaacgtcacagtgcttaagatctcaggattggttcattaggaagagacctgtcgttgaaggacttgtggtaggctagtaattgcttagcctccattattgggtggcttgggactagagaggttttagattttgtgtttttttttgttctgcctcaaagctcagtttattgacagcacaatttgtaagctatgggatcatcactgaatcaagattttgactaggtgagcttaagttgtccatgttcttacaatttcaaaggttacaagtctcagaaatggttaattttaataactgtcctatcgataaattaatgtggactaaattgaagtggttgataaatacttcatgaaaactaaagtctgccaatagattacttgttgatgtccaatagctactacatttgatagaacagtttgaggaacatttcagttcttgaacgcggcatctgacatggttctcagcaggtgggaactagtagaggattatcggcttgtatccgatggaggtggaagcggacatgtttgaaggcatacgagcttattgcactaatcttgggctggtggacttgaaacatttgtttttaaccaattctcagggagccgggggagccctaagtgtgactactttcgccatggatgattgccccttaactgtgggagaacaaataactcgaaataaggggcacttcaaaaacggggggt

SEQ ID NO: 694760 - DNA, 765 bp, Homo sapiens
ggacggtggcggtgcgaactggactccccagtgagaccaagaagactgggaagcgcattgggagctctgagcttctctggaatgagatccctcattttcgaatgtcacggcacagagtcatttagatttaaaggtctggagctgccataccttgagaaatgaactgctaggcaccgatctgtcaacctctccaacgtcttgaagagcaatgggggcaaaatggagaatcatgcagctgaccctgaacctgcagacggagaacaaaggcagcgtaagtctacaggcggagagctgacaattttcctggacgggccaacttgtgatctgggaaatgtgcctaatggcagtgccctgacagatggatcacagctgccttcgagagactccagtggaacagagtaagctcagagaacgggacagctcccagcacaaaaccaggctaggaggaagatcccggacgcaccagaccatacgggtgcctcagccagaacaaccctagaagcggcgagcaaagccccggtgctcggagccggcaccgcagccgtcaagaactcacgccacagtgggttaggccatggcacagtggatgagaaaccccacagcactgaaccggaggacttcccgagagggagagtcccactggacactagaggaccgctccaacgattcaccgccacacacgggaaggagaccccctacgcaacccgagacacgccactccgagaagaccggggcgcatcacagacccaacggggcctccggaca

SEQ ID NO: 694761 - DNA, 659 bp, Homo sapiens
tggcccttgcggagataatttgggtgggtgaaatggtaatgtgtaatggtgaagtttccggggcgggcaaattgctgttgttcgtcagcaaggaagcagtccctgagaaatgagaattgcgttccctgggggcgttaatgggtctctttgcagttgtgattgtgaatttttgtgtccccgggtcttgttgtcggggtgggtggtggccatggccccggttgcctgttgttttaattcgggtttccggatatggtcttggtaacgggtaatgatatataagcgcatgcatgtctctccgtatgcggcttcccagggcttattaggaagtaggaatattcccgcactaataaatgtcttggtcataccagttgtctgctctcaaaacctgtctcctgataagatgcttatcaatgacaacatgtgcccgataacttcattagcgattttaattttgccccggtcctgtggtcctgtgatcttgctctgcctccatttgccttgtgatattctattaccttgtggagcacgtgatctctgtgactcacaccctattcatacactccctccctttttgaaaatcactaataaaaacttgctggttttgcggcttgtggggcatcatggaacctgctgacagttgattcgtgagccaagctccc

SEQ ID NO: 694762 - DNA, 156 bp, Homo sapiens
gtcgatctagaggtccggatcgagacagctggaacatagtgagactcgttctacaaaattaaaatatagctggtgttgtggtgtgtgctgtggtcccagctactcaggaggctgaggcaagaggactgtttgagcctgagaggtcgagctcttttt

SEQ ID NO: 694763 - DNA, 109 bp, Homo sapiens
agtgttaaatccagtgacaagatggaacgctagcatcacccttttatgacctagcttatggaagttacacagcttcagtctctgctgcattctttttttctttcttaaa

SEQ ID NO: 694764 - DNA, 528 bp, Homo sapiens
aacgccataggatctgggaatgatctggacatcatccttaggttcgccatccaggacatctccgtggaagagacctcggcaaggaatgggctccttctctgaatgccagagcaaagacggccccgttatacagaactgtcacatgtgcatgaactatccacaatacagcttggaagggataggtacttgcacttcacatgccactgatccacgcggcacagacacagagctagattgagtatgacaatgctgaggaaggacgaacctgtcaccaacctgaacaatgccttcgaagtggctgagaaatacctcgacatccccaagatgctggatgcagaggacatcgtgaacacggccctgcccgacgagaaggccataatgacctatgtgtccagcttctaacatgcctttttcaaggagcgcagaaaggctgaaactgccgccaagcggatcttgtaaggtgctggcatgtaaccaagagaacgagcacctgatggaggactacgagacagctggcagagacctcat

SEQ ID NO: 694765 - DNA, 367 bp, Homo sapiens
gactctagaggaccccctgttgtctgcatctggaacaggatttcggtctgagatgctggggtggggcacttctattacgaactaggtgtccaacattatcgaagtgtgcctgcgctgaagcatcggaatggaggtctgataactttggaggaactacatcaacaggtgttgaagcggaaggggcaagttcgcccaggatgtcagtcaagatgacctgatcagagccatcaagaaactaaaggcacttggcactggcttcggcatcatccctgtgagcggcacttacctcattcagtctgttccagctgagctcaatatggatcacaccgtggtgctgcacgtggcagagaagaatggctacgtgact

SEQ ID NO: 694766 - DNA, 151 bp, Homo sapiens
cccttttaaattgacgtatttcaagtgctattatagtactatgattacttttagggagagaatgtggtagaattgactgataatatatcagtagaatgtacgttgagagttgactgccacataagacataaaaataagcaaaatctgcgtg

SEQ ID NO: 694767 - DNA, 376 bp, Homo sapiens
catctatgcttccccttaagctctgcgatttcaatgtctgagacatgaatcttctcatgtccacaagagaactcgagtgcttcctgccaccctcctataaagctttcagaattacccttgtaaccttgcactgatgaaggctcgtctcgacttacagagcctaaggaggacccgatggccggcttctgcacagctgatacaccatcctgtgaccccacggccgccctgcccacccatctctcacggagcagacactgtcctcaagttatgcgcacagattgaggagaaacgagaggctgtggaaggcaggacagaaaggccgagagacgagtttgtcatattgccaaagtctccttcccccatagatagttacagc

SEQ ID NO: 694768 - DNA, 239 bp, Homo sapiens
tcttctatgacttgaggttaatcatgtgaccgcgagatggctggcacgaaattgaccaaccctgggcgttagtataacttagttaaacttatcgtttattgctcaaggttaatcactgctgtctcccgtgaaggtgtggctaggcataaacgttttgagctgaattgctgacgctgacttgatgcttgtcccttatagatcgtggtgatttacagggtgcctctctcgctacagcacgc

SEQ ID NO: 694769 - DNA, 311 bp, Homo sapiens
ttatcgatgccactaggcggaactgcttcagctactgggattcttgctttacagctcttgttcagtgcactcttttcctaaggcaaaaagcaatacgggggtctctttttctcgcttcataccaactcactcttcctaacatatttactttccaccttctacttgagcacgcatggcaggaagagctcacagtctttagagccgaacagcatgtcttcaaaatctggctttgccacttcccagctgagggacgtgaacagcttacttaagtgctcaagtagaaggtggcatcgataaacaccgggtaccga

SEQ ID NO: 694770 - DNA, 409 bp, Homo sapiens
cgggtccaatagttgttttactcaagtgcagtatttgaagtcgccactggccgcctttgccctgctcttcagaataactccggcccaaaaagcttaaatgtattttgccgcttcgcagaattttccgcttcttcgtgggaaaagcagacaagagaaagtcaccctggagcacacatctgcctataatatcgcgtggctgaggctgggattcacctgggctgttttgaccacatgtggcttcctctggtcattgactcctgtgaaattaactttgtaaaaaccacttttttttttcttgatagagacgggcgggggtctcgctatggtgcccaggctgatctcgaacttctgggcccaagcgatccttccgccttggcctctcaaagtaaaccacttatttaaaaaggca

SEQ ID NO: 694771 - DNA, 472 bp, Homo sapiens
  misc_feature (3)..(3): n is a, c, g, or t
  misc_feature (19)..(19): n is a, c, g, or t
  misc_feature (35)..(35): n is a, c, g, or t
  misc_feature (65)..(65): n is a, c, g, or t
  misc_feature (462)..(462): n is a, c, g, or t
  misc_feature (467)..(467): n is a, c, g, or t
aancctcttcaaactcccnaccttgtaacccccancaggaccctattttcccgaaaattgaaaanctctgaaggtcccccacaattcatggtatgtacaggggcctcggaggagggaaactgccccagctttcccccggcacagcctgccaggggtagggggtatagataagaggagccaggccttggcccaggcgtgcgttgtcacgccctgtaatcccagcactttgggagggggaggcaggcagatcacgatgtcaggagatcgaaatcagcctggccaagatgatgaagccccgtctgtactaaaaatacaaaaattagccggacgtggtagcgtgcacctgtaatcctagctacccggaaggctgaggcaggagaatggcgtgaaacccggtgggaagagtttgcagtgagccaagatcgcaccactgcactccagcctgggcgacagagcaagatnatggnctcaa

SEQ ID NO: 694772 - DNA, 1065 bp, Homo sapiens
ccacccacagacatctgttcccaactgcatctgctcttcacccattctgctccgtctgtatttcacttagcaacccatctctttccaccacaaacactgatgctggccctgtctctgtgctgtctggcatgcactccctgtcatgccactactcactgctttctccatggccctgaagcacatcaaggtttcatgcatgacagctgtcttcaaccagcccactgtgccccatatcctacctcccagatggtgtcctcagaccgaagccaactttccatttcatgcccacatgaatgctcaatgcccaggtgtagtctgcacgcacacaccacctataccacatgacagcacacagagagacatcacacatgaaccactacacatgaaaacatgacccagacgccaccctggagagcacccctagaccccgaaggcagcgaaacacaagagacaagcacatcactacaaacaaggcaccagctcatcaactccccagacttactacaccagagaccccaaacggcctcactccgaaacgcaaaccaacacacgtcgccaaaaccccaccaacactgctggcggcatatacagacccccagccaagcacacaaaccgagcaacgcaaaaaaaaacacacatagccaagtaacccactcacaaccaaagcgctgcaccaccctggacctcgcccctaacatactggctgtatccaccgcacactcgcaactttggccacacgacccaccatatgacacacagtcgcctgcaacgaacaccaaactcccccccagcgaatatctcccaaacactttcgcccaaggcaacaagttacctccgtccacacctcactaccactatccatgtccagcacgtaaatcttatataaacgccaacccaaacaatgcattgctgaccatacatcggaataccatccacaatacgcacttccctatacagtgaaaatactctcccgatatcaccactgtaaccgtaaacaagacccccaatagaaacaacactatgaactacaacaccgctcaagtaaaccgcacattggatgcacaa

SEQ ID NO: 694773 - DNA, 146 bp, Homo sapiens
  misc_feature (9)..(9): n is a, c, g, or t
tccggagcncaatgggggctacgcacccaccacattagcaacataaaaccctcattcacgggagaaaacaccctcaggttcaaacacctatcccccattttcctcctatccctcaaccccgacatcattacggggttttcctttta

SEQ ID NO: 694774 - DNA, 209 bp, Homo sapiens
aggtatacactagccagcgagaacataaagaactagtcgtctttaggaatttcttgcgctttgattatatacagggcttgtgccctgtatcacttatagggtctcgaatgcttgtgtagagtaagagcggagatgcccaatattcaaagctgctaagtgttctctgtgccatgaagactccgtgtgagtgtgtagcaagttgaacgggg

SEQ ID NO: 694775 - DNA, 172 bp, Homo sapiens
aaaaaaaaagaaaaaaaatacttgggcatgggggggggggcctgtagtcctagctccttgggaggttaaggtggggggcccccttgaccctaggagtttggggctccagtgagctccagtggggctgcagtttctttttgcctgggggagaagggggagcccctgtttccca

SEQ ID NO: 694776 - DNA, 425 bp, Homo sapiens
ttgtgtaaagtatagcaaagcaaagtcaacaagcaaaaagttgttagtttcaatgaactaattgagaatttgagaatcagaccatagctgagcagaaaatgaatagaagtaacattgacaggatgaggttgcctagctttttaagataaagctttggccgggcgcagtggctcacgcctgtaatcccagcactttgggaggccgaggctggcggatcacttaaggtcaggagttcgagaccaggccaacatgtgaaaccttgtctctattaaaaatacaaaaattagtcggtcatggtggcgtgtgactgtaatcccagttatttgggaggctgaggcaggagaatcgcttaaacctgggaggcggaggttgcagtgagccaagtccagcctaggagacagagcgagactcagtctcagaaaaaa

SEQ ID NO: 694777 - DNA, 406 bp, Homo sapiens
gaagggaggcgaacctgacttccaggcggttgaaccctacacgaagaaagaacttgctggcggttactttccctgacatcattcgcaattacaaggtcagggcggcggagaatattcctgagaatcccctgaagtatcggtatccaaatatggacaaagaccaggccttgggaaagtataactccaggccaagggaagcaccagagccaagggaactggatggccctaagggaacgggatatatcaggacggagtggatttcggtgtctgaagggtaagtgaacacagaagagtgacatgtttacaaacctcaagccagcctggctcggggctgggggcctggtggaagatggtggtatttcacttttccatggtaatgggtatcggcatcacagctgaactggtg

SEQ ID NO: 694778 - DNA, 357 bp, Homo sapiens
ttaaagaaaggcaaagtagaccagcacattcaaattcagaatagcattgaagcatcaagatgaagcaaatccatcaaacgtcaatgaacgctagttttatctaaggtgaaatcctctccccacacccatacgggcgggaggtttcagtgggcaaggatccctacagtccgggggtaagatgtcaccgtgcgtccgggacacacccatcgctgtaaccactgggcaggaggaaccacaaagtacgtatcacagatcaccgccctcattaggtgttttttttttttttttttttttagcaaagaaaaaaactgcacccccgggagggggggaccgggaacgggctaacaaacctgccgg

SEQ ID NO: 694779 - DNA, 286 bp, Homo sapiens
ccgggcctttttggcttttttcaagggggcccccccgggtttttttttttccccatttcccttcctttaaagaagggcggggtcccagggtccccccttctgggggggttttgggtgggggggggttttccggttcccttggggggcccccccctttccccccctttctgggtttattttttttcccgggggcccctggccaccccctttttggaggggggggggtttttggggccgggcccccccccccccgtttgccttcctggaataaaattgggttttggga

SEQ ID NO: 694780 - DNA, 992 bp, Homo sapiens
cacgtggggtgaccatgtctacacatgtgagtcctaagcgggtgccccgtctctgtcgccctgcgcgcagccatcaagtactctggagaccttctgtcgactcccgggtgactgcaagcaaacatccccaacgttttctccatgcagatgtgtggagccggcttgcccgtggctaggcatcgtggcgtagccaaacggcaggtcatctgggctggacattgtatacctgaggattggtcataagaggacgacatctgtgtataccgccatattcaatggaacgagtagtgctagctacctatgcataagaagagttcctgagaatttggaaccttggatgggcaatagaccttacatctggtactggatgcacgagttataatcgacagacagagggacatcgttggatcaggggcatccgagcagctagctgctgccgtgcacccaggaagggtgttgtgatgcgggtggtggaacgcatgtggctccgcgcgatctctgatttccagagatgctactgagtgggtttcgtggacctgggtcgccagcctggcggtgctggggagagaagtgtcgggaagaccagccttgggtcttaacttccgctaatagatcgtccgagtctaagcctgagaggacgaggaacttccagcagggtcagttcccgtagtcacagaatccctgcgcatcagccgtttacagttcagtgcgcatgatgggcggccggccgtgaattatgacatgtgaccggataacgggcatttccccgatccacaagatgcgctggtggatcggatgccacggtgatggagggcttctaggagtcaatcttcgacagagcccagaagacggttgggcattcgcatggaagccccctggtgcagacaattgacaggtgctgccaatggactgaaaatgtccgtggcctttactcaacagaggaatgtaggccagacaatgtgtccccgaaccagtccttatgagacgagcca

SEQ ID NO: 694781 - DNA, 388 bp, Homo sapiens
ctcaggatctgtgggctggtgtgggggctccaaggttgcttgttgaggagctcctgagactcattgtccagcgagaaggaatgtcacccgatcaattgatcagtcagggtggagcaggaacaaatcacaatggtggaatgtctactcagtcttcggcagagaactggtctatttcactgtttataggttcttcagttgcttcaggccatctggcatatatatagtgcccggtcacagggttatgatggcttagcttgggctcaggggcctgtcattcaggattcttttttatcttcctctgatgctcttctataagaatgactcaagttttagatgtccagactccaagtgcccgttccttcccggtgttcagccactgcgttgatcc

SEQ ID NO: 694782 - DNA, 293 bp, Homo sapiens
  misc_feature (6)..(6): n is a, c, g, or t
  misc_feature (11)..(11): n is a, c, g, or t
tgtttncattngtcttgagcatgttggctcacacctgtattcccagtactttgggaggctgaagcaggaggactgcttgaggccaggaatttgagaccagcctgggcagcatagcaagaccccatctcagcaaaacaataaaaattaactgagtgtggtggcatgcctgtgttcccagctactcaggaggctatggtgggaggatcgcttgagcccagaagtccaaggcctcagtgagctattatcacgaccgctgcactccagcttgaatgacagagggagactctgtctca

SEQ ID NO: 694783 - DNA, 1001 bp, Homo sapiens
ggtgccagaagacatgtgtagcggatcataaccctaaatgtcacccattgtaaccataaaataatctatatcaacaagtatgtcgtcaggggacacttctattcctgcacaaatactgcaatacgtgtatggagtctctatctcataaatgtatagtgctttgacaacataaaactatcctgtcgatttaataggttacgagactggttctgatttaaaaatggtgacagagggactcactctccaagattattgtcatttgcctatctgtggaatggaccatgaagaactgaggacgatgataggatgcctgtcgacacatggccacatctcctcgtggtgaaattatggagttccgagtaaagtgtactaggttgacctaccatggtatgtggcacccaaagatatggctgccttcgatgtatatgattaaggggtacatgttacatgagccagggtgtgatgactgctgcgtgcattgttttgcaaaggctcgagtggtttgatgagttatgcgagtgctgcgaattttactgatgagtgagaggatgatgcctggatgcacacaggggtgtcataatgggctaaacgggaatgaagtgtggaacaatggttaattgttcgggtgttacaaaaaatgggattcccatggagccaaccaaaagggccagagagcagatcatggagggaccttcgttcaaggaacgtccgacaacttacattacgagagggggtacaacccggaaaagtagcatacggggcactggcgggggaatgggacacaggcgcccaagagctaaatgcctggctcaaggaaagcaaacacggagggtggactgccgtgaaacagcgctgaggctgaccggcccaccacacggtcgcaagaggcacggcgcggcgcccagatggcaaccggggaggaaggcagaggaggaacgcgtctcacgggggccgggccgtaacagcacgaggagaagaccgcgacacaagggacccgcaac

SEQ ID NO: 694784 - DNA, 1031 bp, Homo sapiens
  misc_feature (1017)..(1017): n is a, c, g, or t
ggagtacatcatcgtgatctctgcgagtgcaaaaggcttaagggaaactggtccttcagtcatgtccgtgtgacactcgatggtcttgaggaggtgccatgggttgtcatcagtcaccatgccgcgagtaaaggtgcggtctgacaaagaaattctatatttagacgttcgtggggtcagtccaagggactatctcaacatggtgaagtccgcgacggagggtcagaatagtggactggactcacgtgtccggaggcctctgctttgggaacaaacgtagcaagtgatcgaatgagatgaatcagtgagtccatgttgggtgaactagcaaaaaggatgaacatccttgcattggaattggaaagttgaagtcagaccatctgttaggtgacccagaaggcatgaaggatggtgagccaccttactttgagaggaagaagggtcgagcagaagaaagcgaattcctgaaagtgagtgaggacacaatctggcgggctcttcagcggaagtgtgcactctcaattgttcaatgcgatgttgtccccatgaggccatacaggagaggcgtgcctgtaaagtcatggagccaatcttgtacggaggatgtgcgccagtgaccttaactgcggagtacgggcgacctcttgacgggcacacgtttttggtgtgattcctgtaagggtaagtcgtggcccgtcgttgggcataattaatgtagtttgcttgcctatggcttggtatttgaagtaccataaggctgggatcatagcagtgcgcgtatcgtcggcaagtttgtccaaaggcgttgctttagaggtgacaagtagtcctgccacggaggcatggcggtggcaatgggacccactatatttgtgcctcaaatcagctacgcgctcaagaggtttgtgcagttagaagaccagctgttttatgcgccatggtgtgtcacatattatagattccacgcggtagagatcatctgcgccacaccaggcatcactgctgacaagcacatantctatgcatccctt

SEQ ID NO: 694785 - DNA, 286 bp, Homo sapiens
ttcaaaacagccctatcaagaggaatgtttaactctgtgagttgaatgcaaatatcataatgcagtttctgacaatgcctctgtacagtttttttgtgaagatatttctttttctaccgtaggactcaaagcgctctaaatatacacttgcaaattccacaaaaagagtgtttcaaaactgctctaacaaaaccaaggttaaattcagcaagctgaatgcacatatcacaaagtagtttctgagaatgattctattttttctatgaaggtatttccttttctacca

SEQ ID NO: 694786 - DNA, 579 bp, Homo sapiens
  misc_feature (34)..(34): n is a, c, g, or t
  misc_feature (36)..(36): n is a, c, g, or t
  misc_feature (60)..(60): n is a, c, g, or t
  misc_feature (243)..(243): n is a, c, g, or t
  misc_feature (361)..(361): n is a, c, g, or t
  misc_feature (410)..(410): n is a, c, g, or t
  misc_feature (413)..(413): n is a, c, g, or t
  misc_feature (420)..(420): n is a, c, g, or t
  misc_feature (426)..(426): n is a, c, g, or t
  misc_feature (471)..(472): n is a, c, g, or t
  misc_feature (490)..(490): n is a, c, g, or t
  misc_feature (503)..(503): n is a, c, g, or t
  misc_feature (523)..(523): n is a, c, g, or t
  misc_feature (538)..(538): n is a, c, g, or t
  misc_feature (554)..(554): n is a, c, g, or t
  misc_feature (568)..(568): n is a, c, g, or t
ttcagcggccactaccattcctagcctctggtantnattcttctactcttggatgtccantagttcaattgttttgaatttaggtcccacaaataagtgagaacatgccatgtttgcctttctgtgcctggcttaacttcatttaacataatgatctccacttccatccatgctgttgcaaatgactggatctcattcctttttatggccgaatagtacttcattgtgtatacataccaagantttccctttatccattcatctgctgtttagacatttaggttgcttccaaatcttagctattgtaaacagtgttgtaaaaaaccataggagtgcagatatctcttccatatactgattnttacttttttgagacagggtcacacttttgtcacccaggctgggagtgncantggcatngatctntggctcacgtgcaacctccgaccgtgccatagcgggtattcagcnntagcatgctttgctgaantaccggctgcacnttgctgttctgcttcgaagntattcaataccgccncagtattctcaaatgnaagtgattctaagnatttggtttgg

SEQ ID NO: 694787 - DNA, 150 bp, Homo sapiens
ctttcatgttgacactacatgacttctatcttggacacacagatatcccaggctcggtcgtgtttgtcgcctctacctatagatctatcccactattttgctacatatgggggtgtgctcttttagctgttcttaggtagctcgtcgtgt

SEQ ID NO: 694788 - DNA, 106 bp, Homo sapiens
ttctatgctcagttatctctctgcaaaatgggataacttccgcatggttgcggtaaggattagataagatgtgtaacatgcctagcctagtacctgatccatcaat

SEQ ID NO: 694789 - DNA, 318 bp, Homo sapiens
  misc_feature (254)..(254): n is a, c, g, or t
  misc_feature (303)..(303): n is a, c, g, or t
tctcactgttgcccaggctggagtgcagtggcatgatcatggctcactgctgtcttcacctcctgggctcaggtgatcctcccaacttggccttccaaagtgttgggattacaggtgtgaacaactgcaccgggttgagttgaactattaaacggtttatatgtaggaggtgagttactactatttattttcaaacaaacttcaggaggaaaaggatagtttgaaggtgaaaaaacatattagttgtttttccntggggaatcttttttttgattctacataattacattatctaggaggtcngttttaggaccatca

SEQ ID NO: 694790 - DNA, 137 bp, Homo sapiens
ttttttaaagaagtaagcctttatttccttgttttgcaaataaaactgagctaagattggttgcaaaatggtgaaaaaatacaaagagaccgtatcccatatcaaagtccgactcctccgaaacaaccttgtcgacg

SEQ ID NO: 694791 - DNA, 649 bp, Homo sapiens
  misc_feature (551)..(551): n is a, c, g, or t
  misc_feature (625)..(625): n is a, c, g, or t
aaaaaaagctgctgcccatggctgtgtaatactcctctgtgtggatgcacaatatttctccattcatctatagatggggtatgagggctgtctccacctcttggctattgtgaataaagctgcttgttccttttcatggctgtgtaatattccactgtgtggatggacattatatttttccattcatctatagatgggtatgagggctgtctccacctcttggctattgtgaataaagctgcttgttccttttcatggctgtgtaatattccactgtgtggatggacattatatttctcccttcatctatagatgggggtatgagggctgtctccacctcttggctattgtgaataaagctgcttgttccttttcatggctgtataatattccactgtgtggctggaccacattatatttctccattcatctatagatgggtatgagggctgtctccacctcttggctattgtgaataaagctgcttgttccttttcatggctgtgtaatattccactgtgtggctggaccacattatatttatccattcntctatagatgggtatgagggctgtctccacctcttggctattgtgaataaagctgcttgttccttttaaaaaanacaaatctaacagcccgggggatc

SEQ ID NO: 694792 - DNA, 429 bp, Homo sapiens
  misc_feature (331)..(331): n is a, c, g, or t
  misc_feature (405)..(405): n is a, c, g, or t
cactttctgtctctgtggattgcctgtatctggacatagggaataaatggaatcatacagacactatgtatcttttgtatctggcctctctcaggaagcatgatgtcctcagcattcacccacatgccacctgtggcagagcctcgttccttttcatggctgtataatattccactgtgtggctggaccacattatatttctccattcatctatagatgggtatgagggctgtctccacctcttggctattgtgaataaagctgcttgttccttttcatggctgtgtaatattccactgtgtggctggaccacattatatttatccattcntctatagatgggtatgagggctgtctccacctcttggctattgtgaataaagctgcttgttccttttaaaaaanacaaatctaacagcccgggggatc

SEQ ID NO: 694793 - DNA, 817 bp, Homo sapiens
  misc_feature (719)..(719): n is a, c, g, or t
  misc_feature (793)..(793): n is a, c, g, or t
ggagactcgcccttgtcgtccaggctagagtgcagtggcacgatctcggctcattgcaacctctgcctcccaggttcaagtgactctcctgcctcagcctcctgagtagctgggattacaggcactcgccaccatgcctggctaatttttgtattatttatttatttatttattttttgagacagagttttgctcttgttgcccaggctggaccacattatatttctccattcatctatagatggggtatgagggctgtctccacctcttggctattgtgaataaagctgcttgttccttttcatggctgtgtaatattccactgtgtggatggacattatatttttccattcatctatagatgggtatgagggctgtctccacctcttggctattgtgaataaagctgcttgttccttttcatggctgtgtaatattccactgtgtggatggacattatatttctcccttcatctatagatgggggtatgagggctgtctccacctcttggctattgtgaataaagctgcttgttccttttcatggctgtataatattccactgtgtggctggaccacattatatttctccattcatctatagatgggtatgagggctgtctccacctcttggctattgtgaataaagctgcttgttccttttcatggctgtgtaatattccactgtgtggctggaccacattatatttatccattcntctatagatgggtatgagggctgtctccacctcttggctattgtgaataaagctgcttgttccttttaaaaaanacaaatctaacagcccgggggatc

SEQ ID NO: 694794 - DNA, 117 bp, Homo sapiens
tgggtgcaggttgccagaatgcagggtgggtggatggatttcaggaaagcaacagaggaagtggggaggaggttggtgcagctgcccacgtgagcgattatggtgtcttgggaccag

SEQ ID NO: 694795 - DNA, 165 bp, Homo sapiens
ttacatacactcgacgctcggtaccagtactggtcttcgcctgcgtgaggttgcagccgggacacagttaaacggctcgttcagctgctccagcaaggaggaggtgtgagcatcttccacgggtaggactttagcagctcgtggtatttccgggtcaacctctca

SEQ ID NO: 694796 - DNA, 317 bp, Homo sapiens
ccagacctccaaatatctcatcaataccgactaatcaccaaccaacaatgaataatcaaactaacctcacacacacagacctcacacacaacacacacagacactcacacagacaccacacacaggacatcacattgacactacacacagaactcacacaccaaacacacataccacacccacaaaatcacaaacaccacacacagacctcagaaacaccacatacacacatacagaacacacacaccacacacagcagacctcacacacacaacacacagagaccacacacacagagacctcacacacagacctca

SEQ ID NO: 694797 - DNA, 159 bp, Homo sapiens
caacatcccttgctccttctgcatccttctgcaccgatgctggtatatgggtcttgcggtctcgctgactcattctccactggctcatacttaggggtccatgggagctatgtccaaccttgacatactagattagttgcggatgtagcatgtggatat

SEQ ID NO: 694798 - DNA, 237 bp, Homo sapiens
gcaaaaagggggggggggcctttttcaccaccccccttttattgggggggaatttttttttttgcgggttcccccccccccttttgaaaagggggccccggggccttaggggggccaatttttacattcccctgggggggcccggggggggaaaaaaagggggttttccgggggggccccggggggcccttttttttccccccggtggggggtgtaaaaaaatttttttttttttta

SEQ ID NO: 694799 - DNA, 550 bp, Homo sapiens
  misc_feature (378)..(378): n is a, c, g, or t
  misc_feature (549)..(549): n is a, c, g, or t
tctggagttgctgggggtattcttttagttgtccccaacgtcatgggcatgatgtgttggtctcctcctcttgacaagatgggcaacagtgttaagggaattcacttttgtcacgatcttgtttctctgtgtaacttccataactatgataatttgagacactttgcaaaaaaacttgatcctcggagagaaggaggtgatcaaagggtgaagtcggtgataaaccttctgtttgccgcatacactggagatgtgtctgccctccgaagtttgctctgtcagccatggacatggagcagcgggattatgactccagaacagccctccatgtcgcagcagcagagggtcatgttgaagttgtcaagtttttgctggaanttgcaaagtaaaccctttccccaaggacaggtggaataatacccccatggatgaagcactacactttggacaccatgatgtttttaaaatccctcaggaataccaagttcagtacacacctcaaggggattctgatgatggaaagggaaccagactgtccacaagaatctnt

SEQ ID NO: 694800 - DNA, 1107 bp, Homo sapiens
  misc_feature (873)..(873): n is a, c, g, or t
ctagagaaggtcggttgtaccgtcagattgccttcgtaggaccatctgaatagatggttcttagagtagcctcactaaagatagtattcagggtgaccatggagctgttaggtattcagctgacgtgcgtgtagggatcggttgcggaaaagactgaggcgatgaattgtaccagtatctctccgcataggatggtcatagaaagttcagttaattaggtgtacttgattcatatgatcaatgttacacatggggatattggcagattactccatgaatcaacagcattcgatgattgaaacataattgtacgcccacaagttctgcggtggcaacacaccaattaaaccacagtcttcggaaggcctatattgggtaaactctcttggagggcatcgtggcgctccttaaagcgagagcaaaagtgcatttcaatacattaagcagaatttaaggttaaggaactctcgtggcacacgcttcgtaaccagagagtggcaggccgtaccgtatagcaacaacgccacgaacacccttccaacccaaggtgtccatttctgttgtaaccgttatatatagaatccccccccgttaaagacgcttttaagtcacactcatgggtacggattactccgtcttggcaacggcccatattactagacttactcatggggcgattatccaatttctgtacacaacaagttcccgaaggacaaaggggcttagctaacttacggacacacaaccccatgtgttatcccaggacacttatctcttcaaccaatatcccttggaagttcagctgggtgtctcctctttggtccaaggacacatcagctttgctattactcagctaaagtaccacacacggcngtattaacccggttgtaacatcgttatacatccccttgtaccacaggacctatttcttggttaggcacccacgggcggcgaggtatcaaccatggcgtggcatgcattgtaaggaacgcacaatacttcatatactctcacacaggtctcaactctgaacacagaacgcccttggccaccacacgcccaaagtctcctggggcagtagtctaagttgtctatagcccgaacaag

SEQ ID NO: 694801 - DNA, 252 bp, Homo sapiens
gtcgacaaaaaagagagagagaaaagataaacctcttaaaccctaaatttagtaaaaaccccaaaggcttttgttctgaacatgcatcgcatccatacttgaagagaaacaaaagttcatgatctcacaatcagaatgccatttctactgctgcatgtttcagataggtctcaggctgataagcctacatgataagtgatcagaatactttggctactgtgatggttttcaagcatataacaaccgtcgacg

SEQ ID NO: 694802 - DNA, 500 bp, Homo sapiens
ttggagccacttctcaggccagtctagtgcctaacactccgggatgtccagcatcggactgaggtaggatgaaagcaggatgctcggtctgtaaggttctcatccccccacatcagccctctttggttcaaaataacccttggtgtggggtaaaaagttctgcagctcatttcactgaaagcttttctagcgcatacttaactctctggtcaatgcttaagatatataagacaccagtgcaattgctataaagatctttaaattcgcatttagtgtgtggttctgctcagctcccttctgttcctgtgtagtatcagcatgtgatcctgaggacattctagatattggagtaaataaaatcttttcttaagagcaaactcagccgactttggacacatggggtaattgtgcatttatgaccagaattatttctagatggctggatttgaattgagattttcttttcatgtattaggtgtataaatgaataaaaagatgtt

SEQ ID NO: 694803 - DNA, 340 bp, Homo sapiens
atggtcagctgatccaattgagcacgcggggatcactctgtctcagtttgaagggtctgacaatatgagaaccgtcgtattaaaatacaaaaattagccaggcgtgtggacatgctgtaatcacagctactcaggaggctgaggcaggagaaccacttgaaccttggagatggaggttgtggtgagctgcgattgtgccattacactacagctgcactccagcctgggcgacagagtcagggtctatcttaaaaaaaaagaaaacagaaaaggcgcatgttctacacggatgtcccttgctcctttggagggtcctacctccttacccaggaaggaggaa

SEQ ID NO: 694804 - DNA, 179 bp, Homo sapiens
aggatttttctattgacgatctattagaattgagcaggatgagagcccccaactcactcaggcacttggtgtagacaagacagacagaacagataaagggagacaggataccgcctgccttggctggtgctggtaggaagttgttctgtgaatgccctgttccactgatgccactaggg

SEQ ID NO: 694805 - DNA, 158 bp, Homo sapiens
ccgttctgaggtctctttctgaaacccattttccgctatccgagttagtgtgttggtcgcatcctgggggttgacccttgcgctgtcctgagtgtgctttggagatttgcatgactgctggcatcggtgctttcacaagacccattggtctcaccgtc

SEQ ID NO: 694806 - DNA, 135 bp, Homo sapiens
gatagttggggctagtggttgatgatgccaggctgactcatcacgggagcactacttatggagtgaggaagactctgataggagcttccatctgcgataacgccacaggcaccatgtgaaaaccaactagtctaa

SEQ ID NO: 694807 - DNA, 441 bp, Homo sapiens
tctagaggatcctcgttactggcatttatagaagaatcagtgatacacaaagcactttcatacctgcacgtgctctccactgatatttgtcacttccctgtgaggtaggaaggtgccaccccacagtagttctgagctgttcaccctggctctgtggtttccagtccaatgttctgccctacttaactgaataacactgatttttgtatagctgcttaatactgaggctgacagcctggaaactttcaaataattcttggtacatcaggtgcacctctgattcagccactgctcatttgacagacacaaaccaccttgttctcctaactcatctatcctctttctcatttctgttgttgatgtggttcattatcccattagattcacttctaaggagaccaaacataaagtttcattatagccaactaacttacacatgta

SEQ ID NO: 694808 - DNA, 906 bp, Homo sapiens
  misc_feature (39)..(39): n is a, c, g, or t
  misc_feature (69)..(69): n is a, c, g, or t
  misc_feature (77)..(77): n is a, c, g, or t
  misc_feature (89)..(89): n is a, c, g, or t
  misc_feature (258)..(258): n is a, c, g, or t
  misc_feature (323)..(323): n is a, c, g, or t
  misc_feature (333)..(333): n is a, c, g, or t
  misc_feature (369)..(370): n is a, c, g, or t
  misc_feature (378)..(379): n is a, c, g, or t
  misc_feature (381)..(381): n is a, c, g, or t
  misc_feature (389)..(389): n is a, c, g, or t
  misc_feature (461)..(461): n is a, c, g, or t
  misc_feature (485)..(485): n is a, c, g, or t
  misc_feature (495)..(495): n is a, c, g, or t
  misc_feature (497)..(497): n is a, c, g, or t
  misc_feature (654)..(654): n is a, c, g, or t
  misc_feature (665)..(665): n is a, c, g, or t
  misc_feature (669)..(669): n is a, c, g, or t
  misc_feature (735)..(735): n is a, c, g, or t
  misc_feature (797)..(797): n is a, c, g, or t
  misc_feature (807)..(807): n is a, c, g, or t
  misc_feature (842)..(842): n is a, c, g, or t
  misc_feature (880)..(880): n is a, c, g, or t
aggaaaggagttggttcgcgcaggtgcgggcgcctgggnccccatggcgctagtggcgcggctccgcgnacgcgcgncttcctggcgcnggaccgtgaggctgcgctcttcctgctggagccgagagctagccaggctcggcgctcgcgactctctctggagctcgctgtgtctggggcccgcgcctgcgccccgcgcggtaccgcgtctgcccccgagaggccgagttggcagagcagcctgggacgcgcttatcgngcggccagtccggcgctggcgcgcgcgtggcagatgggagtcaatgcatgtgttgatgtggtgcnctcaggggtnaagctcttgcaggcacttggccttagtcctgggaannggaaagannanagcattcngcattcaaggaatgatctggaagaacgccttcatatcgacttcatggggaagggagctagctgctgagcgcntcgttcagtgataaggaaactttncacgacattncncaggttgcgtcagagtctcccaggagcccaggttcttctttgcggtccagttggtccaaagctacatgagcttcttgatgacaatgtctttgttccaccagagtcattgcaggaagtggatgagttccacctcattttagagtatcaagcaggggangagtgggggcnagtnaaaagctccccatgccaaccgattcatcttctctcacgacctctccaacggggccatgaatatgcnggaggtgtttgtgtctagcctggaggagtttcagccagacctggtggtcctctctggattgnacatgatggngggacaaagcaaggagctcagaggaagagatcttnggaggttgtaactccatttctgacatcccactggtatncagttcacctagagctggcagtatga

SEQ ID NO: 694809 - DNA, 302 bp, Homo sapiens
agcccagtgactcacacgcaggagcatgttggtcagttcagcaaatattctacccagggcacagggaacaagaaattaggccgggcaggtacagcccgtagctcacgcctgtaatcccagcactttgggaggtcgaagtgggcagatcacctgaggtcaggagttcgagaacagcgtgggccacacagtgaaaccttgtctctggctaaagaatacaaaaagttagccaggtatggtggcatgcacctgtaatcccagctactggggaggctgaggcaggagaatcgcttgaacccgggtgg

SEQ ID NO: 694810 - DNA, 229 bp, Homo sapiens
agagaccgtatagcttgcacagggccatgcacacacgtatgtacacctagatgcctaactaggagctctgactcatgaatgtgagacataccacattccataccgttgcttcatgtcagactcatactcccacgacccatatgatacagatatgacgccgtggactctgacctgacggaccgaggatactgcacatcagctgattaacctagtatctgttgtggcctgc

SEQ ID NO: 694811 - DNA, 105 bp, Homo sapiens
cctgcttcaccgagagaggagtcgccctgctttagacgagagaggagtcgccctgctttagcgacgagaggacgtcgccctgctttagcgacgagaggagtcgcc

SEQ ID NO: 694812 - DNA, 129 bp, Homo sapiens
taatcgagtcggtaccgctcacccgacggggtggggttgtcgctttgagggaagttacgcttatttttttttttggtctttggtttttttttttccctttttcgggaaaagggggttctcgttttttgg

SEQ ID NO: 694813 - DNA, 183 bp, Homo sapiens
gaagttaaccgagtagtacggaatcccaatttgggttgccaccttggcaacgtctttatagtcttccgtcgcggtacaaaccccgttctcatcggtgtcgtcccagttcttcataaaaaccccgacaacatcgtaaccctgctgctttaacaacaaggcggtcacggaggatctacgcccccg

SEQ ID NO: 694814 - DNA, 313 bp, Homo sapiens
atgcgaggttgatctagaggatcccggttcattcagtgtatcagccttgtccccagtagaggggacaaggccagagcaatccagaagtcgtcgggtggatcaaaaactagccatgagctattggatcgatagggttcatgtgcttcggtaaaaacagccttaccttcctatttatgtctttaggtacacactctagttggtaagcgcggggtcacgggtcctatttccctctggactccagtggacctagaaatccaaaaatcccctccagaaagtttcccggtatgggagcccaaggggtacggagctcgat

SEQ ID NO: 694815 - DNA, 283 bp, Homo sapiens
ctgaggggagggttcccttacaatggcacctaagagctcttggtggtcttttgaattataccaggtggtgatgtgaaactagagagcaataagtgaaggttcaccgcttatcccggactccttagagaagcaacgaggtcactcaaacagaatctgagagttcgaataggggctataggatataaagcattcactgtcagcgtatctcaggaaatagcctatttggctaagcagcaagtttgatattactttggatcctgtcttgagttttaaaatgtgtcaa

SEQ ID NO: 694816 - DNA, 194 bp, Homo sapiens
gtttaaacaaagtgaacaagaagaatataatcagagttccagaagcctccttcttccattcaattaccccgtcacctttcagcataacttacgtacatgtgacttcgtgacattacacactatgttgagttttagccacgttttaaacactttatgatatatgacaacccacacagataacgcttttacttttt

SEQ ID NO: 694817 - DNA, 1479 bp, Homo sapiens
  misc_feature (738)..(739): n is a, c, g, or t
  misc_feature (741)..(741): n is a, c, g, or t
  misc_feature (746)..(746): n is a, c, g, or t
  misc_feature (756)..(756): n is a, c, g, or t
  misc_feature (770)..(770): n is a, c, g, or t
  misc_feature (773)..(773): n is a, c, g, or t
  misc_feature (787)..(787): n is a, c, g, or t
  misc_feature (918)..(918): n is a, c, g, or t
ggtcgaagctcccgggagagctgcgaaccgacggcgagaggctgcggatcagggcgcggctgcgcgggtcggcacaggggcccagacgccagcttggacacgcgcccgagagggctggccccggcatgccgtgctcggccggcacgaggcgcgtcgcctcaagccgggggtgtccgtgtcctcctccctcagcccgggccgccgctccatgcgctccagcagcttgaacgagacgctgcggtaaagctggggccaggggtgccccgtccgccatagtggcgtaactcactccgggggggctggcctcgggcagccgcggccaaccccccctgcgcccccactccctaggagcgcagcggcccacgccgaaagcagcgcacgggagtgtgggaagaggacgcagagaccggagcagaggtttctctgccgcggctcaagtttctgtggccaccggccgcaacgtctccatcccgggcggcccctcccgcctcagcgccgacccccaggcccagcccccgccgcggctggagcgaccaggggcaccgcggcaccgcctgggcgggatcccagcgcttggttcctcgactctgcgtccgcctgcccaacgcccttggctgctcgctcctggcacccttttgttgcaaataaactttgcggcagaggcaagggggcggggggcggggcctcgcgcccaaaagagggggtgggctccgggcgtgcgcgagcctggaaccgcgnntnggagngaatcaggangagccgaagaaganaangcctgctggagacntgcagactgaggcgaccctctggccctccagagacgtccctcgggagcccagcaggccgagctgcccccagggagtcgctgagacacacacaaccgctgaccgtgctcagctccgcagactcgcagccagngcgccgcgtccaccgcgggccaccagcctccgcgcggaaacacctcctgcccaggggctccaacatggcaacctcggactcacaaactctcgtacacactgacagctcaggatgcatcgcagacgcacactcatctgggccgggaaaggggtgggactcggcgccagggagagcccggggagccgacgggctaacctgaagggtgccgtacgcgccctactccaccgcccaggccacgcctcctccccttccctccccctccccgcccgccctctgcggcgaatttagctgtagccacgccctagtccccccatcgtcgctgcccaagcgccccgccatcccacctcccagccgcatgtccggctccgaccggcccccaacccacccagcgttgctccagaagtcccacccttcacgaccgcgcccccaccctacttttgccagctgcaagccttccacctgccactgcagtctgccggctcttctcctggactctccgcgctggatccccgagccttttcttcgtgctctggagacgcggtataacgcccggcccgctga

SEQ ID NO: 694818 - DNA, 222 bp, Homo sapiens
  misc_feature (19)..(19): n is a, c, g, or t
  misc_feature (188)..(188): n is a, c, g, or t
gagcttgaagatgcatgtnccacaccatcagacgtcagaacacagccttgagagtctcaggtgcacatgagcatggatgtggtgatgggcccctgtgcagatgcaggggtcgcagagcaggccctcgtactgctcagctgtctcagtgacgttgggcaggaccccgacattcgtccaacacagtggtnccagcctggggtcggcagctgacggcccagatgg

SEQ ID NO: 694819 - DNA, 213 bp, Homo sapiens
  misc_feature (7)..(7): n is a, c, g, or t
  misc_feature (32)..(33): n is a, c, g, or t
  misc_feature (47)..(47): n is a, c, g, or t
  misc_feature (50)..(50): n is a, c, g, or t
  misc_feature (52)..(52): n is a, c, g, or t
  misc_feature (55)..(55): n is a, c, g, or t
  misc_feature (118)..(118): n is a, c, g, or t
  misc_feature (143)..(143): n is a, c, g, or t
  misc_feature (163)..(163): n is a, c, g, or t
  misc_feature (189)..(189): n is a, c, g, or t
  misc_feature (203)..(203): n is a, c, g, or t
tatatangttgctccattaagatataagcagnntgagtgtagagctngtntncanctttacacctacagtgtatggcactgtgactagcatatatcaagtgatcaacaaatatttgtngaattaatgaattaataactgtctnaagctgtcatgctgaaaaanggaagccatctgttatacttggcaancgataatctctgcnagaacagctt

SEQ ID NO: 694820 - DNA, 566 bp, Homo sapiens
cccaccgcgtcccgaggagtggccaccctggcgtttttcgggaagctggtgaccctctggattttatagcctggagaggcccccttcgctcacgcgtatcgacccgactcgggagaagctgacaccccgagcacactgcacttccactgcggcacggcggagcttgccccagtggcacgaaggtcctaccccggcggcgaacccgggacactcgtgcccgggcctatggcactcggggccctggtgttggctaatttatggttacaccttctactcgagtttccccggagcgtttcctagatgagctagaagacgaggcccaaggctgcccgagcccgagctctggcaagggcgtcagggtcctaatctggatgggtattgatcatgtcccacctgctggagcccctttcacctggtggatgatgccccctgaccctgtagaaattgaatcctgctcacaaccttgttggcctttttactaaccttggaccgtgattgagccccagaaacccgggacttacgcatttggcccatgtccaaagaacccagaactttgccccctgcca

SEQ ID NO: 694821 - DNA, 176 bp, Homo sapiens
cggatcgaactatcctactgctgtatagcttcatggctaaaatattaactacaactgtgagatttgtggaaactacacctaccgagggccccaaagccttccagcgaacactttgcttgaatgggcgtccatgctccatgggcatggagggtgtttaggcgcatccccaaaacact

SEQ ID NO: 694822 - DNA, 305 bp, Homo sapiens
ccttcactctcctcccactcagcctttgagtggctgggatacaggcatgtgccacagtctggttaatttttctgtattttttttgtagagatgggttttcaccaagtggctgaagctggtctcaaattcctgggctcaagcaatcctcccgccttggcctctcaaagtgctgggattacaggtgtgagtcactgcacctgacccctaagcaaattgggaaattagtagaatctcttgagctaaaccaaagaaaagctgggactcaggtttgagatcctcatgcttggtctggtggcttctccacg

SEQ ID NO: 694823 - DNA, 1019 bp, Homo sapiens
  misc_feature (7)..(7): n is a, c, g, or t
  misc_feature (184)..(184): n is a, c, g, or t
  misc_feature (191)..(191): n is a, c, g, or t
  misc_feature (205)..(205): n is a, c, g, or t
  misc_feature (222)..(222): n is a, c, g, or t
  misc_feature (226)..(226): n is a, c, g, or t
  misc_feature (264)..(264): n is a, c, g, or t
  misc_feature (364)..(364): n is a, c, g, or t
  misc_feature (369)..(369): n is a, c, g, or t
  misc_feature (381)..(381): n is a, c, g, or t
  misc_feature (492)..(492): n is a, c, g, or t
  misc_feature (506)..(506): n is a, c, g, or t
  misc_feature (508)..(508): n is a, c, g, or t
  misc_feature (515)..(515): n is a, c, g, or t
  misc_feature (517)..(517): n is a, c, g, or t
  misc_feature (521)..(521): n is a, c, g, or t
  misc_feature (523)..(523): n is a, c, g, or t
  misc_feature (564)..(564): n is a, c, g, or t
  misc_feature (578)..(578): n is a, c, g, or t
  misc_feature (641)..(641): n is a, c, g, or t
  misc_feature (645)..(645): n is a, c, g, or t
  misc_feature (874)..(874): n is a, c, g, or t
  misc_feature (882)..(882): n is a, c, g, or t
  misc_feature (898)..(898): n is a, c, g, or t
  misc_feature (926)..(926): n is a, c, g, or t
  misc_feature (954)..(954): n is a, c, g, or t
  misc_feature (994)..(994): n is a, c, g, or t
acctaantcatataattaaaatttcctcaagcaaggaccaaatataagtgtaaaaatcagtgtctctccccccaaaaatgtacaaaccccaagtaattaaaaaaaaatcaatgtggcagcaacactagaaaagtccaaccccaaggctatgggccgttgctccccctttccccccaatcccaanatttacnccacaaaaacgtanaggcttaaaaaagtacnagcnacaaaactccaagtaggaagtaggggtaactaaaggcnggggcggggctacccccaggtccagtgtttcaggtgaaggaggaggaaaaagcccaagccgaagacaaatacaggaacaggcacaaaaaaacattttccnctccntcttgtcccccncacccccaaattctcagccaatagggtccaatatgtaacaagaaaaaaaaaacagggggctcacacctctccagaaatcaatatagtccaatagggcccaagtgcaccaangggccaaatccaananctatccnanatancnccccacccttccccaaaggatggctaaaagaaggtggaganaatcccatccacanagaccaacagggtaggcgacaggggcttctaggaaggaagaacaggaaggggacatgagagtntgtncaggaaggggagaaggggcatcagctccctgggtgggcccagcccacctggcagtctcactgcctctattagaggtgatgggctgtcgggaggggaagggcagaggtgccattgtgtcctcttgttttagtgtcactggcttcccctggatcgctccctgagggaggggcagctggatgtgtgattcacaccgtgttgagtgcatcctctgccaggaaccgatgcagcngggaaaanggtggtcgctgctcanactcccggctccagcaccgaagcatcanctcatatatgcccttcggcaggcaggcngccgggacaggtacacctgccggccctggtcccggaaaantcccccgcgttctcgatgacttctc

SEQ ID NO: 694824 - DNA, 360 bp, Homo sapiens
  misc_feature (22)..(22): n is a, c, g, or t
atgccagtgaatctttctgatngggagtacatgtacagatgtcgtgcatttatgcttctgaatgcagagtcaacgattctgatctagagtttgtaagtgatagtcctttagcacctactaacatgcgtctttgaagccttccccgatattagtaatctcgaccagcaatgacacgaaaaaaggggagcacctttacgaagcagttgatatccaacattaaaataattgtggctttaaaaatatttctttaaattctagcgtaacacttttctttttaaaccaatcttccaggagattaatcaatgaaatttataagttttatcaacgtataaaatatttttcatcttctgggactcatag

SEQ ID NO: 694825 - DNA, 214 bp, Homo sapiens
  misc_feature (46)..(46): n is a, c, g, or t
gttgggcggaccagcaggctgggcccagattaagatgtcagactcntgtagtaatctcttctggatcagaaaaagacctggaaacagaaggagattctccacagatgcaattttcctccacaaaatatggttttgcagggccatttcaaaatatgtcaagaatagattttggggtaaaatacttttatttccttcagggcccactatctattct

SEQ ID NO: 694826 - DNA, 413 bp, Homo sapiens
ggggtgaggatatgtcatggttagttgtcaacatggctctttgataattaatacacaaattactgttcagatcttacaatattgttttataaatagaatctattttttagagtagttgtaagttcacagcaaaattgaatagtacagagagttctcatatactccctagccctcgctgcctagccttccctactatcaacatttcacaccacagtggttacatttgttataaccaataaacctataatagcacaccattatcacccaaagtccagagtctacattaggattcactcttggtgttatatattctatggattttgacaaacatgtaatgacatgtacccaccaatatagtattatagaataatctcaccaccctagaaatcctcagtgctccttctcttcaacca

SEQ ID NO: 694827 - DNA, 305 bp, Homo sapiens
ttgccattgtggcccgaaaaatgactgctgaatttttgctgcacatgcttaaaaacgcatagagtaactgctgaacttcagggttagatatagattctctggttcattgagcatatccaagtgaactaagcacctaagatgcgccgccggacctacagagctcatggtcggattaacccatacatcagctctccctgccacattgagatgatccttacggaaaaggaacagattgttcctaaaccagaagaggaggttgcccagaataaaattatatcccataagaaactgaagatacaaaaact

SEQ ID NO: 694828 - DNA, 429 bp, Homo sapiens
ctagtaggtagaggcaggaggattgcttgaggccaatagtttgagactaacctgagcaacacagtgagaccctgactctaaaaaacaaacttagccagatatggtggcacatgcctgtagttcaagcaattcttcttgcctcagcctcccgagtagctgggattacaggcatccgccactgtgcccagctaatttttgtatttttagtggagacagggttttgccatgttggttaggctggtcttgaactcctgagttcaggtgatccacctgccttggcctcccaaagtgctgggattacaggcatgagccaccatgcccggcctgttatctttttgctggtagagggtcttatactgatgtcaatgactgctgactgatcaggaacctggtgaaggttgctgagggttggggtggctgtgacaattt

SEQ ID NO: 694829 - DNA, 143 bp, Homo sapiens
tggctttaaagagcatgaagattagggggcagggctattgtcatatttaaggaattgggctcatacacaaatgccttgagacaactaccaggatttccattttatggtaaaccaatgcgagtacagtatacaaaaaccgattc

SEQ ID NO: 694830 - DNA, 547 bp, Homo sapiens
cgacattgctagatgaactaggcagctatgccatgaactgaagagatagtttaagaaagtcatgccattatgtagacatgattacggaatatctggagaagatggggcctcgtttttctggataagcaataagaattggatgaaaaggctgtgcttatggagaatatagtctatctgatctagtgcgcttgagcgagaacacatagaagtgaatgtttgcctccgacagcagaagataaacatcagggaagactgttgtcctgggaaacgcaacttaaattgtgattagaatagtaaccctggtgtgtccgtttctctaactcatcatgtatgatttatgcttgatatacacactttaaaaatctagattatctagcgtggtattctgtattggccagcaatcactaatacgttccttcttaccagggttaacgggccacggtcatagagaggaagggagtatccgagactgtacatagctgattccatgcctggtcaagacaagaatcctcaggagaccgcctgtaggcatagcaagctcgctact

SEQ ID NO: 694831 - DNA, 191 bp, Homo sapiens
caaacaaaatagttttttttttcttaagtaacagtattagtggaaaagtcagcaagacagcctcttccatatagtcctttagagactcaaaataacagtagcttttttgttttcaacatttggcctctgagaaggtaaccatagtggtcatctccactccagcctgggggacagagtgagactccatctca

SEQ ID NO: 694832 - DNA, 461 bp, Homo sapiens
aggctgatgatggaggactgcattgacgccctggagacaagactcgcgtctggcgcaatacagagagatcttgtttctacaaaacatttaaaacttagttgtgtgtggcagcctaacgcacctggtctcagctacttaggaggctgagggtgggaggatcatttgagcttgggctagtagtgggctgtgcactgcacctactgaaactcccagcctgggtgacagagcaagaccttgttcaaaaacaaacaaggaaaagtcaagtcccaagcccctaaagccccgaaaacaaaacaaaaccaaaaacccacatacttgataacagacaaatgtgtaaagaactcttaaatctcaacaagaaaacaaacaacccaattttaacaatgcgcaaaagatctgaacatccacctcaccaaagatatacagatagcacacacgtctacttaaacgattctcaacat

SEQ ID NO: 694833 - DNA, 799 bp, Homo sapiens
cccaggcttgagtgcagttgaatgttgagatgcccttcagctgatgaagctacactttatcaccaaggaacgttggtgctgcagctgagagtgtggatggtggatgtgtggatgatgcatggacaatggcctggcaactttatctgtgctgtgcttgcacatctgactggtgccaacctgtcctgtcctgctggtggatgcactgctgctctccaatggtccacttcacctgcctgcaactgcatgctcctactacaatgtccctgcatgtctagcctgatgtgatgtgcctgcgaaatgcgagaatgagaagatgaatggtcttggtgcccagctatgagagatgcagccctgtggaggagtgtgatgcacagatgcttggatgtgacgaatgtgagctggatcttgctagctacacattgcccgtgttttgtagaccggaagatcactgatgacctgcacattctactgttgcatgtgatgtggatgacctggaacccacgtatggactgacagcatgattgtgagaacattgcgccaattgacatattgtcatggtcgacccccccatgattaagagcgtgctccataatgtccccccgtcatgggggtagcagttctttgcataatgccaaagattattgtaagattggaagaaatggtacctgtagccctgaagtataagaaaagtcgagtctacttgcaccattaacatgtcttctacatttgataagtgcaacagagaggtctgccatcaacctccttggtccctatacacatgcttaacattcggtactta

SEQ ID NO: 694834 - DNA, 727 bp, Homo sapiens
agcgggcggggctcggggaggccagctgggaggggagggggccgtgggggcggctcggcggaaccagccccggctgggcagcagcggggacgccgtggggccggggccagggctttccggggcttcgtgtgaggcctgccgtgggccccaatctttccggcggtcgccggagtttgtggtgattgttgctgccgcctgcaacgccccgtgtgccatctcctcctcctgggcctgcgcttcctcctctttcctcctcctccgtgggcctgggctgatccccttcccccgttgccgcctcctccttgggcttgggcccggggtgtctcagtcccctcgcggagccgttcttgccggcgccgccgccgcttccttcattcatcctcgtgcaccataggcggcaacaggcaccaagatgttccaaccgagtggtctgcgaagaaagccagttcacgcgggaagctgtacacagcctcaggcaccggcagctgaatgcacagctacaaagggtgggtttcacaaagtacagtctacaaaaagacgctgctagagccatttattggccaccaatgcagggatatacggtacgtgtggggtcttgtgcgtgccaatgttttttaaacaaagtggattcggtctatacccggaaaaattttattcttggggctttccatcatggtgccttcttgatgtggatttcagtgtgggtatatttgggaaactttgtttg

SEQ ID NO: 694835 - DNA, 387 bp, Homo sapiens
gaagatcttttttatttggcaggaaaacgagacagcagcagcccaggagggacaggtggacttaatcctcctcctcgtcgtctccagccccagcccacctggccttcttggattcgtcctcttcacgcgggccgggcggacaaccccgatagggagagcgcagagagaagtcgatgtgcttctgggaatccaggcggacaatgaaggacgggatgttcaccaacatgcttgcggagcctgaatattgcgctggaggatcagacacgcgagacgtagtgagatggacttggccaagcccagcttgaacgacctgggtctgcaggcgttctctctaaagaaatcctctatcttcagggccaggatgtaatccagcttcatcttgccctc

SEQ ID NO: 694836 - DNA, 287 bp, Homo sapiens
  misc_feature (3)..(3): n is a, c, g, or t
ccnaaaaaaaggggggggggggcccctttttttttaaccccccgggggggtttttttttcccccccccccccccccttttccggggggggggggggctctttccccgccccccaaaattggggggaaaggactttttttttttcccccgggggggggggggggggttttttttttttttgtggtctttttttttaaagttttgggggccggggggtttttttttttttttggggtttttttttttccccgccccctcttggccaaaaaaatgggcggttttttttta

SEQ ID NO: 694837 - DNA, 420 bp, Homo sapiens
aacacttgtagaatgcttactatctgccagacattgttttaagtgcttttcgtatattaaatcacttaatcctcatggaaccttatgaagtaggtggtatgatcatttctattttataggtgaagaaactgaagcacagaaaagttaagttgcttgctcaagctcccaggggagatccaggcttggacagtctgattcagaaactttgctgataccaccatgctgtactgtccttcatgtatgggcacacataggcgatacaggtctgagtcaagaaaatttgacatcacttcctaaacacacacactctcctttttctccccaaataaagcatctatgaatgaatgttgtttctgtggttagacgtgtttggagaattttatctgcagaatcttccaaactgaacattgtctgataata

SEQ ID NO: 694838 - DNA, 399 bp, Homo sapiens
  misc_feature (72)..(72): n is a, c, g, or t
  misc_feature (390)..(390): n is a, c, g, or t
cgggtaggccacgcagcaggagaccctgttcccaggttggaaatcatgtggaaccatgaagaagacctcacntcacccgtggccctcgtgctgagctctgtcttggtgaaatgataagcccctcatcccactgtttccaacaccccccaaccaccagcagagctgcccaggaacccagagttcaatgcacccttgtgtgcacagccaagggaggggggcggacaccatctggcagtgcgctggacactttcagaagcccacagcctttttaaaataaagctggccagaggaggggagaggtcactgcaaggcacatgggggctctccagatgctgaggagagacgtgctctgcccaggatgcaggagccccagcccagtggggagacgcntgcaccttt

SEQ ID NO: 694839 - DNA, 229 bp, Homo sapiens
ttttggacagagattaaaaaacacacaagtgaggcttcagtctgaagcctgggcgacagagcgagacttcatctcaaaaaaatatagacagatagatagatagatagatagatagatagatagatagatatagataaccaggcaagctggctcacacctgtagtcctagctacttgggaggctgaggtgggaggatcacctgagcctggggaagtcaaggcttcagtgc

SEQ ID NO: 694840 - DNA, 941 bp, Homo sapiens
gcgagcagacccggcctggcgccgcctgcggcatcaccatgggcgatgcatttcatcattctcagataaagcggtgctatctgtatgatttctggagtgtcacagtcctgctggcatggcctttcggtgtggtgctcctgttctggctgtactgtatgaaggcatcaaggttggcaaagcaaagctgctctaccaggtactggtgaacctgccaacctccatcagcagagacatcgcagagacagacggggactctgaggctcagattcattccctgttggagaacccaccacaggtggtattatgtgtcactttggccagtctctaatccatgtcatccaggtggtcatctggatactacatcatgcttgactgtaatgtccctacaagacctggaattttcctttgcgttgtgtgtcttgggctctgctgtgggctactacctaggcttacccacttctcagcaaagctatagctggtgaggaacgtgcaggcactgaggctggagggacattgaagccccctcttccagacactatagttccaatgacctttcttctgatggctattcctccaccttattccccaggccctggaaactttgaggccgaagcccagcaacttggtccctgacagtacggaagccattgcaggcaccgctaccgttctcagccagcccataatagcgcccaggcatggtctagtgtcttaaggaaagttgctgtgacccaacgggagaatggagcataacagggggtgggcgcattgatacatgagcccaggacaagtgcttcatctgtgattacaaaccaaggcatatcgccaacgaattacgctaggcagagggggtccgggtgaaggcgtgcagtgcgactgtgaccagcccgcgagttatctgtttgtggcatatcatcaggcagtgcgtcctgaatcatagacag

SEQ ID NO: 694841 - DNA, 225 bp, Homo sapiens
gcccacatctcatccctacatctcatagcgcttccaacatctcatagcccttccaacatctcatacctccttccaacatctcattactccttccaacatccatccctcctatccaacatctcatggctccttccaacatctcatgtcccttccaacatctcatgtctccttccaacatctcatcactccttccaacctctcattgcgtcatgagatgttggaagg

SEQ ID NO: 694842 - DNA, 954 bp, Homo sapiens
  misc_feature (108)..(108): n is a, c, g, or t
  misc_feature (150)..(150): n is a, c, g, or t
  misc_feature (175)..(175): n is a, c, g, or t
  misc_feature (205)..(205): n is a, c, g, or t
  misc_feature (227)..(227): n is a, c, g, or t
  misc_feature (251)..(251): n is a, c, g, or t
  misc_feature (279)..(279): n is a, c, g, or t
  misc_feature (281)..(281): n is a, c, g, or t
  misc_feature (304)..(305): n is a, c, g, or t
  misc_feature (309)..(309): n is a, c, g, or t
  misc_feature (315)..(316): n is a, c, g, or t
  misc_feature (338)..(339): n is a, c, g, or t
  misc_feature (354)..(355): n is a, c, g, or t
  misc_feature (366)..(367): n is a, c, g, or t
  misc_feature (378)..(378): n is a, c, g, or t
  misc_feature (383)..(383): n is a, c, g, or t
  misc_feature (403)..(403): n is a, c, g, or t
  misc_feature (422)..(423): n is a, c, g, or t
  misc_feature (431)..(431): n is a, c, g, or t
  misc_feature (434)..(434): n is a, c, g, or t
  misc_feature (585)..(585): n is a, c, g, or t
  misc_feature (589)..(589): n is a, c, g, or t
  misc_feature (603)..(605): n is a, c, g, or t
  misc_feature (610)..(610): n is a, c, g, or t
  misc_feature (614)..(614): n is a, c, g, or t
  misc_feature (617)..(618): n is a, c, g, or t
  misc_feature (626)..(626): n is a, c, g, or t
  misc_feature (629)..(629): n is a, c, g, or t
  misc_feature (634)..(635): n is a, c, g, or t
  misc_feature (637)..(637): n is a, c, g, or t
  misc_feature (640)..(641): n is a, c, g, or t
  misc_feature (644)..(644): n is a, c, g, or t
  misc_feature (648)..(648): n is a, c, g, or t
  misc_feature (666)..(666): n is a, c, g, or t
  misc_feature (673)..(674): n is a, c, g, or t
  misc_feature (684)..(684): n is a, c, g, or t
  misc_feature (691)..(691): n is a, c, g, or t
  misc_feature (694)..(694): n is a, c, g, or t
  misc_feature (697)..(698): n is a, c, g, or t
  misc_feature (705)..(705): n is a, c, g, or t
cagaggctgggatcatggtagatggaaccctccttttactcctctcggaggccctggcccttacccagacctgggcgggctcccactccttgaagtatttccacactntccgtgtcccggcccggccgcggggagccccgcttcatctcntgtgggctacgtggacgacacccangttcgtgcgcttcgacaacgacgccgcgangtccgaggatggtgccgcgggncgccgtggatggagcaggacgggntcagagtacttgggaccgggcagacacngnagcgccagggacaccgacagcanncttntccganntgaacctgcggacgctgcgcgnnctactacaactcagnngcgaggccggnntctcacacccntgcangtggatgcatggctgcgagnctggggcccgacaggcgcnntcctccgnggngtatgaacagtatcgactacgaccggcacaggcttatctcaccctgaatgaggacctgcgactcctggaccgcggtggacacggacggcctcagatctccgagcaaaagtcaaatgcatgcctctgaggcggagcaccagagagcctaccnggangacacaatgcgtgnnngtggnctcnacnnatacctgnagnacggnnanggnnacnctgntcacctggagccccccangacaccnntgactcaccnaccccantcnctnnaccatgncgccaacctgacgtgccgggcccgacgctactacctgcggagacccacatggaccggcacaagaaggcgcagagccatacccaggacacaacaccgagaacacccgccaaagggcagaacatcgaagggaaacggaggaacaaagacacgaaaagaagaggtacacacaacaggcaccgaacgacaaactcaacgcaccccagccccacaacaaacaaccgaccgcaccggacgacgaagacaccagca

SEQ ID NO: 694843 - DNA, 274 bp, Homo sapiens
gtatcatcagccaggagcgcagagaaaagaaattcggggttcagagattatagaagtcttatcgacacaagatgtgaacagaagagatcgaacagaacaagttttatagaaggccaagaataatccagggattgattttacttcatagacattgtagatgaccatacgtgtatgtattgattttgcatttcaggcatatgtaccaaggcaatgcagtgcatttcactcttccccgtctctttcatcatgtgcatggcaaacatgaagtggcatg

SEQ ID NO: 694844 - DNA, 524 bp, Homo sapiens
ccttattttttttatttggcaggggcccaaaaataccctcccgttttagccctttgttttgtcccccacccttttttcttgggggccatggacttggaaaaaggccgcaagatttttttgggcccccccagggtttaaggccccctggttcctttggttggatccccccaaatatttcccccctcctattttctgcagcaaatttttccctaggtgaagagacgggggttatttccccttaaaaccccccccatcccgaaagggttggcattgtttgcccttaaaaaccctccccttttttccccccctattttttaaaaaaaaaagggggtaagttaaaccccaaggccccttttcaaaaaatttccccaggactttgcaaaaaacccccaacaaaaaagccctttttaaaaagggggatttttttttttaaaaaggaaggtccccaaaaacaggggcaaagttttttggaaggtttaatgggcccaggaccccggaaaaggcccaaaaaaattgagagggga

SEQ ID NO: 694845 - DNA, 1274 bp, Homo sapiens
gatcttcgcgtggtggagacggggtttcacctagtgttggccgggctggtctgggactcctggcccatcaggcagtccacgtggcctcgagcgctccgccaagaggtggctgggtacttagtagtggccctaaggccaccgtgtaaccgaggccagaaattgtatctctatgtcttgtgttgataacggccacacagcatagcactgggtggaaaaggatagggtgctctgttagcacatgtggatgcctgtcacgaaaagacgtggtattacaccgacagttcgcaccacagcacgtggagagtcttgtgcacgcgcattacccttttatcaacctactattccacagagaatccaccagacaacctgtagtctacgtgacatgtaactcgatctaagaacgcttggagacacaaaacccccgccatcaagacccttgtgacctaccttggccgttcactcgcgtcccctgtgtcaggagcacccggaccagagacgggagacaccaaaccaggcggccgacgcgggggacagacgaagcgggaggcactccgcggtgccccccgggagagtcgtgtcgaaagagaatagacgataagggcaggagctcatacaagcaaagccgtgcgggcgaaagcgaccccgcccagtatgataggcccgcaaagaagaccgggtgcgctgttacgaaagacaatgtcgtgagcgcattatgtgtggcaacacgtgtgccagttaccatatgcgccctacaattcgatgactaacctctcaacctcggcacgatgtttgtgccgcccaagtgttctccgcccccggtgacctcccatatctagcaagcgttgggtacatctggatggaaaaggagagatcccccgggagtgcttttgtcgtgtgcaacgctgcgtgccagaggaacatccgtgtgggccccaacctgtcgcgggaaatattacacgcacggtgatataccccggagcaaggcgctcgtttgggagctccccagcgactgcacccgatatatttacgcttagagacgtcgggaataaaattccctgtggggtccccggccccattaaagatcgccgtaggccgcagtttcgtccaagcggcctcccctcggaaattaactatccagcggcacaatagcgctgtgggagaggcccgtggtcggctaagatttccaaccaaatggggagtagtggtggcctaaacaagtggaggacccgtgtttcgcccccagagatgccaacgacccaacttcctggtctccg

SEQ ID NO: 694846 - DNA, 970 bp, Homo sapiens
ccacgcgtccgcgctggagaacactggtgacagtgggtggagcaggcctgtctttaggttcttggatggcacatatggacatactggtcctcaggccccctgaaggtgcacacaggcatgctgttgccctgctgagaggggcaaggttctgttggtggcattggtgttgggaagatggctcccaggttctgggagcttcagctccctttttcctggggtagcctccctggtgtgctatactgcctgttccctgggatataagacacttcatgggtcagagtactggggacctggctgcactgctgggtgattgtgatactgcaaccttctggatggatgtgggaggatgttcttgggggtccaggatgtggactgcaggggcttattggaccccaagtgggcaggatataatctggtgggggctagcctcttaaaatggtgctgtgccacagcagcatgtttcttgggatgtgagtaggatccagtggaattccctttctggaagaacgcatttgcatggattccaggcagctccgtatactggactcagggcctgtgaagctgacggcatccctgtgggtgccagcatctgtgctgcgaatgtggaccactgcagttcttgacttttcttttcccagaaatgggattccccttcctggttctgaagcagtccaagaaatgcgggtgcttattacgggtccctgtggccagaagttcccggggaataagggcgcgtggggcgctacctggactggggactactcgcctcgggccttgcgtgacggagctaggggccacagccagggttgggacacacagctgggggtggaacccagggacctcccactctacgtccacagtcgcgggggaacaacacgcgcgtcagagggagactcagagggcgaccgcagcatagaagtagagggggggagcaacaaacacaaagagcgaaatgctcactgcgaagaga

SEQ ID NO: 694847 - DNA, 293 bp, Homo sapiens
atctgtgttcctggatggagctatgtagagcccgctgtactgcaaactctgcaaggtcacctatgaactctgcacagagaaggcgcgaggctcaatgtaatcatggggtaaaagatcatggtaagaaactccgaagattactagtgtgcagcaacatagctgtcctcctcctgctagaatgagcaatgtggtcgagcctgcagctaccccagttgttccagtccctccgcagatgggctcctgtaagccaggaggccgagtgatcctgggcacggagaatgattactgtaagc

SEQ ID NO: 694848 - DNA, 263 bp, Homo sapiens
  misc_feature (17)..(17): n is a, c, g, or t
  misc_feature (45)..(45): n is a, c, g, or t
  misc_feature (67)..(67): n is a, c, g, or t
  misc_feature (75)..(75): n is a, c, g, or t
  misc_feature (169)..(169): n is a, c, g, or t
  misc_feature (220)..(220): n is a, c, g, or t
  misc_feature (239)..(239): n is a, c, g, or t
atcccatcctgtgtccntgcgtgcccctccttcctctgtgtgaanacacatcccatgctgtgtcccngcgtggcntccctctctccgtgtgcacacacatcccatcctgtgtccccgtgaggccttcctttccctccatgtgcacacatatcccatcctgtgtcctacngtggcctccctcctccgtgtgcatgtacaatccacgctgtgtccatcgtgncctccctccttcctccttntgcacatacatcccatgctgtgtc

SEQ ID NO: 694849 - DNA, 148 bp, Homo sapiens
atgggtgcccatccccctgtgccatatattctcaattgttcaactcccacttatgagtgagaatatgcggagttaggttttctgttcctggtgttagtttgctgagaaatgatgggttttttaaatgtttcacaaagtgtcccaagca

SEQ ID NO: 694850 - DNA, 295 bp, Homo sapiens
agatgcccaacgcgatcaattccggcgcttgtaaactcgaaaaaccggcacacccgcttcggcacgttgatcagcacgtccggcgggtaaccggcaatcttgtactgcgccaacgaggtctgcatcacttcgaaactctggttgatcaggtccagcagtgacgccggcccaacgttatcgatgatgaacgagccggtcgcggactttggcgcaccttgtttttcaggcgcagccgcaggttgttgggcctcgggttcggccgactccagccacgggttgatttcggcagcctgga

SEQ ID NO: 694851 - DNA, 482 bp, Homo sapiens
atgacccaccaatcacatgcctatcatatagtaaaacccagcccatgaccccataacaggggcccgtcctcagcccttccttaatgacctccggcctagccatgtgatttcacttccactccataacgctcctcatactaggcctactaaccaacacactaaccatataccaatgattggcgcgatgtaacacgagaaagcacataccaaggtccacacacaccatgctgtccaaaaaagtgccttccgaataacgggggcataattcctatttattacctcagaagttatacttcgcaggatttactgagccttttacgatccagctagccctacccccaattaggagggcactggccccaaaaggcatcacccgctaaatcccctagaagtccattcctaagaacatacgtataactcgcatcaggagtatcattcatctgagctcaccatagtctactagaaaaccaacgaaagcaaac

SEQ ID NO: 694852 - DNA, 214 bp, Homo sapiens
caatgaggtcagagagatgaggggacaggatgactgtgcaggaccttgttgggccatactttgatccctaactactgtgtgcgtgtgtgtgttggtgtgtgtgtgtgtgtgtgtgtgtgtgtgtgtgtgtgtgtgtgggtctctctctctgtcgcccaggctggagtgcaggggtgtgctctccgctctgtgcacccttcgcctcctaggttca

SEQ ID NO: 694853 - DNA, 140 bp, Homo sapiens
catggtcacaaatggtcacatttaatgttcttttaaagacagatgcctatatttaagaagaattggtttttcctaatatctcaggttcaaattactgatacaaatttgccagagaaacaattacatgttttaccgtaaca

SEQ ID NO: 694854 - DNA, 543 bp, Homo sapiens
  misc_feature (10)..(10): n is a, c, g, or t
  misc_feature (92)..(92): n is a, c, g, or t
  misc_feature (210)..(210): n is a, c, g, or t
  misc_feature (293)..(293): n is a, c, g, or t
  misc_feature (407)..(408): n is a, c, g, or t
  misc_feature (463)..(463): n is a, c, g, or t
  misc_feature (518)..(518): n is a, c, g, or t
agtgtgcacnggcagcagcctgggcggggctggggtggagcccggggtctgcttgggcctgagccacccacaggtccttttcttccccttcntccttggaaggcagaactgcccaccaaggcagggatctgtctgacttgaagctccgttctggggtctgggaggcgtgggcaggagtgagggccccaggccctctgagcgctcaccccngccggggacaggccccgtggttttcaggcacaagacggtagcccggcctccagcaaccccaaacagccgggctgccgcccccntcctcctcctcagcccagagggtctcccaggaccctgagggccatccacagaagaagtgggccaagttgcgggacaggccccggtcgaaagggttgccggggcgccggcggagnnaggcgaggcggggtgaggagatgaattcccagggggggggggagcaggccaccanggagaggtgcgagacgaggagaaggccgaccaccaacgagaaaagagacagcagngggaaggtggcgaacaggagcccgc

SEQ ID NO: 694855 - DNA, 739 bp, Homo sapiens
  misc_feature (612)..(612): n is a, c, g, or t
gtggatcccccgggctgcaggctcggccaggccaagatatcagtcccatcggccatgacattaaaagaggggaatgtgttttggccaaaggaacccacatgggcccctcagagattggtcttctggcaactgtaggtgtcacagaggttgaagttaataagtttccagtggttgcagtcatgtcaacagggaatgagctgctaaatcctgaagatgacctcttaccagggaagattcgagacagcaatcgttcaactcttctagcaacaattcaggaacatggttaccccacgatcaacttgggtattgtaggagacaacccagatgacttactcaatgccttgaatgagggtatcagtcgtgctgatgtcatcatcacatcagggggtgtatccatgggggaaaaggactatcttaagcaagtgctggacattgatcttcatgctcagatccattttggcagggtttttatgaaaccaagcttgccaacaacatttgcaactttggatattgatggtgtaagaaaaaatatctttgcactacctgggaaatcctgattcgctgtggtcacctgcaatctcttttgtcgtgcctgcactgaggaaaatgcanggcatccttggattcctgtgccaaccatcatcaaagcagggttatcatgtgattgaaggaaccactcccttgtgcacagagttcaagtaatcaaatgagcaaaccgctttttgagccttgcgccccg

SEQ ID NO: 694856 - DNA, 106 bp, Homo sapiens
tactgatacggatcgacgctcggtcccctgagctgatcactggtgggcgcctgtagtcccagctactcgggaggctgaggcaggagaatggcatgaacctgggaga

SEQ ID NO: 694857 - DNA, 545 bp, Homo sapiens
tgttgtcgctacagggagggatgacgggaaagagggcatacaaaaattactttggtctaagaatctgacatctgcattccagagaaatttaccagctgtttgaccttggataagacactgaagccactgtatgtgggtttcaattcctcatatgtgacaagtgccaaaataatctatcttgtcccttaatacacaacagagtaagcttggccattacttaacaatgacaatgacaactgacacctggaagtagccttctcaatgttcaacatgctgctccttatcttttttcgttgagcttcacaataaaactctgaacatggcagagcaggtaaagtcacgtccgttttacagatacagaaatctcagtggagagaggggaagcttcctgtgctacagaggagctagctaacagtaacaacctgggctggatgtcaccctcaccaactctgaatctgtgatctttccctgaaagcagaggtgaaagcactttggaaaaaatctaagtggggacaggagctaatagtcattagcgacagcaggca

SEQ ID NO: 694858 - DNA, 102 bp, Homo sapiens
ctgagtacctaggactacagaaaatgatccacagtctatttctcataaactgttccggtcgacatatttctagagaagcactcgaagagcgttgttgagcca

SEQ ID NO: 694859 - DNA, 1101 bp, Homo sapiens
gacgtttgcctgtaagcctcttggcgttgccattggcccgtgcgggttttgttgtgccctctccccggtggttggcccgtccttttcgtccgggtttgctggaccggtcgccccgtttcctatccgcccttatgccttgaaccctatcgcccccccttttccatctcatgtggttttgccctattgtgtgaatgctatcttggctccctcataacgttgtgtgccctttgcctcccaccttggtatcctcgggccgttccggcggcctttctgtttgtgtgtcggtcacccctctgggtccgggccttaaccccttcgccctttgcgactccttcgtggccccatgggtccgcatattccgtggtcccactgcccctttggtgggcccaaacttggttgcctgtaaccccttatagcccctagctaccgctcgcaagttggcatccgggtcctctttcggcgcctccatgggccgcccttggcctaggggtgtgtcccctcgaattcgggatgtcacacgatgttcttggacttgggacaccaggccttgtgtatatcatcctgcttgaggcctcgcgtctcctcgtctcgggcttcccttgtcgagccatgcccgtcctttggtgggcatgtcgtcctctcagtcccgctgcaccccgcgtcattctcccgtctacctagcctccctaactccagcgctcccagctagacacctcgcttgttctggtctcgaccgtcgggagccgcatagctcctccacgtcatgtgctgatggcccaggcgcccgtggttgggggcagtctttgctggataccgtctgccatggaatcttggtgccgtgacgtgggccctgatcacttccgatcggccagcccatcatccagcctccgtggccctccatgcggtcctcggcactccactctcacagcctcccaagactgaagctcaactgtgacttccttttgaacaacgcagctgccatgatgccttgggatccctggtcctgtggggactccggtgcctcactgattcctgtgtgaaccccgggttcagggccaggcctccttggaataaatggttattactactaggccccacctc

SEQ ID NO: 694860 - DNA, 208 bp, Homo sapiens
  misc_feature (192)..(192): n is a, c, g, or t
  misc_feature (196)..(196): n is a, c, g, or t
atgtgctggcctgtcaaggaacgtgctcatgtaggtacaacacgagggtcacgtgtaaccaggttcctaatccacaccacaaatgtcagacaatctaattaccggaaggtatcatacaaatggttatcggaataataccagcagtgaacctgcttcagatatccttgttctcgacccgtgtcactcctgtgnaacnagcggtgtgtcc

SEQ ID NO: 694861 - DNA, 949 bp, Homo sapiens
gaatcctacctgctctgacggaccgaaatgcaacgagctaagctgctcggcggctagccgattgaggctagttagggtggaacgctcgtagtagagtttatatcgttgatgccctgtatgtgaaaccaagaggatgcactccgagcggcatagcacgcagggtcttacagggagcataacgatacccattcagctgataatccacgccagttcttcatcaagaacaaacagatcagtgctgcgaagagggccaaggttcccgaaaagaagtcgaatctctcagagaaccaaccgacgcgttggaggaatgacgctaagaatcagtcgggtggtgacttgtgaacgcggaaatacgagagagcagttatgagaacacagactcgtggtattctcccaagatgaagttcacagcacttgatgcccaagaaatggcaacagatcacaggtgccaagaagctgtaagacatgccagacgacagaagctggtgcagaacatcatgaacatgctgatgcgaggacctcagtctgacctgcttgctcgttcgatgtcagttggaagtgcagttatatcccaacaagaaaattagagcgaccttttcagataatagggagaagatcagccagtatctctcaaaggagagccttgaaacttgcgcaggacctcaattgagagtgggtgagtcagaactgtagcaaattgcagagtgaagaacatcgttcacacacacctgctgatgtgacacactgcacaactggcacaggaaaatccagaatcactaagacgcttgagcagtacgcctacacagcgcagtactgcgctcggatccgacaaaaaacaagtggggcattacacgtaacccaatcagaacgaaagataagtggaatacaaataaatgcggacggaacacgacacaccaaccacagaccgtgaacacactaaagcagacac

SEQ ID NO: 694862 - DNA, 1083 bp, Homo sapiens
gccggctgcgcagtcctcgacgaggccttccagcgctatcgtgacctgcttttcggttccgggtctatgggccccgatccgttaccatcacagggcacaagcggtatacactggagaagaatgtgttggttgtctctgtagtcacacctggcatgtaaccatgcttccgtagcattgtgggagctcatgctggacgcaacttagtaaccactgaaccctagtaaactgactgtatccagttgttttactccctctctgtagactgtctgggtgcagctctccgaggctctggagcactttcagaccggcttggtttggcactctgctgagggccaccatttctcttaatcacaccaacgtacatgtagcattgaggactttccccgcgtttccctctgaccgggtgctgcctgctcggaatacattctcgccgattacctgccactctcatatcgtcctggacactctggatgtcatgggcgtacaataagattgacaccgtgttccacctgtgcatctgggtagcatgactccgttcgcttcccccaatactgacgagcttcacttcttcccagagctcatgagaaaggggtcctacaaccctgttcacccacatctacacagcacaggatgtgaaggaggtcattcgaatacgcacggctccggggtatccgtgtgcttgcagagttttggcactcctgggacacactttgtcctggggaccaggtatccctggattactgactccttgctactctgggtctgagcctctggcgctttggaccagggaatcacagtctcattatactattatcctgagccccattcttccttagccaaggcaggcctgggcttcccaggactttaaacttcactcggaggaacaccgtcgcgtcacccccgctggaaagccaaccccgcagaatcccgccctctcacccgacaaaagccccccggggcaaccaccgggagcctacaacaacgcgcggcacagccgacacgggggaacgtggacgcacgcacccaccgccccacccacacccggggaggacagcaaagagacgcgctcgcggtgcgcgcaaa

SEQ ID NO: 694863 - DNA, 922 bp, Homo sapiens
ggaccactgctgactgagcggtggaccgaattgagaccgctggtttataagcgatcatgtttctccagtattacctcaagcgagtcaggtagatcgagtctatacgctagaagaaatttgacccgatgggactaacagaaccatgattcgagcccatcgcgtgctcggttctccgcctagatgacaaatactctcgacaccgcaatcgagcatcaagaaaacgcttcaaggtgctcgatgacctctagcgaagcctgttgccctgtccatcatgagggtcccttaaatactgatgtcgttttgcctggcgcaactgttacccctcgggagagctccgttacgcagacacctctttcgggactgttggagccctgatgcctgtgtgttgccaggccagtgacctcttttggtatccagtctcttcgtggcgattgatttattgcttgtgtgaggcaactcatggtggtcattcgcccattaatgggacacactctttgaccttgtatctttctctcatattttgtaatagttgagctaccagatgagtttatttagtacgaatacactatgaattttgaactaacagaatacgcaataattgggacctcactgacatcgttgtttcgcgccgagcaatgctgtcaaccacaaattatagtgtgtatgagaatactacccaccggataggggctcacggaggtcccttcctaagtgagactacgtacgacttgggtcttcatcagtcgccacgccagaggacaacgctgggttaacagaagcatggatccggtcggattatccacaaccacgagtttagaaagatcccccgagggagcacactctcatagtgtttttttcgtcacataatggccgaacttggggtattattgcagaggcggacatctcgggggtcttatgtacc

SEQ ID NO: 694864 - DNA, 116 bp, Homo sapiens
aatcaagaagtggtggactttgaaaagttggatgactacacctctgcctttcaaggtcatgatgttggattctgttgcctgagtaccaccagagggaaagctggggcggagggatt

SEQ ID NO: 694865 - DNA, 305 bp, Homo sapiens
ttaaaaaagggggcccccgggggggccccttttgtttaaaaaaccccaaaaaaaaagggccccttaggttccctttttttacgggttaaaaaagccggggggttttttttctgtttttttcccaaaaccatttggggaagggtgggggggggggaacccccaaaggggggtttttgggccccttttttgggccgttttccccgggccctttttccccaagggggggggcccccctgtggggcaaggcttccaaaaaaaatgggggttttaaaaaggggtgcggatttacctttttttttctttta

SEQ ID NO: 694866 - DNA, 698 bp, Homo sapiens
gacttgctggggtcggggctgcgcgacgtgtgcagggtgctgctgggagcgccgcgcaggccgtgcagttcctagcgaggaggcgccgaccgccattgccggtctctcggagggcagctgggcattgttatgctatggtgggagcctatggtcttcatcacttagtgatgacgtagtgaccgactgtcattatggaagatgtgatacacgcatcatccacgtgctgtagtgatcatagccttgtaggaagcacctggcttttcatcattggaggctaagttggcgtgcgtgtgcgcacaaatccgggaagagtccgcgtgatggaccttggccaacgttatgatcatcattccgtgctctttggtattatggtcacagaagattgtatgatagatggatttaggggcatatgtattacagacgcaaaggatggagaaatgagagatatgagtcggcgaaagaattcagaaaaagttgtattaaggacacgtaagaactgagaaacacaaaccccttgcaattggcctggcgttacagacccagggcgacatacatcggaagctactgcgtcgcaagcgaagacaacaggcacatgccaagtatggtatcgtcgaggatacttgcaaacgagagcgtacccgtacaagacactaggagtaacttaaattcccaagacaaaacgcggattccaacaagaa

SEQ ID NO: 694867 - DNA, 1112 bp, Homo sapiens
  misc_feature (67)..(67): n is a, c, g, or t
  misc_feature (70)..(70): n is a, c, g, or t
  misc_feature (157)..(157): n is a, c, g, or t
  misc_feature (170)..(171): n is a, c, g, or t
  misc_feature (535)..(535): n is a, c, g, or t
  misc_feature (690)..(690): n is a, c, g, or t
  misc_feature (800)..(801): n is a, c, g, or t
  misc_feature (877)..(877): n is a, c, g, or t
  misc_feature (1058)..(1059): n is a, c, g, or t
  misc_feature (1085)..(1085): n is a, c, g, or t
  misc_feature (1108)..(1108): n is a, c, g, or t
aagaaaaaaaggggggaggggggggggggggggggagagggggagtggggtggggggggagggggangangagaagaggggtgagttagagagtaatgaggggaggggggaagaggaaggaaagtggggaagtagatgtttaagaggaggaaaatgnaaaatgtagtggnnagtaggaataatcaacagtcagctcgttggttctttctttcttttacaattcacacgttgagtacagatcaaacataactgtctcggcgcggagatagttcgagagctgatatgcggtggggaagagtgatttatctggaggaattagaacagacgtgagttaatataatattttctcgaatgacgcgtcaatgttgactaattaaaggagtaagatctcgcactgggtcacgtgcagctgatcgcgtcggcagactagccagctctgtgtccgattcaatctcctcccgacgactcctacactctcccccgcagccaccaccccaacccaccccgcccccccaaatatgctcccacgttcatnagccacaagtaacacatgaacagtatcctccgcctatggatcgacacccgcacagtgtttcacatattctactcccgcgctccgtcatgtcacctcctctctcactacacctattaatcatcctcccccttccatcatctcgactcgtgtgtttntagtctcgagattatgctatagtccctctgatagattctcccctcacctcaactatttcacgactatgcaagcggactcgcgcttctgtcgcatcacgcacacgtgagtnnaatgtattcgctatacgtcccacacgtcgtctagcacagtatattccaccctctgtgcgattgcacgttgtgatanttcctaccgtgtaggttcatagtcagtcacggttccccctagcaggtgacggtgtcgactgagcgtccacatcgtgcagtagaactcatggagagtgtcaaaagggatacgaggcacggttggtagtggctagctgtctgcgagtggtgtgctcccaagttcacgtgcaccatctacggcnnctgatcctagtctgtgttatgtagcncatctatagtacattaatgtgtnccag

SEQ ID NO: 694868 - DNA, 686 bp, Homo sapiens
gggtctgtagtgttgtattattttcaataaatctgggacaacagccaaaaaaaaaaaaaaaaaaaaaaaaaaaaaaaaaaaaaaaaaaaaaaaaaaaaaaaaaaaaaaaaaaaaaaaaaaaaaaaaaaaaaaaaaaaaaaaaaaaaaaaaaaaaaaatttgtgggcggtttgggccaagtgatttttaaattggggaaggtttttgaatggggccgaatttggggttaattgggcaaattggccttaaggggggtggtttaaaattaaatgggcggggttttaaaaaggtgggaatgggaaaaacttgggggtacccaaattaaatggtttggaaaaaaatccctttttggcaggtgggggaaataggaaaagggccggaacggagggcttttcaaaaaagtgtggaaccttgatggggaatggaaatttgaaggggtaaaattttggtaaaaattggggtaaaattttggtaaaacaagttaatttttaaacaaatgggcgaaaatgggaaaaatcctttataattaaaaggattgcacgggaaagggtttgagggttgttcaatttggaaaaaggggtccttttttaaggaagggggcttaatgtgaaagggggaaaaaacggtttttagggcgaatggcccatttggggcatataccttagagtttttgggggcggggggtcg

SEQ ID NO: 694869 - DNA, 570 bp, Homo sapiens
tgcatagtctatcagcttaataaattctactttgtagtggtagagaatgcaatgtcattatattctgctaattatggtattacgaggatgaactagacacttaaaagtagaatctataaactgagtagaatatgagcgggcagaagctttaggagccatctgttccaatcgtcttccatttccaaatgaggtccaaagagcttcgatgacttgtttccaagttttcgacagaaagttaattgcagaagacaggactagatcttgcgtccctccctacccccaatcctgctatacccttcgctttagctgtcacattacacaggcatggcgaacgcatgtaatattctaacagatgtaagcagtataacaatgaaccgtcgaattcaattgcatccaattaacaagccgaaatcagcgctttcatgatgtacacgtattaaactagtagtcgtgccttccagaaagagagataagaacactgtcttcaaataagatctagcgtgtgagctgaacaagagctacttacagcttgaaaatacaccttatcctataagtcttctttatatggca

SEQ ID NO: 694870 - DNA, 401 bp, Homo sapiens
cgagagacgtgttgcactgaatcaatcataatgaatcaacagcagccgggcacagtggctcatgcctgtaatcccagcattttgggaggctgaggcaggcagatcaccttaggttgggagttcgagaccagcctgaccaacatggagaaacctcatctctactaaaaatacaaaaattagccaggtgtggtggtgtgctcctgtagtcctagctagttgggggcttagatgggaggatcacttgagctcaggaggtggtggctgcagtgagccatgattgtgggattggacttcagcctggatgacagagtgagatcctgtctcacaaaaaaaaaatctcattctttttttttggtactcaatttcctttcggctttggacagccctttctggtatataaa

SEQ ID NO: 694871 - DNA, 903 bp, Homo sapiens
gcttgaacctgggagtggaggttgcggtgagccgagattgcaccattgtattccaccccgggtgacagtgcaagactccatctcaaaaaaaaaaaacaaattgggcattcatttccaattccatagaatttacgggtgaagggccttctctagttgaaatgtgggggtattggggatcctaattggttaacccccagaagaagggtaattagctggtattcatttaaaacccaatttagcctttacttatatcgggtagaatcccagtgatcatcctaatagggtatattcagaataattttttttccttcagcaattaccttagaatcagatgctataagggctcctaggagcagggtgaaatttccgtaaagataccattgtgaatgttcgtaccccaagttttatatttaacaccaagagggccattttccactattgatctgggggcctttacacctggtcgaggtcccctaagagaatacatgcatagggcttggactccatctctattgagcataatgtatggcccacaaacagtccacgtttcaacttatccagattaagcctaggcttcccgatagtggccacggcacagtgtgaccaggatcttgccagagtaattaaccaccagaaaccttgcaaatcctcctttccgtcttaagcccccagaacgcaagcgaagggcctcttcacgactgcctctgtgccctactggcaggtttccaaacaggagtgacatggacagcccatgtgtgacccatatttgcaggtctctatcagggggtaatcttctcagaaacaactcgagaaccggtttcctagcacagacacacgctttgtagtagcatctcgacacgggcaggcccccatctggttgtcagtatacgcgcccatatggca

SEQ ID NO: 694872 - DNA, 302 bp, Homo sapiens
  misc_feature (135)..(135): n is a, c, g, or t
gttatttcatctgtactaatgaggatacgcataggtgggaaggatgggactttccaatgtgcttcataaagtctgatttcttccttcgttttaggacagtcaaatacactttttttacttgcaaacagaattttntgggaatatcttacttcataggtgatcttgtctttatctactttcttcagtaaactctggaagaaaaaaacttcctggaagtttgggcaatcatttgccattattttcctttccttgaatttcttgatatcatggaatactgctgtagtatgggacattatgtattt

SEQ ID NO: 694873 - DNA, 1073 bp, Homo sapiens
gcagggtgcaggagctgcgcccagagagcggcgaagaagcagtcactcttgtggagcgtatgcagaaagaacttgggaaactgaggcaacaggtcacaaaccaagggcggggagcagaagtgcttttggaggagcctttgccactggaaacagcaggagagtcaccgagcttcaagctggagccaatggagactgagcgaagccctggccccaggctgcaggagctgctagaccccagcccccaaagggactcccaggctgtaaaggagagggcattatccgctccctggctctctctcttccctcctgaagggaatgtggaagataaggatatgactgggacccagttgcccgagagcctggaggacatggcaatgtatatctctcaggagtgggaccatcaggatcctagtaagagagctctatcaaggtatatggtacaagatagctatgagaactcggggactctagagtccagcattcccagtcaggaggtctcaagcacccacgtggagcaaggagagaagctgtgggattcaagtgtccagacctgcaaggaaggcatgaaccccagaaacccagttccaggagtggaacaagtttgagaaccaagaaagaaatgttgagtctgtttctcctgaaagtacccatcctccagtactattgcctggccaggctacgaaggggagggtgctcctgggaagtccctgaagcaccggaagacattggcattaaccgcacgaaggccctctgcgaaaggttcgcccaaagaacaaaatacacgcaccctcacggggaaccccaagtgctaaggagacgcgtgccgccaaagaaaggccaagaatccatggagcaccgtgttggaagaaaccttcttaaaggccaacctaatatgtgcccccaaaaccgtgccacacagtgcttggcgcatcaagcggtagaaccatcctggtgcacacattatgtgacaaaacataggtggaaccataccgcatataaaagagactaactacctaggacacaggagaaactgctacgcagagatcagcaccaccacggtaactgtcattgta

SEQ ID NO: 694874 - DNA, 677 bp, Homo sapiens
  misc_feature (3)..(3): n is a, c, g, or t
  misc_feature (135)..(135): n is a, c, g, or t
  misc_feature (144)..(144): n is a, c, g, or t
  misc_feature (194)..(194): n is a, c, g, or t
  misc_feature (223)..(224): n is a, c, g, or t
  misc_feature (238)..(238): n is a, c, g, or t
  misc_feature (268)..(268): n is a, c, g, or t
  misc_feature (277)..(277): n is a, c, g, or t
  misc_feature (327)..(327): n is a, c, g, or t
  misc_feature (339)..(339): n is a, c, g, or t
  misc_feature (370)..(370): n is a, c, g, or t
  misc_feature (430)..(430): n is a, c, g, or t
  misc_feature (453)..(453): n is a, c, g, or t
  misc_feature (459)..(459): n is a, c, g, or t
  misc_feature (494)..(494): n is a, c, g, or t
  misc_feature (497)..(497): n is a, c, g, or t
  misc_feature (539)..(539): n is a, c, g, or t
  misc_feature (541)..(541): n is a, c, g, or t
  misc_feature (544)..(544): n is a, c, g, or t
  misc_feature (549)..(549): n is a, c, g, or t
  misc_feature (611)..(611): n is a, c, g, or t
  misc_feature (616)..(616): n is a, c, g, or t
  misc_feature (669)..(669): n is a, c, g, or t
cgngtgggttccccgggcccccctgcctccgctcctttgtccccggccgacatagtaagtgccctctctcacaaccctccctcgtagatattccctatttcccgtggcttgtttgtttgcctgttattgggaccngggcaaggnaaggcactgttttctcccggtagttgtttttgggcccgtgagggccagcnatacccctgcctcagtacttcgtggctgnnaaccctccctccgnagctacccctgtccccgcgggtggggcccncccagcgcnctaataatgtgtcatccttaatgaaagttctttgtcttagggcttccagntgcctccccgtnacctagccccccccttttgggttccgtgggnttgtgggtcgctggggagcaagcggctctggtttggcgtcccttatctcttcgcggtttngccttaccggtgcttcagactgntcaagnattgtcaggcggatgggccccgggggcgcgggggnggnggctgtcatattctccttgcattgtgtggacaaaaagggatntntantttgnacagcgctgagcagtcggtaactgaaggtgcaagcgcctgcacagtttgtacacgggtttgncagtntagaatccagggctatgtatcacaacaggtttctcctcttcttgacatttcanatgcattc

SEQ ID NO: 694875 - DNA, 373 bp, Homo sapiens
attccaacttacagctcaggttcagcagcaagcagtgcatagtctccttgatgagagatgttaaaggcagttctttgcaaccgaatatgattccaagggatatctcaatttctctgcaactaatttccttatcatcagacgaccagccatgtctgcctatagcgtcccggacaaagacgacctggccaatgcgctccttctcctcgggttgaatcgttcgcactgccagcagccattcggctcggctcgacagccaagtgccgcaggaaaaggcacagcgcacgccctccatgtatggccccaagcagacccgtttgacagggaaacccatactctgaaagcggacctcgccgctatctcgggcctgatggcg

SEQ ID NO: 694876 - DNA, 832 bp, Homo sapiens
  misc_feature (68)..(68): n is a, c, g, or t
  misc_feature (72)..(72): n is a, c, g, or t
  misc_feature (266)..(266): n is a, c, g, or t
  misc_feature (274)..(275): n is a, c, g, or t
  misc_feature (277)..(280): n is a, c, g, or t
  misc_feature (284)..(284): n is a, c, g, or t
  misc_feature (287)..(290): n is a, c, g, or t
  misc_feature (306)..(306): n is a, c, g, or t
  misc_feature (308)..(308): n is a, c, g, or t
  misc_feature (312)..(312): n is a, c, g, or t
  misc_feature (336)..(336): n is a, c, g, or t
  misc_feature (348)..(348): n is a, c, g, or t
agtgcttctccgggcaggggcgcgagtgcgaggggaggaggggggttttcattgaacagggactcacnttgntgccttgactggactggaactccttggctcaagaaatcttcttgcctcagcctcccaaatagctaggactatatgcacatgctactacacctagtggaaaatgaagcacagagaagttcagtgatggacctcagatactaccagcagaaagcagaagagctaggatttcaacttaggatgtctggatccacagnctgcactnntnnnnactntgnnnnactgcctctaactatnangaancaagggcatttttttttttctggngactaaaaaganaagagtgagagggggggggtgcgtggcatcggacttatacaccctcgaaaaatcgatgcggcctagacgcagactgtcttattgaattgaacagcgcctcaaatgcgcttggagtactggggcatcctatctgccccaacttaacacgcccagctccagaacattttagatggggcgatcttagctgggggtgatacatctgcggagcgcgatagcccggatgtggtcgttagtggggaggtggcgaccgcggagagggggccgggcctagcggagtgtaaggagggtgggtgggggggtgagaatttagggggagagaggagcgggggggatgagatgtgaccgaggggcacggcgggcaggactgaaagacgaacgaactgggggaggttgggcggtattgcgaggggatgggccagagaggtcgggagagcgacgaacgtgaacgatagagtgaaacttcggggggactaaccgcacgcag

SEQ ID NO: 694877 - DNA, 259 bp, Homo sapiens
ggagtacttgtcttccgtatggaacttgtttgacttctacgggacagggtgcgccttactggaactgctggcgctgaccctcaacatggagcccttctatttcatggcggtcctgcgccccctccagctgctgaggtggattaagatgaaggagcgctaccgcaacgtgctgcacaccatgtccgagctgctgccccggatggccagcctagccctcaccctgctcatcttttactactccttcgccatcgcggacatg

SEQ ID NO: 694878 - DNA, 614 bp, Homo sapiens
  misc_feature (9)..(10): n is a, c, g, or t
  misc_feature (13)..(13): n is a, c, g, or t
  misc_feature (16)..(16): n is a, c, g, or t
  misc_feature (20)..(22): n is a, c, g, or t
  misc_feature (25)..(25): n is a, c, g, or t
  misc_feature (27)..(27): n is a, c, g, or t
  misc_feature (29)..(29): n is a, c, g, or t
  misc_feature (47)..(47): n is a, c, g, or t
  misc_feature (51)..(51): n is a, c, g, or t
  misc_feature (245)..(245): n is a, c, g, or t
  misc_feature (253)..(254): n is a, c, g, or t
  misc_feature (256)..(259): n is a, c, g, or t
  misc_feature (263)..(263): n is a, c, g, or t
  misc_feature (266)..(269): n is a, c, g, or t
  misc_feature (285)..(285): n is a, c, g, or t
  misc_feature (287)..(287): n is a, c, g, or t
  misc_feature (291)..(291): n is a, c, g, or t
  misc_feature (315)..(315): n is a, c, g, or t
  misc_feature (327)..(327): n is a, c, g, or t
gggggtcannttnccntccnnnagncngngtgtgacacagactcacnttgntgccttgactggactggaactccttggctcaagaaatcttcttgcctcagcctcccaaatagctaggactatatgcacatgctactacacctagtggaaaatgaagcacagagaagttcagtgatggacctcagatactaccagcagaaagcagaagagctaggatttcaacttaggatgtctggatccacagnctgcactnntnnnnactntgnnnnactgcctctaactatnangaancaagggcatttttttttttctggngactaaaaaganaagagttcaagtatgtggctcctgataatctaacttatacagcctggaaaaattgataggtactatatccagactgtctcattcaattaacagtttctcaagtaatcttctagctactgtcgtattttatctgtatcaacttagcaaaccaagcccaaaacatttttatggggtgctaatctttccctgctgctcaatatatttgagctagccaaatacaatcaatcttttctgctacgtggtgatatctaccaaaaatagaaaaaaatggccttcggtgtcactaa

SEQ ID NO: 694879 - DNA, 961 bp, Homo sapiens
  misc_feature (1)..(1): n is a, c, g, or t
  misc_feature (614)..(614): n is a, c, g, or t
ntcgggccgatccctttttattatttattttgttttttaagtagaagatgaacaaacaaaaagccaaaggtgaggttacaaaactgacttatttttaacttctatgctacgcattgagccatagctcaatcttgtttttagttttagtatgtaatcttggttttggttacagacttatggcaattagctatacaaaacatacccgttctgaaaaaatttaaaatatgtggtctgtacaactcataactgggagtattatacccaggaggctttgtcacaaggtatcattattcctgtcagtaattattttcttcttttaccagttgttcaggcatctttgtacccatccttgatttggagggtctgaccttgacctaattatatccttcaaaactcgcccttacactctcatgcgacagtccctgggcttagagggaggatgcctgtatagtcttagtagcaaggcatttgcagtgaaaaacagattgggcccagtgggattgttacaggtaattaggcatgagctgggcaggagagagggctctcctctaccaactagaatgtcgggtgatggttcagcatttattgcattgcctgtctaaaaatgatatttnggcgcaccagggagaggccctttgctgatgggtcacacctgtaacatcatcaactgtaattgactgcgagcccacgggagagcaggttccttggcatgcgtattatgagacaaaaaagaacagaggggagtgtatagtcttgggggggcctctcctgggaaaagggaagagaccctaatggcgctttttaaactccctaatactggggtggtgccgcccaaagataggaacccttgcttggggaagtcccctaaagaaaacgggaaaagggacttaaattctgagaacgggacagaggcttgcgtttcttatcttactgcctttgtctttaagccattctgtttgtt

SEQ ID NO: 694880 - DNA, 192 bp, Homo sapiens
ttctgaagagacgctgttgggccttctgaacagcatggctaattaacagaaagccattatcattattgcccccatccttttaactgtctttcttatttgggtggggaatacaggggcttactctgttgaccaggctagagtgcagtaatgcaatcacagctcactgcatcctcgacctccttggctcaagtc

SEQ ID NO: 694881 - DNA, 221 bp, Homo sapiens
ttgtgcacagcacggagaagggctaatccatggcagtctggaagtcccagacaacggcgagtatcatagcatgcagctgctggcgctatgccacagctactagcatgtaacagttcttgagccacatttgtggcctacacctcagctcacagcatggccagatccttagtccactgagcaggaccagagatcaaacccattccttctccgtgtggcgtggt

SEQ ID NO: 694882 - DNA, 393 bp, Homo sapiens
  misc_feature (20)..(20): n is a, c, g, or t
ttactgcattttatgagganaattatatattataatgatacttggggatttgagaaggtcttgggacatatccctcatgaatatctaagtctcagcactagtagatttacttttccccaataatttcttgttaatttttcagtaattgcaaaaatttggcttacttagcttattatggaactctacttttttgaagatgcagagttttcttgcaagttattttaaatttgacagtaaaatgcctaaaaacttaagacttaagatgctagaggaactgcaactgctccagatgtacaagtgctagcatggggtatggttgaagttataacccctgctcttgctaattcctgctgcatggtcattgttcaactcatctgtctacattaaaaaaaa

SEQ ID NO: 694883 - DNA, 462 bp, Homo sapiens
aaccaatatttcgcatgtctactcatctgagagatgagttatctctatagtttagcttttttttttatattttatttattttcttattggttccttcacagctagacaaccttacagactttggggtaatccagcagttaaatataataaacttttaatccccaacatatttttccctgctttgggagaagggaatgtcctttgccccatttaaagatatcacaagggctatttaaataaatagctatgtgtttcctttaaagaaattggagtctggtatgagatttaaactgaaggactcttaacaaatgtaattcagctgagttttggagcatttaaggtgaataagtcatgtatccctcgacctcgtgtggtgttgtccttcattttttatccaacacaggaagagagggggccagcaaggtttcgccccttgaggaggtgggcactctaatagggggg

SEQ ID NO: 694884 - DNA, 249 bp, Homo sapiens
  misc_feature (5)..(5): n is a, c, g, or t
caagncgaactgcgggaggagcatgaatcagctgttccttcgggaggagaaaaaggaaacacgtcagattgatctctggtctcggacatgtgggctgtgcagcggctttttggatagactgggcctttccagcacaaaggaacatgaggaaggtgggtcctgctggatgctggttggcacacaagacggcttccttaggaaagacggacacataccaatcacaaatggtgggtctgctgagagaagcca

SEQ ID NO: 694885 - DNA, 257 bp, Homo sapiens
tggtacgattgcgtgagaccaggagtacgagatcaacccgggcagcaaagcaagacctcatctctacaacaacaacaaaaatctcagcaggcttagtcattaattggttccttttggtttttgtagcaaatgacgagatagattcaaaagcaaaacaactttgaaaagggaacaacgttggaaatcttttagtacctgaattataaggctgatatatcaaaggtagaagccagaaaacaccagcggtgaaattagca

SEQ ID NO: 694886 - DNA, 321 bp, Homo sapiens
ggtcgaccttactctgttaagcaatatagatatatcttatctgttcagttggcggggcgcagtggctcacgcccgtaatcccaacactttgggaggctgaggcgggcagatcacctgaggtcaggagttcaagaccagcctaaccaatatgatgaaaccccatctctactaaaaatacaagaattagccgggcgtggggacatgcgcctgtaatcccagatactcaggaggctgagacaggagaatcgcttgaacctgggaggcggaggttgcagtgagctgagatcgcgccagtgcactccagcctgggcaacaagagtg

SEQ ID NO: 694887 - DNA, 458 bp, Homo sapiens
agctggccccgtaatgctcaggttctggcttgctcaggttcctggctgctcaggtctgggttctgagacaggtctcccttctcagagtcacattctagtgactccagattttaagaatagcacatagggccaggcgtggcggctcacgcctgtaattccagcactttgggaggccaaggcaggcggatcacctgaggtcgagagttcgagaccagcctgaccaacataaagaaaccccgtctctactaaaaatagaaaaattagccaggtgtggtgacacacacctgtaatcccagctcttcggaaggctgaggcaggagaatcgcttgaacctgggaggcagaggttgcagtgagccaagatcatgccattgcactccagcctgggcgatgaaagtgaaactctgtctcaaaagacgacaacgataaaaaaaacaaagttctgcgggaagaagacaa

SEQ ID NO: 694888 - DNA, 318 bp, Homo sapiens
cattctgcttgggggccatgttaattggcaatgattgtgccttggataaactgcattttggccactgcacaaagcttgagggcctttttaaacagcagaatttctgtagcacgaagtaaacatgtgaacaggatgcttgtttacaggatgaggctgaaatgaaaaggcggggtaagtgtcaccttgttccactgcagctagggatgtgtgtcaggcaacttgagtttgtcatcattctgtgtgtccaaggaccttaaagtggttacaaatgaagtttggcagtgaagccagtttacagatatgtaatctgtgaaaaaa

SEQ ID NO: 694889 - DNA, 559 bp, Homo sapiens
  misc_feature (1)..(1): n is a, c, g, or t
ngggcaaaaatgtggaaaggggaatcgggagaggcgtatgtggaattgaggcagcaaaagtcaaaaagttgtatatcaagggacagtgatgtgcaatggacgtcaatatagggggaattgggtacggggacacccaaagagttgttagagagtaagatacaatataggagtatgaattggaaagccagcaaggaagacaagacacctatgaaagcttacaggaaagcacgcaagaagcatgtttagaaaatgttaattaaggagaccgggtgggatggctaaggagggtaaagaaagcactgtggaaggccaaggtgggcgaaggacaaggtaaagagttcgagaacagcgagagagaaatggtgaaaagacaaaaaataactaaatatacaagaataagataagaaatatgaatatataagaaatactaagatatataaaaaaagagagaggcctctgtctctatctatatctatatatctctctctctctctatatatatatatctactactactactactactactactctccgcgtgcagaattcgtacagcccg

SEQ ID NO: 694890 - DNA, 211 bp, Homo sapiens
gctgggctgcggaggcagcgacccggaaacagcgtatcactgacaccgagtcgccttatcaagagctccagggtcagaggtcggatttctacagcgacctcaacacacagaggccgtattaccaatgagcccgaatcatgacagtcaggaacattataactgtgatccaggcattacccaagccaatttcccaggggggccggggatcctc

SEQ ID NO: 694891 - DNA, 639 bp, Homo sapiens
caaaaggcaaatagctgcttacaccaaaagcagctatacataccacataataggaacaaaaagaggacctataaacaacaatgatggtttattgctacaagtatgcagcaaagcaaaaactaaaatagcagcaaatccacaaggcaatacctccacagaatcatcatcccatggttcatgcaatgcctacaaagtgctcccagtgggatatacaagtctaattcacaattaaaaaaaaaggaattctaagatgaacacacaggtactttgaaggctgattagtatggagccttaaaacatgtccttttccaagggcagggtatgccggtgatacagcccttgagtctttatcacgggtccatacggggaaagaacccttttcttacatggcaccagcaacctataggcggcacaccaccagagtggtttaccctggatgggcggctgtacgttccaccgtgagcccatcttaaaaaagccagctggttagattaattgaacgctgaaatagatcttcacattcgcttcactgtatcccataagtccattcgtaaactgtggccattggaagtattgcacgttcttcgtatcacctagtctcgtccggccggcggggaaggtgccgaaagagtgcacgca

SEQ ID NO: 694892 - DNA, 235 bp, Homo sapiens
taccagatccactcattatcaaaatctgataatttcattagcacacagctactttctaagttaaaagacaaaactattttaacagttactgaaaattattacaggccatgcgtggtgactcatgcctgtaatcccaagcactttgggaggccgaggcaggtggaccatctgaggtcgggagttcaagaccagcctgaccaacatggcgaaaccccatctctattaaaaatgcaaa

SEQ ID NO: 694893 - DNA, 341 bp, Homo sapiens
tgggagacagagtctcactctgatagccaggctggagagcagtggtatgatctcagctcactgcaacctctgcctcccaggttcaagtgattctcctgcctcaatctcctgagtagctaggactacaagtgcctgccaccttgcccagctaatttttgtatttttagtagaaacagggtttcaccatgttgccagggtggtcttgaactcctgacctcaagtgattggcccatcttggcctcccaaactgcttggattacaggcttaagccactgtgcccagcccccacttcttctttatctagaaagagataatggttcctttcccccagaaaactgttg

SEQ ID NO: 694894 - DNA, 800 bp, Homo sapiens
aaggataacactccaaactcacgttataatcgtgctactgtgggtaccgctatgtagaagggctgagaagcgattcagggtactagaagcagggcgagcagctcctgatgctgcgtctagagggcttaggtcctgagcctccgctgctgccctatagcccaagctcagtcgccctccaaggtgcaaaagagctgggttggttagaatcggataggagcccaggctagggagatctatggtgatgtccgttgagtctaggagagtgcagtaaacccttaagcaagggaaatcctactaagatgtcagacctggcagggcattgcaaggcttgggcactgaggccagtcggtattatacaaccattcatgggactggggaaaaaccccttggggagagaaggacgaaaaagaaaaaccaataccacacaaaggaaacgcccaccgaaagcataagaggaagaaaaaaagcagaaagaaaaagaccagaaaaacaataagaccaagagcaaagccaacaaaatgagcagagaaccaagaagcgagtgtgcggcgtcacggaggcgtccgtagagaagggaatgcacaaagaggaaaaacaaaggaagtagaagaggaaaaggaagcgagtccgaaagaggaggtgagaaagagggcagacaccctacccgccacaaccaagagaggagaaagagaacgaggagggaaaaggtaagcaccgcccccagaaagatagcaagtaaagacgacactacgaataggaggagaaaggggtagaaggggacgtaagtcaggaatcgcacg

SEQ ID NO: 694895 - DNA, 578 bp, Homo sapiens
agtgctgattcttgatgtatcctcatgctgcagctatcgcagaactagcgtgctataccgtgcggacgccagtccctgtggagagtggcgatgcggacgcttatgagcctgacaaggcgcagtctcgagtgagacccagatctagagccctatgccttccattcaataggcagctcacacttccaccaccattcctggctgcacactccctccaagctccccagctgtagagcaatctgttttcgagttccagtgtctgtcggaacaggctagggagcccgagttcctccctcttctggttccctttcccttggtgtctcttggaggacacgcatggaaagcactgggcatagatgctgagctaaatcatcacccgccttgccgtcttcacccatgcttcccactccctcccagtctgctcctctgagaaactgaattgcctgtcaggaagagttctccgattctgaagaggagggagactggggcgctagaactcttccaagttcatcaaagccacgagagtccaaacagaggttgaacagagaagacccgaggggagaaagagtcccgagagggga

SEQ ID NO: 694896 - DNA, 368 bp, Homo sapiens
atttttccccttggttttttttacttttgtcacacagtcctccttaccgttcccttacaggcacaccaaccatgattttgcctaagggcctttgcactggccattttttttgtttaaaaagtttcctcaaatggttacaaaggtaactggtcatggacttccacttttttggtcaaccacccaaggagacttaccttgattaacctatttcaaatcataaaactaaatcaactttccttattccctacccgtttttactgttttttttttcctttttttgtagtatgtaaaaccttttaacaaattatggaattatttattaaatttattggggattttcccctaataaaataaatttccataaggga

SEQ ID NO: 694897 - DNA, 418 bp, Homo sapiens
cgatctagaggtccccccctattcaaccagacccttactcattgcaaacaggctaagacatagtaatattcttaagatgccataatttcggttcagctgcttggtcatccaactcacgaagtctagaatgtagataacgctacaaatctaggtatacacagatgtgtcttaggctagggatggtaacaatctagaagcattctgtttacaagagtgccaccaaagcatttaaaagacaccaatgttaatgccaccaaagataagcctgctataacctgggaaacaaaaaatctcacacctaaatcctagcagagtaaacgatcccaactagaatgtactgtctatccatatggcacatttatgacttggtaatatgtaatacataatacaggttaaggtagtctggttgggaaaaggg

SEQ ID NO: 694898 - DNA, 121 bp, Homo sapiens
tacactgatccacctactcggctcccaggcagtgactgggattacaggtgtgagccactgcagctggcttagatttatgggtagttattgtacgggtagccagattaaggccatcatctct

SEQ ID NO: 694899 - DNA, 209 bp, Homo sapiens
catctgagccccttgtatcttcaacacctggagacttaggaagacatggatttgttggaacgacgatagcttagttcgaagaacatatattttcgtggaaacgcgtaggatcttctgtgatagacatgagcttggtttggaacgacgttggactcttcttggacacgacgataccttcttggttgtgaccgacggtacacttttgtttg

SEQ ID NO: 694900 - DNA, 127 bp, Homo sapiens
gtctacacttttttaaaaggacccagtatttcaggtaccaggtgattgactgtcttgtactgtcctggcaatgggactgatggtgccattttcttttagtatatttccacagattggacagatacag

SEQ ID NO: 694901 - DNA, 707 bp, Homo sapiens
tcagtccgtaccggcatgtgattctgttacatgtcaatgatatttttggggtattgagtggccatgtgatgctattaataggaaaaaattcaggaggaaaagcctagtttaaagtaaagacaaaatatcccatcttggttatgatgttttaagatgtctgagagaagccaggcacggtgtggctcacgcctctaatcccagcactttatgaggccgaggtgggtggatcacttgaggtcaggagttcaagacagcctggctaactggtgaaaccccttctctactaaaaatacaaaaattagccaggggccgtggcgcgtgcctgtaattccagctacttgggaggctgacataggagaattgcttgaaccagggagatggaggttgcagtgaccactgtactccagcctgggcaacagagcaatattccatctcaaaaaaaaaaatcttttaatttttataattaacttttatcatgcagcccaacatgtcatcttttcataaaatcttagtagaggtgcactccagggatgattgggccctcagtcaagggctgacttttcctgtagctatgctgaccacagcaggttactaaaagctgatggttaacggaggaaacagtggatgcttgtatcctaggtcttctgatagaagcagaagtccacagtcactacagttttgtccacatgcactcagcacatgggcct

SEQ ID NO: 694902 - DNA, 545 bp, Homo sapiens
aggagttgtctatctcgccaggtcctggcagccaaggagaggcactgtgagagagctcaaggggtaggctgggcctctccaccctaggggatgctgaaacagacgctgtccaggagctggcatgacgtgcaggtctctagcgcctatgtgagaacttctgagaaacttggagagtggaatgagaaagtgacccaggtcatacctctacaagaagactcaggaaactctattcacaggcaggacagaatgacttcggcttgccctgtcacactgtgggctctgccatcagcaggaagcttggagacatgagggctcatccattttcacactccgtttaacagctactccatccgccactcaataagtatgccagccatgaggaactctgctgatacttcaagtcgtttgaggaccgagttgggaccataaagtctaaggttgtgggtgacagagagaacggtagtgatgatctcccttcctcagtggggagtggtgacaagcccctgtcggattgcgggacctactaaggctgtggttgcttcagc

SEQ ID NO: 694903 - DNA, 652 bp, Homo sapiens
ttttcagctgtccgcgctgctatcgcctccgcctggggatgctgcacctgtccgaacgcaacatgaaagtgctcctagccgccgcccttatcttttggtccgacttgttactgatgttgccgggaccttctgcggccgatgagaagaagaaggggcccaaagtcaccgacaaggtgcattttgacctactaattgcagacgaagatctatgccgtgtgatctttggactcttcggaaagactgctccaaaaacagtggataatcttgtggccttagctacaggatagaaaggatttggctacaaaaacagcaaattccatcgagtaatcaacgacttcatgaaccatggcggagacttcaccaggggatacggcacaggaggaaagagcatgtactgtgagtccttccccgatgagaacctcaaactgaaggactacagacctggctgggtgagccaggccaacgcacgcaaagacaccaacggcgtcccagcccttcatcacgacagccaagacagacctgcatagatgccaagcatgtgaggtttggcttcctagaaggtatggcagctcgtgctcaaggtgcatagcaccatgaccgacagccggatcctctgaaggatgagaccattccaactggtgcaagcgtgtgg

SEQ ID NO: 694904 - DNA, 292 bp, Homo sapiens
atgctatgctattaatttggggaaagaaatattgaggttcaaaaggatccagaagcactggctcgattaatgctgtctgtaccactaaccaatgatggaaagtatgtactgtgattagatcaagcagatgacactggcggaagtccaagtgaaaacagaggttgcagaatctgaagcataactcatttgggcatcgggggtcagagcacgtgggaaggagagccactccttaagcagttttcaacttctctgccgtacaggcacagtgacctgaatttataacaccgacaat

SEQ ID NO: 694905 - DNA, 939 bp, Homo sapiens
cgcacgcgtgcggcggcgcattggcaagtgggagaggcccgagattgtctgcaccaaactccagagcgttcacatctggatgctggtggaacaccacgcagccgaaccatcgcagatcagccacctatcaggcatcaccaccactaatcccggaaggagcgctaaagacacacagaaacactcgcacacgggaggtactggaggaaacaggagcggacatgggaatttctgcctgaagaagcagatcagaagaaagcagcaacgatcattatcccatgccgtcctctgggagccttcgcctgggtgagcacgagaacccgagaggagatatactaggagagtccataagttcctgaatgccgagtacgacgatcctcgcctatgacacatagatctctttgtggcaatgctcctcttatcccttattatatcttaggcaagatcctcttgacaggtggcagccgggtgtctgacaatagtcctttctcgatctggctgaactctgggagtgtgtcccagacatgagggaagcacaagtagcaaagctcgattggtctggtctcttgttgccaggctgattgaagcaggccttgatgagggtgcatgagtgtatgtttgcattcacgatgaaggaattgctttcacaccagaaattcagacttagtcaatgtaggctgaacttcctagatccaggaacgaggcctggacgtagggtcatcagctttgggactggacggctacaccgaagcaccctgtctttgaactttgacagcagctcttcctttacctgggactacaggccaagttccgtcttaggccttgggggataaacaacggctgtgaggatccggccattctggattacggatgttaggcacctcatcgtgcctccagtcgacgggatgaccacaagtgggtcggggatgttgactaagtacc

SEQ ID NO: 694906 - DNA, 870 bp, Homo sapiens
  misc_feature (616)..(616): n is a, c, g, or t
tggcgtccttgcctttcttttattataggggtggtggttttaccttttatagggggaagtatgctttatggagtgtcttttgggaacgcttttgtatttttgagcgtggcaaatcttggggggcccttttactcgccgcgcacctgtgtttgtccccctcacccgttttatttggcgtgtcgccccctatcatataccattggctcgggttaatcaggactgcttatttggcggtccacccggccgtttccaaccgtccttttacgtggttcttcctccttttgcccgcgaagtttttttcctccgcggggattgtttcgggcccttgttcacctcggtccttgggctggttccccgcctatttggtggtgcattggtgcccccacatggtgtcctcccttggtattcccctttgggtccctcggcgtaccacatcgctccttttttgtgcccccggggtttctaattcccgctgggtgccccccaatgggtttattgggcccgcccggcgccccattctgttagcccgcgccgtctcacacatcttatgggggctttatttttccctctcctccagcctcctagcggttcgtttgagtgtcccctcccccattcnggagggcattattcagggccaaacaattgttgtaaagccccacgggcttttcccgggagctttcacgcgtccacatttggggtccaagcttcaccacctcaatcggggtttatccccgccgcacctcatatgttctctcctaccacaccccagcacaactacactcgggttgaaaccccccccttacatgctttttttaaaaggcttcataattttcataacttcccttttttacaagggggccccacaaaaaa

SEQ ID NO: 694907 - DNA, 138 bp, Homo sapiens
ctattacatctatggtccaggtgtccactcccttaaagatgattagagacttcaggcagaaatccaaggaggtaacaaagtgttcatgcgcattgagggtcttcatgcatcgcttgttcttgtaatccccattcatta

SEQ ID NO: 694908 - DNA, 165 bp, Homo sapiens
cggtaattaactagaaataactttgcaaggagagcaaagctaagacccccgaaattcagacgagctagctaagaacagctaaaagagcacacccgtctatgtagcacaatagtgggaagatttataggtagaggcgacaaaactaccgagcccggtacatgcaag

SEQ ID NO: 694909 - DNA, 245 bp, Homo sapiens
gtccatggcggcgcttgacctgcgagcggagtgggattcgctggtcctgcagctgctttgggacctggaggagctggaggggaaacgaacggttttgaacgcccgggtggaggagggctggcttttggtcggcaaggctcgcatacgcgaatgggcgccaagtcggtagggcccttcagtattcttccacatagagccccaggtcttctctcacgccacacagggccccgagggactccacaagt

SEQ ID NO: 694910 - DNA, 717 bp, Homo sapiens
  misc_feature (2)..(2): n is a, c, g, or t
  misc_feature (13)..(13): n is a, c, g, or t
  misc_feature (33)..(33): n is a, c, g, or t
  misc_feature (162)..(162): n is a, c, g, or t
  misc_feature (186)..(186): n is a, c, g, or t
  misc_feature (202)..(202): n is a, c, g, or t
  misc_feature (210)..(210): n is a, c, g, or t
  misc_feature (215)..(215): n is a, c, g, or t
  misc_feature (221)..(221): n is a, c, g, or t
  misc_feature (228)..(228): n is a, c, g, or t
  misc_feature (234)..(234): n is a, c, g, or t
  misc_feature (254)..(254): n is a, c, g, or t
  misc_feature (314)..(314): n is a, c, g, or t
  misc_feature (326)..(326): n is a, c, g, or t
  misc_feature (345)..(345): n is a, c, g, or t
  misc_feature (378)..(378): n is a, c, g, or t
  misc_feature (393)..(393): n is a, c, g, or t
  misc_feature (404)..(404): n is a, c, g, or t
  misc_feature (483)..(483): n is a, c, g, or t
  misc_feature (501)..(501): n is a, c, g, or t
  misc_feature (531)..(531): n is a, c, g, or t
  misc_feature (544)..(544): n is a, c, g, or t
  misc_feature (548)..(551): n is a, c, g, or t
  misc_feature (565)..(565): n is a, c, g, or t
  misc_feature (586)..(588): n is a, c, g, or t
  misc_feature (601)..(601): n is a, c, g, or t
  misc_feature (614)..(614): n is a, c, g, or t
  misc_feature (617)..(617): n is a, c, g, or t
  misc_feature (634)..(634): n is a, c, g, or t
  misc_feature (651)..(651): n is a, c, g, or t
  misc_feature (702)..(702): n is a, c, g, or t
anattactgcctnaaaaaacaacactttcagcnatttatattcaaacaaaaccacacggcattgactggttgtgttttcagtgtttccttggggctggcttcctcgccatcgtgccacggcacagctgcggtcggccacagtttgtcatgctggatggcggnggctcactcagcttcacattatcngggggccctggatggnagactcgngggtnttgaantcccaanttgtcntggctccatcgttgccagtngtgcaaaatttgcgacaatcttgcttgtccacctcataaatagagacttgagtgttgctnttctggtgcggngtctccaaggccgtgttgnggtcctcagttgtggctctcttgtccatgttgnggaaggttccttggnttttttgttgngttggttgttctgttttggattatctaacttggggacgaggtcaggcagccgcggtcatcgtagttaaagagcattggncagcagtcatggccagcngccacgacgctgttctctgagacaaatganacacttaggagcngtannnnctctgtcttcagantcgagacctgcacactttttnnngcatcagcaacanacacggtgctgtngtngctgacccaggccaggnggctcccactggcaganaagcttaccccgtggacccagccaccagtgccactgccaccaaactctganatcagcagcccaaaa

SEQ ID NO: 694911 - DNA, 886 bp, Homo sapiens
aattctaccgtgatttatttatatcttaagagaagagcttatctgtagagactctcttaattttccaacgctacacaactgcttcttgctgccgccatatgaagaaggacttgttcgcttccccttcctccatgattgtaagtttcctgagacctcgccagccatgctgaactagtgaacaggaaacctacagaataggagaaaatttttgcaatctactcatctgacataaggctaatatccagaatctacaaagaactcaaacaaatttactttcacataacgaacaaccccatcaacaaggtgggctgaaggacatgaacagacacttctcaatataatacaattttgcagctcacagacacatgataaaatgctcatgatttactgcccaagctaaatctttgacctttatagaagaagtgaatgatggatctctgttgccaatccatcagtaaatggagactcaacaggagctttttgggaattttataggtatgaatacactcgtgcttcaaaaaccctgtataatatgatattcgattacaaaatgaaatccagcttttcatatggtcatattattccaatataccttctcagcttacagtatacctagtgtaacgcatccatataaatggacacatgtcctatggcagaacttgttttcatttaataactcccaaccaccttcgtcgcccaccttcataattcaaaacacgcctcttcctattccttatcctaattggatagaataatttgctatcttgctttgtcgattaggatatctcacctattttacatattttattgttcttagccattgtctttcctcatctagtatgtaacctttgatcaggcgatctttaccgtttctcaataactatca

SEQ ID NO: 694912 - DNA, 108 bp, Homo sapiens
cgagcgggttgggccaggggattaatccttctaatagctatcctcttcaacaatatactctccggacaatgaaccataaccaataccaccagatcgcccaccagatcg

SEQ ID NO: 694913 - DNA, 274 bp, Homo sapiens
tttaaggttatagtaagctatggtcatgccactgcacttcagcatggatgacagagcgagaccggtctctaaaaaaaaataagtagatcaaaataaaaattacatggtagttgtaaatttattcagattacaaaagcatatgtactggctataaagaagaccagaaaatggaaatatataaagttaataaatttctcctatctcccttaaataataacccttggaagtaatcaatattatcaattcctgaactttctccttgcttgttccggtg

SEQ ID NO: 694914 - DNA, 485 bp, Homo sapiens
ctgtcgggcggcacgctcggcggcctgctcgcgttccgcagccagacgctcgatccggccgaagcgcagctcggcgcgatcgcgaccagcttcgccgcgcaggtcaacgcgcagaacgcgctcggcgtcgacctgtcgggcaagcccggcggcaacctgttcacgaccggctcgccgattacctacgcgaaccagggcaataccggcaacgcggcgctgtccgtgtcgttcacgaacgcatcgcagccgaccacgggcgactacacgctcgcgtacgacggcgcgaaatacacgctgaccgaccgcgcgagcggcacggtggtcggcacgtcgacgtcgatgccgggatcgatcggcgggctgaacttctcgttctcgtccggcgcgatgaacgccggcgacaagttcaccgtgcagccgacccgcggcgcgctgaacggcttcggcctcacgacgtcgagcggctccgcgatcgcggcggccgc

SEQ ID NO: 694915 - DNA, 197 bp, Homo sapiens
ctaagtctctgggaagaaacacagccctgcaggaacctgattacaatcccgtgagacccacgtcagacttctgatggacagactcaaaaggacacatttgtgtggttcaaggttctaaatttatggcaatttgttattggcggcattcaaagtttgccggggcctgaattgaggttggttgaggaaaaccagggtgg

SEQ ID NO: 694916 - DNA, 548 bp, Homo sapiens
  misc_feature (1)..(1): n is a, c, g, or t
  misc_feature (177)..(177): n is a, c, g, or t
  misc_feature (245)..(245): n is a, c, g, or t
  misc_feature (249)..(249): n is a, c, g, or t
  misc_feature (301)..(301): n is a, c, g, or t
  misc_feature (307)..(307): n is a, c, g, or t
  misc_feature (339)..(339): n is a, c, g, or t
  misc_feature (354)..(354): n is a, c, g, or t
  misc_feature (378)..(378): n is a, c, g, or t
  misc_feature (384)..(385): n is a, c, g, or t
  misc_feature (421)..(421): n is a, c, g, or t
  misc_feature (435)..(435): n is a, c, g, or t
  misc_feature (439)..(440): n is a, c, g, or t
  misc_feature (442)..(442): n is a, c, g, or t
  misc_feature (502)..(502): n is a, c, g, or t
naacagtatcaaatgaagtgatcattttcagtgaaagggaaggtagaacacaatacaaagaaaacccagagatatcatttagtttacaattacacaatataagatgaagaaactttttccaaaatactatgttttattaacccctcagtggtaaacaataacatcattatgattaantttttaggccactatatgtcacatacccaaggtctcagttgaatcacatgtggtcttttcccattagntgtntgctaatctttttcaagcggtcaaacttcaaaataccctgttttatttcctntcagtnctgggtttctatggcggactgatgggggcgcngctggtgcgggcggntttgggcccttggtcttttgggcngggggnnggacaaccctcccccccttgccttggtccttcctgncctttttttttcangccnntntttgtttcggttagcagttctggcggtttcacggctaccgtctgcccgggccctgccccngggccctcccccccctccaccctgtgtggcacccgcctgccctgct

SEQ ID NO: 694917 - DNA, 519 bp, Homo sapiens
  misc_feature (487)..(487): n is a, c, g, or t
tgttgagatcttcaggctagggtttaagccatacctcttcggtctacatgctcatctatggcaggggctttaaataccattaattggctgactctccaaggggtatatctccaacactgagctcttctgagttctagacaccgtaccctcctccctccttgacagcactccgggagggatgtctcatgttcagggaggaactctggattggcttccaggtcccatctaccccatccggcctcggcgctcggtgtcttcaccatctcagtaaagggtaccaccatccttccaatttacaaagtcagaaaccggtatatcatcctgggtttctcttctatggtccttcctctccccccagtacttctaccttcaaaaggatttggagtatcttctcggtctccactactatcatcttaggccagcttcgtcaccgggacttcaacattagtctaaggactgggtctgtcgtttccactcctggcacagnctcccaagtagctgggattacagatgcacgcc

SEQ ID NO: 694918 - DNA, 903 bp, Homo sapiens
gcgtggacctgtgtacactgcggatcacagtggaccgtgcgcttgagatactgatcctcaaatctctgccgacgcgtagcgtatgggttctactggaaagatcacaagaggatatgtctcaggatctcaagatataaacggactcctataaaccgagaagtcagtctgagcaggccgtcctgaacttccctggcgacagactgcacggggaatgggcactctatctgtgtgtcacttgccagaaggcgagaacgtaagactccaggggcagtacagagacatcgatgatgtctcggtcattggtgtcgtaacgacgcctctcattgtagaaatttccgagcctatagaagtcatgagtcagcagtactgcgcctggtaggtgacgttatcatcgcgccgagtgaaggtggtgccctgaagtcgtccgtcaacgaagcgttgtaagtcgaaaccttttacggagcgtatagttcgaatgcactcgagacgagaatccgaagaggtggcgcgatacagacgtcctacttaactggtactgtagctggtggggccaacgcgacatgtctgctccatcaaacctcgagaccattagatattgctcgatcgagatggatggtcccctgaccttgtgggtgaaacagagccctctcttggaatctggtacccatgaggatgcgatgggggaaaacatcgcttatctaatgttttagtttcgcatcgaaagtcctctttattcgtcgcaatccgggaagtgtatccccatgagagtggggtgaggcctacgcttgtaaattctgatcaggtgttgtgcacatgggcactggagtccggaggactgtcctctcaggcatgtaatccaagacgatcctttcttggggtgtacagaatctgttgctcaggaac

SEQ ID NO: 694919 - DNA, 265 bp, Homo sapiens
tatagagatccagccactgacgtagccacctagtctcccgtacgaggacaaactgtcatgctcatggaggaatcaggggccattccagaggtcataagaaggcaccgatggtaggcatctggagctctggggtacgaagtggttggcccctttccacggtcatcttgatggtagctgggtacataacccctgtcatcaaggtgccgtcctatccccacctactcctgggtcaggaggaaaagactaacaggcaggtgcgtacagt

SEQ ID NO: 694920 - DNA, 166 bp, Homo sapiens
acgtgcactccagcatcctcagaaactaagaggatactagagtacacagaatggcaaagaattatgcagattgtagaggacaccgtacattcctaggaggtcaagtccctgtgggtgatgttttcggtatggttggtctaaatggagcggctagaagtgtcttgtc

SEQ ID NO: 694921 - DNA, 935 bp, Homo sapiens
gagttgcttggcggaatcaccatggcggtctggagaccctgtagccaacgtatcctgaaaactggatgggccttcaaggtctcatcgctgctcagtacaggggcctcagcgtccggtgctctccgaaccaccccattccatttggccaaaccaaaccgcaccccatgagattgtctccgcaaaatatcctgccgggtacggatcccagcatgtttgagggtgatgatggatcctgtggtgtgatgagagcaacgccaatgtgcatactatgtgagcacatgaggagctgcgggccaaagttcatccagaggcagcagcccagggtggtgcatcgtggagtgacagcttctgcaggagtgaccgatatagtgcccccagcccagtacactggggtgtaccccacacctgggccagtcaatggcggccaacaaacaaaaaaagggccaacttgacgacatgcacatcggcaggcaagtcaaggcgactacagggggcctgcgggaatgctcacctcgcaagacagccaggactcacgggagggccgaacgagctgacctggggtgacactcaccagggaggcaccgcaccacgtcagagggcttctaataagcaggagacaagacgccctcttaccgcacaggccttaccagtaccaacggggtctcactgataaacagccagtacggcgtgctagggcagaagaacggtgcgagagacgggcagtgcgacaaacgtgacggaccactaaaggacccggaagaaagtccgagaaaaaccagccaggtcacgagagggaacagacggccgaccagaaaagggaggacaacgagggaacggcaagacagaagagcaacacgaggaagaaagcaacagatcgagcgagaaagaagcggcagaacacaaaagcaggaacagacccgactgcggacacgtgc

SEQ ID NO: 694922 - DNA, 1675 bp, Homo sapiens
  misc_feature (137)..(137): n is a, c, g, or t
  misc_feature (192)..(192): n is a, c, g, or t
aaagactgcggatgccacgtgggtggtcctgggtgcactcagacgagaaggcatgtctattgaggtgacgtcagatgcagctgattagtggcagaatatgttggcgccatgactctaggcaagtaggtgacttcgcnacgttaatcgcctagcaataaggtggcagaaagctagatgcacaagggacagctnggtgtctactgagaaggttagtattgctgagcaggaaccaatcggtccatacgtcgaggactaaactgtggaacggaccttgtgatgcaaatggattcgcttctcattgggcgcttagtagagtccttggtgtaggagaccattggggggtacttgggcaaggagctgcaaagcaaacccacaaacagggcccgcatggtgagatgtacagccgattgaaaacgcatcgcgagacgcgaattgcggcttgataagttcgaaatcgggtcctccttgaatagccaggtggaggcctcaagaagggcagccccgaggtaattcataattgatatggtgaccgtgggatcctcgttatgaacggttgggagcgctaaaaaccctatcggctaaaagcgggaagctttaagcgtccgaacgccaaatcgtctcgatggatatcgattcggggcctttgaggttttcacctttgatgttatgcgccgttgggtggtggcttttcgcccatctaagagcggcctcggagaaatctttccgcgtcgggatcggttttcgaactccacacatttgggccccataaaaaccaaaactttggaagacacacaccgccaaagtttcaactaatttccgtatatcacgtctgtgagccaacggcattatatcaccgtaggttcccaacaagggcacctaatggggggcaaccgtaaaaggacctaaaggctccaccaaggtaagagggctccgggaaggttaataacctatggccgcctcctttatttacccgccgtggtgccaaatttaatatgccgatttcccgttcggaattggcggtgtggtacaaaatccttatggagttccgccattcttcccccgtgggatggaaggacccatatcaaattacccaaaagagactgttatacctcgtgtctataaacgctggctgtgtgcaaatacattccatttatccaaccgcccgctgattaaacttgcggatatgggggggaaccgcaatgggggcccaaaaattcgcccgatttagttcccagacgttttgtaacagtatattcacactgtgggatatggggaaaacacttatacaaagacgggtacaccccaaaagagtagggagcatcataggccatccccgttatgtggggtttgaaggcagcacattgagcgaaatgggccggtttggttgaggagcacacatatgggcatcccagtgggggagtttcaccccgttaagtgaccgcattaaatgtaagggctcgtcagatgaagaagaagcagatgacgatgtttcgccctctttttatacccagcgggagagggcaaaagaataatcccatcttagaagagggctagcaaaatagttgtgccctcatcccctgttgtgtaccaggacaccctctattgtatggtgctgttgttgtacagccgccgctttgtatgtggcatcacactgcgtcgcgtcactacataccaa

SEQ ID NO: 694923 - DNA, 916 bp, Homo sapiens
acgtccttgacctcacacgggttattatatcttctgaaaaagcttaatttcagacgccctgtcccccgtgatttctaccggcctctcttacggataatgtttttaacccctaccttgtctacacaaattctctgggacccaaatatttaaccaaggcccattctggtagtaaattctctctgcttaccaaccgcaatagtgtttctccctctactttgtaaggccgcaacgttcttcattaacaagcccccaggtaatgttctaacagcaccagtcccaccaaacagaggctattgagaaattttattccaaaagcgctcacgacggaacattttaaacaagaaccccttcttatccgccagtgtttggcaccgcatgtcaccctgcccaaaattataagttgtataaaaaccccatgcctgcaaaacatgtgtcacacccacataggccaacggggaacaattattctcgtaggtatttaattgcattatggaaaactttccccttccgcgcgtccctctctcccctctccaagagggacccagcgccccttctccttctccattccggtggaagccactcagagatatatttaccaccaaaagcgggaaccttcaaatattttttggcgtaattttccccgaggattaaattttcctggcaattcacccccgcactaatctttcttaacgaggacacaccacagcccacaatggattaaccaacactccccaaccctttctgtcctggtgaaaaacaactgttcagccaccctctaatactaccgacgtcactaccccccacgttcttgtctccacacaccggtcattatatgcccccgctcatgccgatgatacaaatgtccgggaaacccccgcattttctcgggtagcaaaaattaggtgaaataatcaca

SEQ ID NO: 694924 - DNA, 340 bp, Homo sapiens
  misc_feature (12)..(12): n is a, c, g, or t
gggcttttttantaattaaattgtgtacttttaaaaaaaccttttaattcatgataaagtaaatccagtctactgagtggctgtgctatatctttaacagctattttatctttatttccttcagtgttacagcttccctacatagtacagattatgttacctaattaaatagttgagctatgtcccattctagttaagaaaactgtcctgttgcctattttcatctgattaaaattttctgactttctttcaatatctgtttttttgtaaaccagcctattcagttttatgtcccaacgtcctgttctcttgcttgcccactgatttttttctccatcat

SEQ ID NO: 694925 - DNA, 207 bp, Homo sapiens
tgtagattattcagctagagaataatccagagtaatccagagctgcgcagttcatacacgaagctagacgtagctagagaataatccagagtattccagagctgcgcgttcatacacgaggctagacgtagctagagaataatccaggttaatccagagctgcgcgtgcatacacgacgcttgacgtagctagctgaataatctcaa

SEQ ID NO: 694926 - DNA, 121 bp, Homo sapiens
caggcataacaccttcacctgcgcagatagacaaaattaaaagcaagcaggatagcctgaaccacaacagctaggcattctagtaggctctgcggctagtaggatgagccaaaacctaaag

SEQ ID NO: 694927 - DNA, 176 bp, Homo sapiens
gaataatttattgtgaaaaaattccttttataaagggaaaattatttttataaattttattgttggaaatcaaaaattagtagattttttcccctgttaaattaaagggagattaaaggattactaaactgggatgcaatgtttgtttccctaaactttttaaataaaaactgaga

SEQ ID NO: 694928 - DNA, 106 bp, Homo sapiens
gagctcggtacctttcaaagcggagatctgccaacgtcttgatgtttgtcaccagatcccctattgttaagttttgtaagtggacccagcatttccggtttggaaa

SEQ ID NO: 694929 - DNA, 938 bp, Homo sapiens
taagaaccctcatcaatagatggagacatacagaaatagtcaaaccacttctacaaaaggccagtatcaggccgggggcttcgaacccaaagggatgttgggatgtaaagtgaaatattagtggggggatgaagcagataggtgaggaaaggttgacccaattaatgtgacgttgaagctccgtgggaaacccgtggtggctacaaaaaatgtggttgacccgataaagtgccgctcgggaactgtgggttgagagggagcacctcgaagttacctcgtgaggctggataggagggtaaaaatagagcacccagttaaacatgggtaataagcaaggtgctgtggacattatagtgtggggttcacgggtgggtttctcttattataaaaccatatgtgggtgacgcctcgaggtgtgaattggaatcactctcctgtgaatttgcggagtataacatacggggaagtggtgatacacaaggaagtgggggacctctctataggggggaaattaaagcggggggtgaagtgcccgtgttgtggggcgcccaagtggcccctccacatatggggggggggaaaggggcgcagagtgccgggagcacgtggtggtaaacaggggcctcagaaaaaacctcctgcgccgaaagaaaaaaaactctctcctggaggtgtaactaaacactaggggagttaactccccggaaactcagacaaggcccttgtctggggaccactgttgggcgtgctcgtctgggggggcctgtgggaatatgtagcttcccctccgttgttaacaatcgcggggccaacccattgggtaatatctgggtcagctgttggaggggacaagcacgggccaaaatatgaaggagccgcatagaggaaggtggaagtagacaacccaatgagcaaggccggaaggacaaaagaagggg

SEQ ID NO: 694930 - DNA, 155 bp, Homo sapiens
gcccaaattacagcaactctattctatcagcagcaatgatgtcatcggctgtcatgaaatacttgctgtgccttccatcttctatctcctgtgcccagactccctgcatcccataggaaggggcctctcatacctccatgatgctgaagtgggag

SEQ ID NO: 694931 - DNA, 365 bp, Homo sapiens
catgagtacaacttgctggcggcacctcatcagtctctttacaactgtgacattccggcatcgctggcgggcaagggaatgcaggcagccagagacggtagtcattctgtcacggcttccgcgctctgatgggaaatgccgtctccagcagcttcacccgggtctccctgtctcagcacctcctcccccaattcccaggtctcacatcccacccctgctgccctccaacccttctgccttgaaagctggctgtacggactcacatcctttatgctaatgacacttacatatttctcgccataacttttctcttgcagaaaaactgacatgactttaggatttaaaaacaagagcaacacgccctt

SEQ ID NO: 694932 - DNA, 437 bp, Homo sapiens
ctactttcctttgaaagctgttcttcttgtgtactcaacccagaaaattccaggcctattgtcctcagccctcactagagtcctagatacgcaccgttttattttctttgggtggtgtaaagattcagttaaggaatatcttccttcagacatctgctgactacaggaaatgattgtcatagcccatgtgaaggtcatagtgagactaagatgacgttttggaactcctgaacgctgtagggaggagcaagtagaagcgagtatgggtactcgctggtaagagactggggatagctccaggagtgagagcggcgaggcccggaggagagactgggtgttctccctgtggcgcaggcgtacaggccaccagagtgagggacaactgtccgaggaggtcgggtacacatactgccgcgaaagggtcagcataatgtaga

SEQ ID NO: 694933 - DNA, 154 bp, Homo sapiens
  misc_feature (19)..(19): n is a, c, g, or t
acccactaagcagctatcnagatatagcgatgtacagactgaatcgatggggatgcagaagtggacttctattactgcagaccaattgggttgctccaatagagttcatgggtgagcaaggtcgaaggtgtgcggttcttcggcttcggccaat

SEQ ID NO: 694934 - DNA, 119 bp, Homo sapiens
gcgaaccagactcccatgctaaggtattacactttgatatagacaatgggatgaccccaatattaaccctttatcttccccctcaaaaatgccaggagtctcccaaactgccccaacaa

SEQ ID NO: 694935 - DNA, 136 bp, Homo sapiens
caacacatcatatgttgttgtttacattgaaattatatgagaatacagagaatgctctgaggatcctgttctaaatacatatgggcttctattctataggtctgaaaaaagcaatgtcagttaatgtcaccaaaga

SEQ ID NO: 694936 - DNA, 615 bp, Homo sapiens
actaatgaagcaatagttggatttccatcaacaaagcacagatgcttgcccacttttgggcaatgacttacattaatttctgaaggcgtctgaaaaggattcacatttctctgttcaggagacatacaaaatcttatgctgctgggtactgtccacgacatcaatccgtgtagtgtataggtagaagctaactgagaagggcatagttattgtgacagcagagttcctcactttctctctggcatcattaaaactatcatgtcacgtaatgcactggctggaactccgtgacagcgtaatttcgaacggctgtcttctcaagctccatcgggagaagctatggcttctctgataagcagaggtgtagcacaccatagcatgacataagcccagctccataggccttaatggagactcagtgtctgcagagagttcactccacagtgaatcagtacagtgtgtcgagcttttcaatgtattcacaaggtgaatccacaaaggcaagtgcaatttcctggcagaaatgggcaaaactgagatctgaaagcaagggtagatgagccaagtgctcatggcagctctcaggtcaggggtatacgtggacctgtatccagg

SEQ ID NO: 694937 - DNA, 590 bp, Homo sapiens
tggagatcgcagtgtgccccatcggggtgtgaaaacaaactttcgcttggagaacaaaggcaaaccaggagaggcccaaaagcctaaaggttcctccccccccccctttcccgcccccgggtgggattgtgggcaaagggggccctggtggcaaccggggaaaaaaaaggggccccatggattgtggtggtcccggtggaaatttcaaaggtggccctggtggaaacaaaagtggcttccctggtggccggggcaaggaccaagggggctttggggaagaaaaaaaagggggccctggggggccccccggcccttttatggaacaaatgggaggaaaaaaaggggggcgtggggggcctggaaaaatggaaaaaggggggccccctcaggagggcaaagatgggcccctttaaaatcaagaacccccccaaaagggctttggccccccaattttttttttaaacccaaaaaagtttttaatttaaaatcccaaatttaaaaagggggccccaccaatataattattcccggggggggcctaaggatttttccccctttgggaaaaaaccttaaaacaagttaaaggggga

SEQ ID NO: 694938 - DNA, 454 bp, Homo sapiens
ttgaagatactcatgtcctaattcccagaacatgtgaatatgctacttcaacagcaaaagggacgttgcagatgtaaattatggacctcgagaccgggagattattctggattgtctggtggacccattgtaatcacaaggttcatataagggaaatagggaagcaggagagtcggagaaggagatgggatgatggaggcagaggttggagtgatgcaattgctagctttgaaggtagaggaagagaccttaagccaaggaatgtgggtggcttctagaagctaaaaaaaggcaaacaaacaaacaaacaacaaccctgcaacagattcttccctagaccctccagaaggaacactgccttgctaacaccttgattttagcccagtaaaattcattttgaacttctaacctgcagaaccataagataataaatgtttgtcattataaactaaaa

SEQ ID NO: 694939 - DNA, 797 bp, Homo sapiens
  misc_feature (29)..(29): n is a, c, g, or t
  misc_feature (143)..(143): n is a, c, g, or t
  misc_feature (145)..(147): n is a, c, g, or t
  misc_feature (227)..(227): n is a, c, g, or t
  misc_feature (237)..(238): n is a, c, g, or t
  misc_feature (274)..(274): n is a, c, g, or t
  misc_feature (280)..(281): n is a, c, g, or t
  misc_feature (283)..(283): n is a, c, g, or t
  misc_feature (291)..(291): n is a, c, g, or t
  misc_feature (294)..(295): n is a, c, g, or t
  misc_feature (300)..(300): n is a, c, g, or t
  misc_feature (312)..(313): n is a, c, g, or t
  misc_feature (317)..(317): n is a, c, g, or t
  misc_feature (326)..(327): n is a, c, g, or t
  misc_feature (335)..(335): n is a, c, g, or t
  misc_feature (337)..(337): n is a, c, g, or t
  misc_feature (342)..(342): n is a, c, g, or t
  misc_feature (350)..(350): n is a, c, g, or t
  misc_feature (384)..(384): n is a, c, g, or t
  misc_feature (412)..(413): n is a, c, g, or t
  misc_feature (419)..(419): n is a, c, g, or t
  misc_feature (478)..(478): n is a, c, g, or t
  misc_feature (481)..(481): n is a, c, g, or t
  misc_feature (500)..(500): n is a, c, g, or t
  misc_feature (535)..(535): n is a, c, g, or t
  misc_feature (539)..(539): n is a, c, g, or t
  misc_feature (560)..(560): n is a, c, g, or t
  misc_feature (563)..(563): n is a, c, g, or t
  misc_feature (565)..(565): n is a, c, g, or t
  misc_feature (567)..(567): n is a, c, g, or t
  misc_feature (571)..(571): n is a, c, g, or t
  misc_feature (575)..(575): n is a, c, g, or t
  misc_feature (577)..(578): n is a, c, g, or t
  misc_feature (586)..(586): n is a, c, g, or t
  misc_feature (589)..(590): n is a, c, g, or t
  misc_feature (592)..(592): n is a, c, g, or t
  misc_feature (597)..(598): n is a, c, g, or t
  misc_feature (604)..(605): n is a, c, g, or t
  misc_feature (607)..(607): n is a, c, g, or t
  misc_feature (613)..(613): n is a, c, g, or t
  misc_feature (615)..(616): n is a, c, g, or t
  misc_feature (626)..(626): n is a, c, g, or t
  misc_feature (637)..(638): n is a, c, g, or t
  misc_feature (678)..(678): n is a, c, g, or t
  misc_feature (684)..(684): n is a, c, g, or t
  misc_feature (705)..(705): n is a, c, g, or t
  misc_feature (717)..(717): n is a, c, g, or t
  misc_feature (735)..(736): n is a, c, g, or t
  misc_feature (748)..(748): n is a, c, g, or t
  misc_feature (751)..(751): n is a, c, g, or t
  misc_feature (786)..(787): n is a, c, g, or t
  misc_feature (791)..(791): n is a, c, g, or t
tttttttttctcagtatgtgcccttgtangattccaaaatgttggagtttctgattctcctgggatcaaaggtaaaagcattgtatggaaacactcaaccttggctcattaccctcctgaggagctaagtctggaggcctcanannnagggagctgacattcacaacttattccaagatgggtaacacagtgaacaaagaattagtaaaacatagactcagtctgtngagggcttcnnatatacatattctatatatttaaacctgttatatangatttnnanttattggnttnnttgtnttttgtattttnngtanaattttttnngttgttgnanactgntgttttcnccttctcagcccccctccctccccaacataaatnactttacataggtcaggtgatcctaagnntttttnttgttgttttttttttgtttttttattcatattccccttcctcccctgcaaactacctntgngagtttgtaacacagcagnatggaatggacaagactggggacagcatgggggtntaanggagggagcgcagaacgttgnttntnantgangggnannagatgggnttnngnatttnnattgannanagaggntnngacagggggnagagaatgtgnnatgcggcttaataataataaaaagagaaggatagatgggnaaatgngaaaagaaataaaggaattgnggtttttggggnaggagaaaagataaaggnntgtattggatangtnttttaaaaatatattggggatgaaatttaattttnnggantgtgtg

SEQ ID NO: 694940 - DNA, 182 bp, Homo sapiens
aaaatagttagccaggcgtgtgtggtgcacacctgggactacagtgtgcctgccaccatgcccggctaattgtgactacactatttttaaggaaaattagttaaacagtaatatgtaaaggtgaattgtaatgtcgaaagatggaaagtaaggaaaccaatcaggcctttaaactggggtac

SEQ ID NO: 694941 - DNA, 166 bp, Homo sapiens
ggggttcagttatgggttgcttgtcttgtttccgcggttgagggggaaacgttggttgggtagggagggagccaggttggagatggcaaggagtttacagagaagcagacagagccaacgtcgaagccgaatacctggtctggggcaccaaccaagttaccgatca

SEQ ID NO: 694942 - DNA, 106 bp, Homo sapiens
gttgtcttagaggatcttcggaggtaatggtgatgaacctgaagaattatgtgggtgaggaggaggagaggaatggtgaagttaaggaggaagggtaccagatgct

SEQ ID NO: 694943 - DNA, 569 bp, Homo sapiens
gcgtcgacagggcttccagggctggctggagaccagtgtgagttcggagagaatggagacccggggattcctgggaatccaggaaaagtcggccccaagggcccatggctagagacggtggcgcaggggccgctggagccccaggccccaaaggtgaatcgggagactacgaggccacccagaaaatcgccttctctgccacaagaaccatcagtggccccctgcgccgggacgcagacaatccgcttcgaccacgtgatcaccaacatgaacaacaattatgagccccgcagtggagagttcacctgcaagtgcccggtctctactacttcaggtaccacgccagctctcgagggaacctgtgcgtgaacctcatgggtggccgggagcgtgacacaggaggtggtcaccttctgtgattatgccgagaacactgtcggggtcagcagcggtggcatgggtctacagcttgagcagggggagaacgtgctcctacagtccacgacaagaactcctatctggcaggagggtgcgacagagtttttaccggttccgggctttcagattgg

SEQ ID NO: 694944 - DNA, 182 bp, Homo sapiens
tgcgatgcttctcacgtagatgctctttcctcctgtgccatctcccctggtgaagtctccgccctggatcatgaagtcctaccaacactgaccaataaaaaaaaatgtgggttttttttttttttttttttttttttttttttttttttttttttttttgttttttttaaaaaatttttaaa

SEQ ID NO: 694945 - DNA, 288 bp, Homo sapiens
  misc_feature (84)..(84): n is a, c, g, or t
atcgccctcatccatgtcacattctccccagagacaaccatctttgcagtttattgtgtttaaatctagcgacattttgtacantaacaagcacaccctcttccaacattttttttttttttggaaatggagtctcgctctgttgcccaggctggaaagcagcggcacaatctcggctcggcgtgatcttggctcaccattacctccgcctccggggtttcaagttgattctccgtgcctcagcctcccaagttagctgggatttacagggcaccttgccaccaaggt

SEQ ID NO: 694946 - DNA, 360 bp, Homo sapiens
atcacagcggacataaggtcaatatcgatctccaggcaccacctgcggctaacgttacgcaacagaggcgatatcattcttatccatgtcgtcctccacaatcgggtttgggttggggaagtcgtatctgtccttccccatgctcaagcactgctgggagacattgtggttgaggtaggtcgcctccatggccaggtagcggggtgaacttgatggaactgaccttcatcttgagggggctcatgggcagactcactcacagtcaggaggtcaaagtctaaagttgtttctgtggtcaaagaagagttaggacccaactctctggacgacaatatcccaggaatacactaagcgggtaca

SEQ ID NO: 694947 - DNA, 194 bp, Homo sapiens
gggcacaagggtgatttttttttgttgaactaaagtttgtgagagtagttttcctttgttacttgaaaaccaataaaagggtgttaactttttgattgatgaaaaaagtccaaaaagcctttacccttggggggccttttgaaattaaccaaatttcatccatatatccttttttataaacttatagaaggtca

SEQ ID NO: 694948 - DNA, 167 bp, Homo sapiens
agaaggtgaatataaggcatatatgcatatcttatatgcggactgtaccctacctctcccccctagacctagcctctagggtagttgtgctgctttccccctacacctgcctccttcaagataaaaccaacttaactatagaaatgtagcatagtaaggggaaagca

SEQ ID NO: 694949 - DNA, 169 bp, Homo sapiens
gctgatcgctagtctaaaatatcatttataaatatactttctaatcagatataattgttctgtctgatttaagccctacactggctcttatttgttctcttcaactaccagcaactcctgtctccctccccaccagtataaaacttcagttaatcctttgcctatcatt

SEQ ID NO: 694950 - DNA, 689 bp, Homo sapiens
atctgttcccttgggtttccgttctttcttaggatggttgccaacccacaatctcattgatcagcagccaatatgggttcgtttgtttcttttaattcttaaaaacatcctctagaggaatagaaacaaactttcttatgagcataaccctatatcaacgacaacaatgaatttctgaccttaccatatataccattaggccttgccatggctttaatgtagactcatagttgcaaattagtgcacgcaaagaactcagatgtactagatttccatcgttcatggcatatgctcagtatgctgccacataacgcatgaatttaattatattcaaccaaagcaatatactcttacactgatttctaggccccatgacccagtgtctagagacattaattctaacgacgtcgtcggcttcttaaatgagtgattccatcctcgggaaacaggtttcaacactgactatatatacatggcgtaaaattactctgtgctacgcgtagtcttactacagacacgtccatggtcccactcgctctctgcccctcgcggcccgccctgccccccgcctcctgtatctatcccgccagctccaccgcatggccaccagcatccctccacacccacactctccacaaccccggtcaaccctcttcccaaaccctctgcaccccaacaaccccccccac

SEQ ID NO: 694951 - DNA, 317 bp, Homo sapiens
tggaaaaaaagtttgcctttgtccccaatggttggggggcggggccacaatttggtttaattgaaccctcaacttccgggtttaagccatttttcttccctaaaaaccgggcaaaaccaaaaaaccaaccccaatttcccccttcccttttgacccttgacccacccccaaccttgatttaaaatccttccacacacccaaacagttttttttcaaacaggcggggccacccaacactttcccgggggtattcccccgccccacggtaccccggcaaaaccccaaaaggggggttcttttagagtgaacctgcggcc

SEQ ID NO: 694952 - DNA, 273 bp, Homo sapiens
gggcaccaaaatacacatcagaggagactggcttccatgagacgcttcgactgtctcatcggggcacttgtaataagcatcttgatgccactgaatgcaatgctgtattcaaataatagctttcatcttcactataaaacaatacaaacgtaaactttgaagccctttgaaggacctaaccaaacaacacaaggatgaaaatagatcagtacaactttgagacacattattaggtcaaatctgcaaagcatattcggattttaccgtaaggaa

SEQ ID NO: 694953 - DNA, 269 bp, Homo sapiens
gcatatttcatagtcccaagtatatcacaggcaaagctgatgttcagagtcagtcgtttgaaagagaccaatactactacatatagatcgcaaagacaattaatccaagaatcggttcagcacctgaaagatgtagaaataattttacacgcaatgagctaacggtatctagtactggactgtgtgccagaggacaggcgtatgctgattgtggcatatgttgattacctggatcgccggggtccacccccaactcctacatgcatcgt

SEQ ID NO: 694954 - DNA, 268 bp, Homo sapiens
  misc_feature (107)..(107): n is a, c, g, or t
  misc_feature (151)..(151): n is a, c, g, or t
ctagcggagcttatgatacaccaacaatagtagaggggtatcattgagaggtgattaggggactctgccctcatgaatgaggtggcaccctgtggaaaaaggctcangggtggccaggcgcggtggctcacgcctgtaatcccagcagttnggggggccaaggcgggaggatcacctgaggtcagcagttttgagaccaacctggctaacatggtgaaatcccttttctactaaaaatacaaaaaattagccagacgtggtggtatag

SEQ ID NO: 694955 - DNA, 101 bp, Homo sapiens
ttcagactgtcacgtaatcatcaaagtattgtacaatatcttttattctgcaatattcgaagtataatttagttttctttttcttttttttctttcgagga

SEQ ID NO: 694956 - DNA, 901 bp, Homo sapiens
aatatgttgtggcttcatggttccgtatcactgatactgctcgcgtgaccccttgtcgcgcctgttatccctatatgggtctctcctccgcacgccactttgcgggcccccgattgctggtccaacctatatgtttcctttccgcccgaaatgccggcttgccttttctccggccaaagggttggggccacatttatgccggtataactggtgggaaaaccacggatcctccttgggggcatcccgcgcttccccggaatccttcaaagcgggggttgcccgcgttgccccctctccccggctccccggttttccctcgctcccccccgtagatgtcgggaacaattaaaacgcccgtgcggctccttgcgaaactcctgtgaggagaaataaaagcgcccccggcgaacacggaactcacatggaaggcgctgggatgtgccccacggaagcaccaagaaccattcttcccaccaagggggaaagagcaccgagcaggtgctcaccaaaagaggaaacagcgtgctagcggacacaggaccacccaaaaaccaacataggggccccccgcctcagttggcgccaaccccccgtggagatgccaccgccacctccggggaacaaggcaagctgggcgagacaccccgaggggtcagatagtcagaaaccccccacggggcaaaacaggggaaaccacccgtccgtctgggtggaagaatacaccaattataaccggcgctctggtgggcaacgcacgaatcgaccccactctcgacaggagcgatgccacacggcaagcaggtttagaaccccgcggaggagggggccatgccctgcggacccagacgcagccgacccgcacccaccccccggggcccaaaacacccccctccaacaaaac

SEQ ID NO: 694957 - DNA, 106 bp, Homo sapiens
gctagagtacacattgcaagcattccctgcttccacgtgagctcgcacctctaagtcaccacgatcacaagggtacaggcatcatgcacgcagcaattcatgcgtc

SEQ ID NO: 694958 - DNA, 268 bp, Homo sapiens
tgccattctccttagagagaattggggtggcttttaggatggcaaggtgactatcctgtaacaactgcatctcatattatggaatgactattagcaaaaacaacaactgtgcaactcaaatgtcctctggacacatttgtgaactattgggtggatgctctgctccaacctgacttgctgtcaccattcacctgttccatgtttttaaactccttgagtcaatgccaaaccaaaataaaaaatacccaaagacaacaacaaataaaaa

SEQ ID NO: 694959 - DNA, 180 bp, Homo sapiens
gggcaggccacgatcagtatacgtgtatcttgtgctctcacaagtatatgatacagtccagtgataaaagatggaggaacaggtgggtcatgccttatattccagcacttagggaggccaagtagggaggactgtttgcggcctggagttcaagaccagtcctgggctacagtggtgaaa

SEQ ID NO: 694960 - DNA, 476 bp, Homo sapiens
agttccttgaaaatacaagtcatgcctgaggaccctccagagccgcctccctccgaagtcattaacggaattacatcaattattcggtaatttttataaatatccattgtctgctaattttttaaattaaaatgtaaacccagctatctacaaattccagaaaaaaacttttctttcttttctttctttcttttttaaatgaacttacttttgagacaaaaactaatgaaaataaccaactcgccatccctggatctttaccattctgggctgcatgctataaatcaatccaaaactaggagcacagatgggggcggacaccttaagataaaaagccaaggtgccccccaaaatgggcagcctgggcagcgaggctcggggtgacaatgctaacccgggcagaggctcgctaggcagccagagagccgcattttccttaccttcgatcgcctgccccccagctgcttctgcggccc

SEQ ID NO: 694961 - DNA, 602 bp, Homo sapiens
tattttccaacatagctagacttgtgaaaatatttttcggaaaattctccaggttactaagaataggatgatgataaaccagtgtgaaaaaatagaaaagggttggataaaggggagtgagagggggagaatgagagagaaggggctctcactaaattcatagaagtgccgcattgattaacattttatgtttatgtttcttttttattttccagctttattgatatatgattgacaagtaactatatatatttaaggtgtacaatgtgatattttgacatacatatacattgtgaagtgattacaacaatcaagccatttaaaataatcttacatggttaccttttttgtgtgtgtagtgagaagagttgagatcctctcagcgagtttcaagtatacaatactgtattattactatttttgagactggtgctctctctctctgtcacccaggctggagtacagtgatgtgatcacagcttgctccaaccttgaactcctgggctcaggagagtcgcttggatctgggtgttagaggttgcagtgaaccaagataatgctacagcattccagcctgggtgacagaacgagactccatctca

SEQ ID NO: 694962 - DNA, 186 bp, Homo sapiens
cctcctgctcttcttctcctcctccccagcatgtgtgtcggggctccccctcctccccggcgcttggagtaagaacccaagaaccccgaagccgggcccgagtgcaagcgtgcgggaggctggcgggcgcggccagctctccagtaactgagcgcggcgcgcagtcccaactaaagtgtgaaagaa

SEQ ID NO: 694963 - DNA, 162 bp, Homo sapiens
caaggagggagctcgtgccgtaaagcttgtggagagctctttcccctaagagcacacgctataacgtctcactgtgcaggtaaggaaactgacacccacaaggcttggggcagcccagaaggcacacatgtggtgtaacgcagcagagtctgagactttcct

SEQ ID NO: 694964 - DNA, 403 bp, Homo sapiens
  misc_feature (164)..(164): n is a, c, g, or t
  misc_feature (187)..(187): n is a, c, g, or t
gaatatattatggatttcttaatgtcggactgtctttgcattcttggaattaactatcttaatcatgatttcttcattaaatttgctactgtatttgatttataaatattttaaattttttcttctttttaaataagtgttattggctctcggctgtattttantgtgctaaaccagggttttgatngttttgtaaaatcaattctgaagtctttcatctttttgtatgctttgaaacagttttgttttgttttttcgtttgttttttgtttggtttggttttttttttttttttcagatggagtctcgctctgtcgcccaggctgggttgcagtgagctgagatcgcccaattacactccagcctgagcaacacagcgagactcttgtctcaaaaaaaaaaa

SEQ ID NO: 694965 - DNA, 106 bp, Homo sapiens
tggccttcaaccaaatcgcggtctgataggtgggtggtgctggaggcaacggttgcgatcagttggtctcaacttttggtggattttaggttcgtgaccgcgaatt

SEQ ID NO: 694966 - DNA, 127 bp, Homo sapiens
aaatcaagtactcagaacaccagactagaagccagaaatggaggctcaagtcctaggttcaatagaacttgatttcaggtcaataacggtcccccctcactccacactggcacgtttgtgagaagaa

SEQ ID NO: 694967 - DNA, 914 bp, Homo sapiens
ggtgcttcgtccgctcggcggtggcccagccaggcccgctgggactcagaccagcggggagcgcggtctccgcccttggggccctcccgccgggccggagacccaagcccccaacgccaggccctgccctggaagcgctcgcgtggccggcgcctggacgggggagttgctgctctttggcgtaaattgcaatcgattagggatcgtttctcagaatcaatgttagaatgtgagagttcatgataagtgaggcctgccattgctgctttgtacacctcataaggggagaatggatttatcaggagtgaaagaagagcgagcttgctaggagtccaggagcgatacactaaaaagtccagcactagggctccttcagcctaccaaagcgcaaagaccgctcagatgagaagtccaaggatcgctcaagatagattatacggggccaccaaggagtcgagctgacgcacatgtgcatcgcgtggcggagacaaaagccgactagaggctcagcgcttccagtggtagcagcagtaccaggtctcggtccagctcgacttccagctcaggctccagagcagcactggctcaagcagtggctccagtgtcttcctcagcatccagccgctcaggaagctccagcactcccgcagctccagctctagcagctcttctggctctccaagtccttctcggcgcagacagctgacaacaggaggcgctcccgttccaaatccaaaaccaacttaaaaggagacttgcaaccgggagacggcaaatggcgggcgcccattctcctaagcccacgcaagtgccatttgcgagactccaccggactgtgccgcaaggatctcgttgtggagaatatttccacctatgggagacttcaatgatggctgcccggaaaggttggtccc

SEQ ID NO: 694968 - DNA, 298 bp, Homo sapiens
ctctgcagttcctttattgaaagaggtgtgctgctgccacggtgcttacacctgtaacccagcactttggagccgagcgagcagatcacgagtcagagaccgagaccatcctggctaacatgtgaaaccctgtctctactaaaaatacaaaaaattagccgggtgtggtggtgggcgcctgtagtcccagctacttgggagctgaggcaggagaatggtatgaaccagggaggcggagcttgcagtgagccgaagatcacgctactgcactccagcctgggtgacagcacgagatgcc

SEQ ID NO: 694969 - DNA, 992 bp, Homo sapiens
  misc_feature (657)..(657): n is a, c, g, or t
cgcggtggctcacgcctgtaatcccagcgctttgggaggctgaggcaggcggatcacgagctcaggagatcgagaccatcctggctaacacggtgaaaccccaactctactaaaaatataaaaaattagccgggcgtggtggcaggcgcctgtagtcccagttacacaggaggctgaggcaggagaatggcgtgaatccgggaggcggaggttgcagtgagccgagatcgcaccactgcactccagcctgggcgacagagcgagactctgtctcaaaaaaaaaaggaatgaaatacctgatacatgcgacaacatggatgaaccttgaaaacatgctaagtgaaagaagccaagcatgtatggtacaattccatttatatgaaatacccagaatagtcaaacggatagagacagaaagctgattagtggtggcctaggtttggcgggaaggaggcaagggggagtgactgctaatagtggggggatttcctttcagggtaatgacaacatgttccgggaaccagatagtgatgatgcttatacaacgcttgtgactggcctaagggccactgaatggtccactttcacacacggttcacactgccacaatttacggtcatgctgtctttccaccaaaagctctgtgacaattctagngaacctttacgtaactacggcattggacctggggagaccacaccaggaagctccctcaagagaggccccaagattacaacttccaaaagaacagcgttttaacctaaaaaagcgcccttacatgacgttaattccttcccccctcttctacattcaaaatccttggatagaatcttgggaaccacactcaagcaaggattcccacctcaggggccgtgggcctcctggaggtactccttatacctgtgacggttaaggtcacacccatctggtcaataccaattataccttacatatgggctggccaattagactccaagggggcccaaggcccc

SEQ ID NO: 694970 - DNA, 865 bp, Homo sapiens
tcccatttggacccaagcgtttatggtcctttaacaacatgtcatttttgggtttataaaaacgtgcttgggtgattagttttctccaacattataactctcaaaagcatgtgttaaaaataaatctcaacctatactctcttcttatattaaacatctccaaccccagggccctccaggaacttttccaaaaaaaaaaaaaaaaaaaaaaaaaaaaaaaaaaaaaaaaaaaaaaaaaaaaaaaaagagagagaggggcgggcgcgcgccaaaatatatttctccccgcggggggcgcccacaacgtcttccagcgcgcgcacccccgcgtgttttgtgtgtgtgaaaagagaggggcgccctcttatagagagagagaggtgtttatatttatatatccgcaacagcacggcgcgacgcggcgcgccgcgcgcttcttacaacacacacagcgcagcaaaaaaaagaggagagaaaacacacgcgggcacacccgcgcgggcgccctcttgtgagagagagaagagagccctctcttttctctgcgggggggggggaggacaatctgtgtgggggagacaaacctcctctctcaagaaattatttataaacctcttcgggcggaaaattatataaactttcttacaggagcggcggtataagggggggggtgcacacccctccgccgcgtgctctatgctgtcgtgcgccgtgcagagaaccaaatttttggcgtgccccacctcgcgcgggatcttattagtatagtcttatcatgaggacgaaaagaaaaacatattttcctattatactcccccccaggggggggcatcacattcagcaaaaccagagccaaagagggggt

SEQ ID NO: 694971 - DNA, 888 bp, Homo sapiens
  misc_feature (697)..(697): n is a, c, g, or t
aacaagtgcgcccccacctggaaggctgcggcaacgacatcgtcagtgcgcgccctgacgagtggctaggtcgctgcgattctcgatgccaccggggtggtctgcactggtgaccacgagggggtgcactataaccatctggagctgagccctggggagtcagtgcaggagggggaccctcatttccgaagtgccctgacagcccagccatgtgcgtgaccctgtgcacatgtaccagcttgcacaaagctttcgcccggagctgaactggaagcgcactgtactcaaggagatccgaggagttacagtgggagatccagtaataccagccatctggccgttgatggggaccgggcgagctgctgtggtcctgtgtggtattccatgcacctatcccgcccgtgactccctgcttatgaggtgctgcgctgggactatcttcgcgggagctgcatgctttctcctgcgccgttggtcaccccgctgtcccactgcgtgtgggctgacctgggctgatgtgggcgatgttctgggtgacagctctagaggagctgaaccgcctgtactcacccggacttgtcggttccagaagcagcagctggtgaatgggtaccgacgctttgatccgtgccggggttatggaactacacgctggacttgcagctggaggctctgagcccccagggaggccgtcggnccctcactcgccgagtgcagtgctccggcggctgaggcgtgtggcagatcttgcctgtgcctatgttactggtggcccacgttcagtgtgcggtgctctagcttggctgagtgactgtgcccgggttctgggggccttggcgctgggctgcctgggtgtttggggccttcccttttttttttccggcggcc

SEQ ID NO: 694972 - DNA, 701 bp, Homo sapiens
gcatcctttctggccttcaagaacaacttagtacacatctccattccgtgtattccacttggagtcctccttatcaccgaaacgagaatgcatacatgttgtgtgtgaagtcatcggtgtatagtctctgcacactgcagcggttggagagaacagtcattcctctggatttgtgtttgtcgtggtcgtgcctggtgtgcgggactgcgtgtgaggaggattaatgagctgtgatgttgcagtagtgatacatagagtagactcccgagagcagtgtatgtagaggactaacaaatgtatctggtatttaagtaatctgaaccagttctggaaggtgactgtgtattgtattactggtgaagagtaagaagaatgtagttaattacaactttaaagagtattccacataacttcttaatttctacagttccctcccttactcttcgggggtttcctgttgcagtaagcaacttttccatgctcttaatgtattcctgtgtagtaggaatccggaagtattagattgactggcaccagcacttgccatctctgtctaggggtcacaaattgaaatggtcctgtatcacatacggaggtcttgtgtatctgtggacaacaggagtttcccttattcactctttatgggctgttgtataaagttgccaaactccctcccaattaaaattcacttacacctctgg

SEQ ID NO: 694973 - DNA, 133 bp, Homo sapiens
accatgtaactgcccaagcctgctagatagaccccgtgggattacataacaacttcatgagtggctgtgtcttgtaattttggggacaggtttctctctttccctctctttttttgtcaaaagcccagagact

SEQ ID NO: 694974 - DNA, 2130 bp, Homo sapiens
ttccggctatctgtggaattacctgaagaaaaaacgcctaacggtggcaaccattaagcgctaggtataaatcagataaaaaacaatttataccataattttagcaagaaaaacggagaatagcaaatgactaacgaggtcacggtaattaacgagtggggctgaagcatacacactagatatgttgcgggataaaaagacggtcgaaaagatgtctgctgagtcgctgcatgatctggcgtatgcgattaagtctttgaaagcaccgatgaaaaatgttgaagacgctgtaaaagcaaagctagatgatggcgtggagattaaaggcatcagttacacggaggctacacgtaaatcattagccgccgatgatgaaaagttgaaaatggcttttgtcaaaaaatatggttgggacgctgtgcaagttaaaacaccaacgcaactagaaaagcaatacggcgaagctatcaaagaagacttggaaaaagttgtcatttatgacacgcagaagagggttaaatatgactgattttaatagtttgtatgaggcgctggccgaaacacaaaataacatcgaacaaccaaaaaaagatgcgagcaacccaatgttcaaatctagctacgtgacattagacgcggttatcaatgcaatcgtcaaagcacgtaaggcgtctggagctaagttctttttcacaaacattgtacaagacggcgtgatgttcacgcgaattatcggttatggggaaacgttggacttggcaggttcaaaagtagcagacgacctaggaaaccgcgggacgaactcggcgcaagcagaggggtcggcgctaacgtatgcacgtcgttatagcctgtctatggcgtttgggatagcaagtgatgtagatgatgacggaaacagtgcaggtggctcaaaacgcaaaccagaggcgcctaagactatatcacaagaaaagttggtcttgttggaaaagttgatcacagacacatcgcaacttagcggacaagacatgatggcgttcacgttaaaagcagcaaatgtcgcagcattgaaatttgttacagaagacaattacaagccgctattagcaaaagtaactgaaaccttgctacctacacacacaaagggtcacaagtcggattagcggcgagtgccagacgcgaactatgaaacacagcgggcaacgtgttacgtgaacgagctaaatgcaccaagttttgatttgcttgatccacgaggcgcaacgcaaccacaaagcaacttagatagcgttgatccgtttgcggcagcgggtaaaaaacaaatcgacatttcagacgatgcgctgcccttctaactggtgacgccatgagagagtttcaggcgtacccaacacaaaaagccggtaacgaaatcatattcaggtttaaagacgaggaaagcgcgaaccagtttttatcaacatttcaactatttaagcaaactttggttgaaattcaagtgagggacgaccgagagattagtgctaagcaaaggcggtttatctacgccatgtttaacgacatcgcaaagtggtctggggacgcaccggaatacgtcaagcagtggtttaaattagcttatgagtattggcaagagttggacacaatttcactgcgagacgttgaaaagtcggtagcggctggtctcataacgttcatgttggacttcgtagccgatcacaacgtgcctttgagttttaaaccactagacgcattagaacctgaagacgttgcacattgggaatatcgggcgctcattgagggatttgacgtgctagatggctcaagaccggttgagttggcccacggcgaacacgcagtcggcatggggcgtgaccgtgacaagatcagcaacatcggcaacacggtatttagcctaagccacacgcatcacatggagcttcacaaaattggattaaacgcatttaaagcaaagtatcacattaacggcgtgcgagtgacggcagagattatcaatgaattagaaaaccgaggcaggcgctttggtggaaatggagagtaactatggatttagtatcttttaagtctggaggactggaatactttgaagcaaagtaggctttgagcgacaaagcgattaagtgcttc

SEQ ID NO: 694975 - DNA, 121 bp, Homo sapiens
gtaacacacccctagatccaggggcaattatgaacgtcattaatgacgagtcatattaacaatattatgggttgcttgatgtggcccaacgtgaaatacatacataatattacctaaaatg

SEQ ID NO: 694976 - DNA, 375 bp, Homo sapiens
agaggatgcgtgaaatagccgacggcactgagttgtacggttcctgctgtttttctggatgactcataccaattgtttatatcatggttaattaagagtagtcaaggccaccggatcaatactgtcacgagacactcttttggcgtaggggagaggagacctgaccttgtgtgatttcccactaggttccaggcactgtgtcacataggcacacacgctaacatatttaattcccacatggaccctgagccaggtaccctcgtcttcctttcacacatgaatgatctcgtactacgagatgtaacagacacatagccactcaaacaaactcaggacccaaactcacattttcctcatccaaaagtcggctaattt

SEQ ID NO: 694977 - DNA, 198 bp, Homo sapiens
tcctagcctctccagtgtcctagcctcgccctgtgtcctagcctcggcggtggtcctaccctcgccggtgtggttgccaagcctgagcctgcctgctaccttcatcaccgaatttgcactcgctcattcctggaatccttttgcctatcttcagcaccaaatcgtgagcgcaccttcgttcgtgcctagattccttca

SEQ ID NO: 694978 - DNA, 746 bp, Homo sapiens
acctgggatggtggagaattcccaagccacagccctttgtctcggggaactcccttcttcacagagaaggaggtgggggctgtgaatggttgttagtttctgaattttaccaaataaagtagaatctaagaagaaaaaaaaaaaaaaaaaaaaaaaaaaaaaaaaaaaaaaaaaaaaaaaaaaaaaaaaaaaaaaaacaaaaaaagaaaaaaaaaaagaaagaaaaaaaaaaaaaaaaaaagaaaaaaacaaaaaaaaaaaaaaaaaaaaaaaaaaaaaaaaaacaggaagacagaggcggggcgcgggccccatatccacccaccgcgggcacaccataccccccctttagaaggagcgacgccgtacgaaggagtggtggttattaaaataaagacgggagggagggcgaggacgactaaaaacaaaaaaaagcggtgcgggaggaaaaaagagaaagaaaaggagagaacagaagcgagagtacttaagcgagagaggaagagaccaaacaccacaatacagaggggggagagagcgaaaagacaaagaaagcgcgagcagaagaccacacaagccgcaaagaaagaataaagttagcgcagcggggcggcggcaacacaaaacacaacagcagagagaggacaatggagcaggaggaaagcaaacaaagaaagcagcgacaaccgcgggaaacaggagaaaagaatgcccgcgagagagaaggaaagaagaacacaaacgcg

SEQ ID NO: 694979 - DNA, 351 bp, Homo sapiens
tcgcggaccctatccagcatagtttttttctctttgaaagatagagattaatacaactactttccaaatatgtcataggttactaagatattgcttagcgttaagtctttaacgtccttttaatagcttcagatttcaagagaatatatgaagacttataacagtagcatgaggaagcgaaaagactcaaggtttctagaacatgacggacgttgagatgaagctgcttcatgcagtataaaatgtatttgacagcaaaattgtgagaatggactacagagccccgaattaataccaatcgaagggcaatgcttttcgatcaaaatgaaggtcacttaccctgcttagagt

SEQ ID NO: 694980 - DNA, 587 bp, Homo sapiens
  misc_feature (312)..(312): n is a, c, g, or t
gcagatatttcggcttcaggaggtggctctttgtgcccgatctctcccggagctagctgggcttcgggcggaccagaggcccacagcgatgacttgatccgtgcgtgagtcgggtcccaggggtttcctcgcgctggcctgtgtttgtctctccgcctcggttcgtcccccttgcaggcgtgtcagcggctggactgagcggtgacctggcgggtcgcgcctgcgctctgccctgtttcctgtctggctggtggtcggcggacattttgttcatcctcctcctcctcctgctcctcctggttggagcgcagngtccggagcgggctggggggagagagcccgagagcagggttcggtgccttttcctctgtccccagccggtgcccagaggccccctccccttcctccccaccctcttcccttcccaaccctgcccttccccttgtcccgtgatcgctccgtcgcacccaccatgatggaagacgacgggcagacccggactctatacctatgtaatctttccagagatgtgacagaagtccttatacttcagatgttcagtcacgattgtaccctgtaaaagctgt

SEQ ID NO: 694981 - DNA, 122 bp, Homo sapiens
tctgatgtctcccgggaccttaacaagactcaggaatcagctgagccttgaaatggtcagagctaacagcgtcgaatctcccaccttgagatcgtccgacagaagaaggacagtgaggctgt

SEQ ID NO: 694982 - DNA, 113 bp, Homo sapiens
acgaggcagaacaacggacggaagaaaaggtctggccggagatgggtctcacttctgtcacccagactggcagtgcagtgagtggtgcagatcatgcttactgcagcctgaaa

SEQ ID NO: 694983 - DNA, 129 bp, Homo sapiens
agagcacactgaattgtgactcagtctcgagagctagctgctgccgggtgacctgatccaacctgataaggtgccatcttcagactaccacatgcaaagaccctgagggcaacagcagcaccaccagga

SEQ ID NO: 694984 - DNA, 190 bp, Homo sapiens
tgttacaggatcttagactaaccaccctacacacagctactacaacgcaggatcgagccgcgttgcaacctacaccacagctcacggcaacgccagatccttaacccactgagcaaggccaggatcgaacctgcaacctcatggttcccagtcggattcgttcaccactgccccagtggggttaggtctg

SEQ ID NO: 694985 - DNA, 170 bp, Homo sapiens
  misc_feature (15)..(15): n is a, c, g, or t
cttgagaattctagntgtcttctaaatgattttcatctcctcctcatggactgaccagattgccagttcctgctgtgagatgttaccccactcttccgccaaggcacctgaaagttcccagacatttctagggggaatggccctagccctcagactccgatccaacaggt

SEQ ID NO: 694986 - DNA, 239 bp, Homo sapiens
catgcggctatcagggagatagaaatccacgctcctccgtggtgtaccacataggttatgttattcagacttgggacccatgtcgtaccaaagttaacaattcaaaatgagaaaaagagaggatgtactaaataatcagtggtccatgtgttgtgtgccgctgtagtggagatgttgatatcgagattaaatctcttggatgaacagagtgtgggtggcaaaatgttcaagcactggga

SEQ ID NO: 694987 - DNA, 178 bp, Homo sapiens
actaaaacatctataatctaggggcacaatgttccgtctcgtttttatgagatagggttgcctataatggagtgcagtagcttgaccatagctcactgtagcctcaacctcccagggacaagcaatcctcctgtctcagcctccaagtagctgggagaatcactggagcccgtgagta

SEQ ID NO: 694988 - DNA, 541 bp, Homo sapiens
  misc_feature (137)..(139): n is a, c, g, or t
  misc_feature (198)..(200): n is a, c, g, or t
  misc_feature (518)..(518): n is a, c, g, or t
  misc_feature (527)..(527): n is a, c, g, or t
  misc_feature (536)..(536): n is a, c, g, or t
caaaatattttttttttttggggggggggggggggccccacaaacccgcgggggggggggttctcctttcttttttttttccccctttttttttttaataaaaaaaaaacaacgttttttttttcccccccaggggnnnctccccccccggggggagaagaaaaaacccttttcctcccaaaagaaaaaaaaaaaaannnttatttatttttttgggggggggggccccaaaaaagagaaaaaaaccccccccccccgggggggggggggaaccacctctttttttttaaaaaaaagtttttccctcacccaacaccccccctgtgaaaattcctcccccgcgctgggggccccaaaaaaaaaacccggggggttttccaacgaagggggggcgaaaaaccccaagggccgaaaaattttttttttgggggattcagagtacccaattgcccccccccctgaatcctttctttttctggggtaagcacagccctccggactttgggatttaggatagnctctggttncctgctccncagct

SEQ ID NO: 694989 - DNA, 216 bp, Homo sapiens
  misc_feature (28)..(28): n is a, c, g, or t
ccgcaacgtgggattcactgggtactcnatgaatataaaaacacaacaatagacactggggactattagagggtgaagacaggctgaagtacaagggttgaaacttacctgttaggtactatgttcactacccgtgtgaggggattattcacatctcaaatgtcagaatcatgcaacatacccatgtaacaaacctacacatgtacccccacgttt

SEQ ID NO: 694990 - DNA, 264 bp, Homo sapiens
tcttaagaggcattaagagttgggaggccgaggcgggcggatcacgaggtcaagagatcgagaccatcccggctaaaacgaattgaagacatgatgcctggaaggagataaacttcaggagttcacctttaagcctaaaaagtaccagcaaaatgcaatgacaggataaaaagtttgtcataaatattttcacaagatggaagacaagaaagcaaagagcagcatagaaagaatgaaggaataaataaaaataagtgaaaatgc

SEQ ID NO: 694991 - DNA, 143 bp, Homo sapiens
aaaaaaagtgagcagactgtgacagaccattcccatcggacaagtggtcgaacccgacatccaagacccagagagcatcacaatgtctcagcgcacaactccgggctcctcgaactgaatccagaagggtgagcacgtcgccc

SEQ ID NO: 694992 - DNA, 223 bp, Homo sapiens
  misc_feature (19)..(19): n is a, c, g, or t
  misc_feature (64)..(64): n is a, c, g, or t
  misc_feature (117)..(117): n is a, c, g, or t
  misc_feature (133)..(133): n is a, c, g, or t
  misc_feature (142)..(142): n is a, c, g, or t
  misc_feature (146)..(146): n is a, c, g, or t
  misc_feature (194)..(194): n is a, c, g, or t
gagagagagagagagaganagagagagagagagagagagagagagagagagagagagagagagnggggtgagaaaggtcctggtccgcgccagagcccagcgcgcctcgtcgcatgnctcggaaaattgaggnaatcaaggncttnctgctcacagcccggcgaaggatgccaaatctgtcaagatcaagaaanataaggacaacgtggaagtttaaagttcg

SEQ ID NO: 694993 - DNA, 258 bp, Homo sapiens
  misc_feature (219)..(219): n is a, c, g, or t
tggactcagtcctcctcctccatctctcccttgatccagtccacgtagttgagcactttgacgtagaagccatagcccctgctgcacccgatgccccaggacacaatgcccgtgacacccagcgatcagtgctcaagtcccttactgcaaaaacacccccactatccccctggcaagcatcttgcttcagagatgggtgtccagcacagaatacgcccnaaaagcacacgttcacaaaaccaaaacaaagcggccaat

SEQ ID NO: 694994 - DNA, 245 bp, Homo sapiens
gctactttcacatgtgcttatgattttggtatagtaaaagagttagaggtttatataagagcctgataaggtatattgaggggctatgagaccttactctacatttgtaatatataggagccttgacattgtgagagttacgctcctagattttgataaatctctaaataaactatgagagatacaccatgaatccccaattgcggttgacatgatagcatatagttcctcccactaaaataact

SEQ ID NO: 694995 - DNA, 133 bp, Homo sapiens
gagtagaggaagcacccgatctaggccagctgaaggtgcgggaggtcgcgtgccccgctgcgctccgtgacctgggtcatggtgcggaatgtccttcttcatgtgaaacgtgacgtggtcggtaaggcggccg

SEQ ID NO: 694996 - DNA, 105 bp, Homo sapiens
atcagaccaggctttggtcgatggacttgcactcaggtaggagacaggccatccttcaaggtccatccagttcactgatttcatcctcagtttccgcacagtgcc

SEQ ID NO: 694997 - DNA, 113 bp, Homo sapiens
catgagatcaagtgcaaggctgcagttgcttgggaggctggaaagctcttctctcatagaggatgatagaggtcgcacccccaaaggctcatgaagttcgatcaagatcattg

SEQ ID NO: 694998 - DNA, 379 bp, Homo sapiens
  misc_feature (6)..(6): n is a, c, g, or t
tcggcnccatgacagcagtcgtctttgtcacccgaaagaaccgccaagtgtgtgccaacccagagaagaaatgggttcgggagtacatcaaatctttggagatgagctaggatggcagggtccttggaacctgaacttacacaaatttgcctgtttctgctttgatcatggtcatagcttgggaggcttcccctcactatcctaaccaacccgctccttgaagggcccagattctaccaagagagaagcagttacgaaaaaccttcacccaggctggaacgtggtgggtcaggctggtaatcccaagaaattggggaggccaaggtgggtggatcaattgagggtaaggagttcgagaccagactgggcaaaatgatga

SEQ ID NO: 694999 - DNA, 226 bp, Homo sapiens
atctagaggacccgttcgacggaacagcagcttcattggctgcaacgcctctctcaggtgagtaaaggagacacgacgggaacccaggggcctaggtgaggatgtcatgggcctggtgctccaccagcatctccatgctcttcacattcgtgcaccagaactccagggcgtcccttcattcccttgatctgttgccaatcccacactcggggctgcacccaggggt

SEQ ID NO: 695000 - DNA, 225 bp, Homo sapiens
gcgattaatactgggtggtggatgggccagtagctaagaagtgggcttttaaagagtgatcaagatggaaagggttttttctttcttttttaaaaaagaaaaacaaactatggatggtagataatgaaaagctagggttggccctcttcaggtctactctccttccaaatagtggtatccaaacacggtttttcccatctcccctacctggagtcccgctggagt

SEQ ID NO: 695001 - DNA, 344 bp, Homo sapiens
cctttcccccaaatttaattatgtttttccgctaaaatgatgatacaagttgaagacccatccctttgaaattggaagacctccccccttaagggtccccagtggcttaatcaactgaaattttgggttaatactctttactttgttccccccttggggggggcagttttttttaaatgttgggagatggcccttttaactactgttgaatgtttttgttttgggaagggataacaaaaaataaaaaaaaatatatattaagggaaaggctggttatctcctcccatatgggtggggttatccttttatgggtttcaaatgaatatttggaggtttgctttcca

SEQ ID NO: 695002 - DNA, 1068 bp, Homo sapiens
aggaccatggttgtcacctgttctcccacagcaatttccacccaatcggttgtctagaatcttctttcattagcacattccctacccctctgccactaggttctagaaatggagctccctgggctcaagttgggccttttcaggaactcgtgggaaccaagacgcgaaggtgagagcttcaagacagtatagcgcccagggaacatggcaaggccaaagtctcagctgagagccttaacgcaaaactcacgtaataggactgctggtttaacaaacgatccagagactgtgcaccgcatgtcgtatcagcactgaagcggcaaagtccatgttccttcgtcgccagctgcgctatcgtacgacgtacgcacatagcttctatggtagccggggtagcatgcgtacgaacggctgagcgcccaggccaagagccaggacatgcgcaggcactcagccaggagcaattgcccacttcgtcgcaatcctggagtgcatccacggaacccctgaagataagtacaagagcaggtacggatgagagccatggtgacatgctcggagcctacagctctgcacctttcagtgactgctggctccctaggctgcctcctggggcagcctaggccacaggtagcgtatgcgattccatctggggatgagacacagttgtaatgtcgtcaccagatggcgtcttaacgtccgctgagtctgtcgttgttagccatatattcttgttcgagtctaagacgacagtggtcttcagctactggtcacaccagggcgtggaatgcagatggcgcaagtctacaactcgaacgcagatcgtagactccatgggctcaagcaatcctcccaccttagcctccagagtagctgggacgatgggcatgcaccaccatacccagctaacttatatgatttttagtagagatggggcctcactgtgttgcccaggctggtatcaaagtcccgggatcaggcgatcctcccagcctggcctcccaaagtgctagggattacagatgtgagccacaacgcccagcccttaaagccatagcactgctcata

SEQ ID NO: 695003 - DNA, 284 bp, Homo sapiens
aaaggggcctggggccctggttccggctgtgtttggtggtttggctccggggaaggggcaaaaaggggggcgggccttttttgcagcattgggcctcaaatccgttttggggcatgagggtggatacagtggtggtggggccgccccccgcctcctcccgaggaagccagggttttttttgggttttcctgtcccaaaaggggcacaattggtttttaagttttttttttccagatcctaatttatgcctatgcaaaaaataaatgaggcccaaaaggtgtgga

SEQ ID NO: 695004 - DNA, 1163 bp, Homo sapiens
acccccccccaatcacacaagagaaataataaatatagtgaagcactagacaatacacatttgcgtatatcttcgtttctagtgtgttttttaccctactatgttcttctctctttaggtgtattcttaatcttactgcttgtgtatataatttcccctgttatcatgttccagtcccttatatggtggtgtttcttttctgctccccctggggttgctggccaccgtgtacctgatggcgaggagcatctggggcacatatgaggtgaatcctgtgcaccaagactggccgatctagcaattctttccctgggggactttcacaactgggttttttttatctccacgactgacatgcggtgtcaccgtggacagccgcgtttgttaaaggaccccggagcatatccattcacagttgtccacagagcaacttccgcgccttttggatcctggatccagcgttaacaatctgtccttcagacgaggcatttaaccccactggttaatggactggtcacccagtttttattttatcttttatgaatctacctttcccttgattgatttaagcttcagccccacttttctgtcttttatttggttactcgttgttatcttgtctttctaagattaggatagctttttaaacagcctttgagaagccgcctgctgaaattgatactgggggaaagggttcccctgtcctttctagagcacgaaaagggagacgaggtgttgtattcctcgtttggtaaccccacgttctcctgtaagaccctcctaccaccactgggcgagtataccccccatcacggagagggtatcctgcctgcatatggagcctcgcttccgacttattcccttccccataattattcactccacgagcttatgccaccacgtgcacccaaacgcacaacctgctagaagagggcacgtgaacacccaccacgcttctccccacgtctaggtgccttttacactccgggtttcgttctccttccactggtgtgttgctgaacacttgtcacctgagtcccactgtgaaggtgctggtgagtattacctttcaatctgtgccatgctctagaaccttgaccttgatagttcaccccctctgatggatccctgttttaaataaaaacgattcactttaaagccta

SEQ ID NO: 695005 - DNA, 877 bp, Homo sapiens
  misc_feature (549)..(549): n is a, c, g, or t
ccctttgtccgctttttgggcaccccatagtagcgaacggtcggtgccaccaacgacgcccgcggggtgtcccgcgtccccggactttcccccggagttttgtccgccaccacagcggtgcccgggcggccatctctcttcccgctgtcacccccgccgctgtggtgtgccctgctgtcaggaagagggggtccccccccccccaattctgctgcccaggggtatcgtgcggcgcgctatatcgcgcacacggcccgcctcttggcgttgttggagcgcccatgtgcgctcgcccttcccccgttcgtgcgccgcgcgcccatgatcatcactgaccgcgcggccctcctcgttggccccccgctcgttggtggccgcgccgttgtgggcgagactgttcccctcactttttgctgttgtgccatcttcggccatagattagctgctctccccgttggtgatgatattcccctctcgcccgccccctcatcatccactaacatgtcgccccgcgcagagccgcatctccccaccccccgcctcctgtgngagggatagatcggcccttcttcttggggagacttttgtcgtccccacgcccgcctacttcacacctcctccgggtggggccgaccacctaatagttggttgccactagggctcctcccttgttgccgccgatcccctatggggacgcccccgttgttgttttggtcacatgcgccccccctatgtcccatcagatgaaggggattgggggagttatatttcttcagagctccggcgcctattggtggggccccccccccaaattttcccccgggtgggggggggttttttaagaggggaaaaaaaaaaaaaaccccttttttaaata

SEQ ID NO: 695006 - DNA, 1349 bp, Homo sapiens
  misc_feature (981)..(981): n is a, c, g, or t
  misc_feature (1059)..(1060): n is a, c, g, or t
  misc_feature (1081)..(1081): n is a, c, g, or t
  misc_feature (1096)..(1096): n is a, c, g, or t
  misc_feature (1287)..(1287): n is a, c, g, or t
  misc_feature (1322)..(1322): n is a, c, g, or t
ggtgggttggtggtgtgtgtgtgtggttgtgcggaggctcggcgcgcaggcggggaggagcagcagaacggagcttaggcgtgtgggatgtatgggtgagcatgttccgacggggtgggcgtgccgtgggggtaggggttgcgggctttctctgggggtggtgggcccgcagcgtggtgtgtcacaaggggcgcccgggtcgcgtgttgggacggttgagggtgtccccggcctggggggacctcgccgggtcgcgtggtgcgggcgagagagagagttggggcgcccggggggtggtcaagggacgcgtgccacgggggggagtgcggtcgccgcgtcctgtggcacatgtggtcgcccgatctcgcagggaggtgttgcggggccagtgtcagccctggtgggggaaagggagcctgttgtcccacctcgtggggggaccccttgcccccctgggtgacaggcgatccgcacccgtggaggggtacaccactttgcccggagccaaggccaactccgattcccggataatgaggagcgtcccaaggggagaaaatcgccaggggaggagccaagggccgatggtatgcgcacatgtgaccgtagggttgcgagatgtggccccacagagacccacaaaccggggtgacccccacaagggatttggtggacactcggcgcccccccagggaccaggggagggaaaggtttggcccaggtggagccctcggattggaggctgggctggccctgctgataggaaggttatattgggttaattgagctggggcacccacccgcgaaagcttgtggagaaatgcgcgagcacccaaagatttctggtgcctgtgtgttgtgccggtgcccatgtggaccagcgcgcttatttaggcacccagatgccagaggaatagtgacccagagaatagccggatttacccctggatcgtttgcccaaaactgggtgtgtttccggattgnaagagagaggtgttggaacaccagaagcgcctctttaccggatcccctggagctgcccattagaatccagaatctttnncccagaactagaagcccaagnttttatgaagggacnttttaattgggaaaatgtccaaaccagccatgatgccccccagcctgctgaagctctttccattcgggagttgcccccagcccctgctccaatgtggagtatcttccaagccctttccaggctgtcccagaatctttccccacccagaacccagccaactaccggctttgaaccttcttgtcatcctcctncctgatgccaaccgggacaccactgaaggcccttnttgaatttctcccaagagtaatagata

SEQ ID NO: 695007 - DNA, 588 bp, Homo sapiens
gttttgattttctttttgtttttctttcttcttcttatttttttcatttgagtcttagctcccatttaagttatgcttctgaccttgtatggtctgtaagcttgcccagaaataagaccactgttttgaactaccacaaaagtataaatgaatattttaatgccacaatctttcctgttgcctgtggagtctctgctgaaatgaatcaggattcgagctctaggatgagacagaaaatgaaagcatgttgtttgccaggacactgtgggtttatattgatgtgtaacaagttgatttggaacactggactctcaattctgtattctggttttgtttattttgtttgttttttttcttttgtaaaggcaatgagcttatcccagaaaggatccttcagttacatacaatttgtttaatgaaaattcatgggctctgtccataatttaggcttgtttttccaaacggtttattacaactttcaaagcccttttgttttttgtaaggttggaatggccccaaacttttgaatagaagcctgggtttcactggtttttggtttagaatattttttgtttttgatattttatc

SEQ ID NO: 695008 - DNA, 115 bp, Homo sapiens
gtaagtagacgggtgactgtttgatcatcataattacctcgtgctctgaactggatacattaaaatggttacaggccattgtgcggcggctcacacctgtaatcccatcccagca

SEQ ID NO: 695009 - DNA, 524 bp, Homo sapiens
cgagtaaaacacagcacgccaacatgcagtatccgctgctttacggatacgcatcagcgcacgcttcttccctggcagggccttgctgactatcttctctctacttcatggccatgtaggagtcctccatacctggctttcttcaggaagcccagaaccttccctaaccagagtactcgttagcaccgtaatactctggagatctgcccccaaagacaattttttacattatggtaagtccagaaattcaaaattttatgtacctagcataacaatattttgtattttttttttttgcatatccaaaagcccaacgtgtttttcctagaacagaaaaaaattatgccacttctctgctaggccttgctagttattccctcctcacatcattactccttggcacaagcaataatcccaggtcactattatcctttgcctcaatcccaaactctgaaacaagagttgtcaggagggtttaagaaaataatgtggccaggcagggtagctcatgcctgtaatcccag

SEQ ID NO: 695010 - DNA, 213 bp, Homo sapiens
cttaaaatctcctcatattcttctggctgtagtggtggctcattgtgaatccattttgttcaacaccgacaattagttgtttcatagcccagtgtgtaagccagaagggcatgctctctgggtctgcccatttcttggaagatacctagcttcaaactatcaccaatcaccagacagcgacaattcagcacagcacagttcagtgacttagga

SEQ ID NO: 695011 - DNA, 259 bp, Homo sapiens
gccccctggggttaaatcatcccaaaactttttaaaaagggccagaattttattttaacccgatgttgagcccctttaaaacgtttgtatgtggggtgccctaattttaaactttggaggcatttttctgtgtgaggccgatcccccccgtaaaggtcctaaaggtgcccgtttgtttttggagatggaattaaacccaataaaaagcttcccctggaggcttgtattggccctggaaatatatgttaatttcgggtta

SEQ ID NO: 695012 - DNA, 114 bp, Homo sapiens
gtactgtaggactaactaactcatctcatatctattgtagctgtatgaactaactaactctctcatatctattgtagctgatagtaccataactaactctctcatttctattgt

SEQ ID NO: 695013 - DNA, 215 bp, Homo sapiens
  misc_feature (6)..(6): n is a, c, g, or t
ctcggnacccctgtaaggctctgtaaccgcatagatggtgagtgggtagaataagcgggaagtagtaatgcgtgaccaacggttacttatgcgcataggtgttacgttgcggtggggtgatgcgtccgcctagcaggtaacaggtacctcgaagggagagcgtatgcgcatcctcatgttaagccatgagacggacaatgcctccgtcataccag

SEQ ID NO: 695014 - DNA, 339 bp, Homo sapiens
aaagccaataattctcggcggtgggtattataacgcatggggctctgaaagtgttgcaaggaacctgctgtgtgaattttgatcaggtcctgggttctcatttaagtgttccaatcactgatatatttgttaccctttgccataagatttaacatgtgttgtatttccagcggttcaaacctatttgtgtcgaatatcaaggattggagcaagagtttctgcctttcagcgctcttactaaaagcttgagatatagtctgccggccattggaccctagtaggaatagcagtctgtgaagagcgaatgggtggaagcagccccagaataccctgtgtaaa

SEQ ID NO: 695015 - DNA, 406 bp, Homo sapiens
gggagagagaaaactttacagaaatttttagacactgctgggaaaagctgagttcatttttttccctgatgaacttagtagtttttaaatcctgatttaaggatgtgatcctagggggtctaatgccacatcttccatttctatctgttctccctgcctgctggtataatgctgtgcatatgtcagatgctgaacaagtacctattatttcagtagattgcactgtgttttttgaaaaaacattttataagccatagcaaaaagaaggtaacttggccaggtatggtgctcaagcctgtagtcccagcactttgggaagctgaggcaggaggatcacttgaggccaggagttcgagaccagcctaggcaacatagcgagaccctgtcttcaaaataaaaaataaaa

SEQ ID NO: 695016 - DNA, 131 bp, Homo sapiens
agcggagatcccagaagtggttgtttccttgcattgggacgaaagcttggtccaagcatccaggctcagggaaaacatggcctgctattgcagaatacccagcgtgcatatgcaggagaacgtcggagtac

SEQ ID NO: 695017 - DNA, 156 bp, Homo sapiens
tcggcaactgcttcggatgtcggcaactgcttcggatgtcggcaactgcttcggatgtcggcaactgcttcggatgcggcaactgcttcggatgcggcaactgcttcggatgccgcaactgcttccgatgccgcaactgcttccgatgccggaact

SEQ ID NO: 695018 - DNA, 175 bp, Homo sapiens
ccagtcggggtgacagtaagaccatgtctcaaggaaacaagaaaagacaagaaaaaaaaaaaaaattgggcctaacctaggggtccacaattattgttccttaatactttattctaaaaagtctataaagtttatagctttgggttttggggtgtcaggggtccatttgggagta

SEQ ID NO: 695019 - DNA, 280 bp, Homo sapiens
ttaatccagcagcatggcttaacggggctcttacccccatgccgaaaacttgctgtagggtaaataaaaaaggaaactccttcatggagcccttggactatctatgtaaaggctttgggccttaaaaaaagtggtaattatgatcttaataagtttaagagatgatgcttggctgaagatcccaaaacattaaagtctggctcttgggcaacttctggtcttccttggaggctatcatggtgtcctgatggtttcacacatgtctgattcacagccttct

SEQ ID NO: 695020 - DNA, 209 bp, Homo sapiens
atcacagcactcgtgagtgtaccaggccggtggatcataacggcaggatgtagatagaaacagattgctcagtattatgaggccctgggtcaaataaaaatgcacgaaattatccgggcacagtggcatgttgcctgtgatctcagatactcgggaggctgaggcaggagaatcgctggaacctgggtggcagaggttgcagtgagccg

SEQ ID NO: 695021 - DNA, 462 bp, Homo sapiens
tccctctatgtatgcaggcgtcttctataatagcgttagaactgtagacacatatccttacgaatcattcatggtgtttgatctttctatgcgacatgactttaagtcagttaacaaaacatgtctctgtagacagtaatagttagataaaatatgaacagttttaaaatggcactgaatttacatctttaatcattttagataggccatccacagcctctcttgtgtctctaattctcaatctccgattcttaaaggctgtaaaggctcacaaagtgccagctcatgtgggtctctgtaagtgtctatgtcttcatagacgtacatatgtgctgtatacacacacatacatacatacataaatatactttacaatcaacagatgtgcattgtcagatccaatgttgattctggcatctggataaccaagaaagctgcttttaggtgtctggacaactttgt

SEQ ID NO: 695022 - DNA, 257 bp, Homo sapiens
cataaacacctgaggagcaagatctaaccagagacaattacttcaactaactctagagattaccagatggcgaaaggcagatgtaagaatcctactaacagaaatcaagaccactcaccatcatcagaatgcaacactcccaccccacctagtcctgggcaccacaacacacccagaaagcaaaggggaggaaggatagagtgaagcacttagggtgggagaaccgagaaggggggggcaacatttggagtcgacgc

SEQ ID NO: 695023 - DNA, 124 bp, Homo sapiens
  misc_feature (39)..(39): n is a, c, g, or t
  misc_feature (43)..(43): n is a, c, g, or t
  misc_feature (45)..(45): n is a, c, g, or t
  misc_feature (48)..(48): n is a, c, g, or t
  misc_feature (75)..(75): n is a, c, g, or t
  misc_feature (94)..(94): n is a, c, g, or t
gcacgaggtttaaataaactatatagtaacaatgaaaanacananaanagactgaggtggcagctgcccagaatntttgtggattaccatagtntggtttaaataaactatatagtaacaatga

SEQ ID NO: 695024 - DNA, 280 bp, Homo sapiens
ctctgcacgcaggcttgagcaccagggctaggaacacccccaaccgagaacgagcacgaggatcctctgcaaccaggcagatgactgccaaggctgtagagggcatcacaggggccatgcacacgagagcatcgagaagcacagagaccaaatcggaaccacactgccgagccccactagaaagacagagcctcaccagtaagctacagagacgaaaccgatgatcacagagcagacaacagaagaaacaaaacacaccagtaaaaatatagaacataca

SEQ ID NO: 695025 - DNA, 1566 bp, Homo sapiens
  misc_feature (1530)..(1530): n is a, c, g, or t
tgggaatctacggcgagccccagcaggtcagcaacaagtttatttggcagctagcaaggtaccagggtagggcagtgggttacatgtgtgttcaggttcaacttctcctttgggtcggtgggtggaatggggttgtggtcttatagtggggggggggttaggggaaagcaaagcaaaagtataacagtggagtgtgggtgtgcagccctcccgtgtgtaaaacccggtggtgttccagaaacgcttgtggggacagatccacccggtggctcgtggagaccggctcattttctcttggaacatctcacggtgtgttatttaagaatgtctcaaggatatattattttaaagaggaggtctccacgtgtgtgttcgctggagaaggggagagatatcagggggatatcttgtgtggccaaagatctccacacagacacaaaatctccacgcgtgtagaaaacacacgtcgtgtgagatagtagatagtgacagcgagataccacagagatatataatccccagagggggggcgcatatagatgtctctctcatatagcgcgcgcggggggccccgagggaaatctccgagatctcagcgggggcccccgcaagagggcccatatataacaccgaggagagacacaacactatataatactctctccacaggcgcgagtgtgggcagagagcaccctcgcggggagagagacggtgctatacacacgtggcgggagggggatgaggaggcgatctccacaccctactcatccagagatgatagaagagtactacaccaagaagtgctcaccccgcgcgccgcggagagacgaaaaacacccgcgggtgtggtacaccaaaatatatagccgccccacgtgggggggatcaaaaacacgccccaacgcgggggggagtccccttactcgacgaaacacatattttgtagccgcagtcgcatccaaaactacatagaggcagaaatgaccccccccttttttgtgtatgcgccaccaggagaggatctcctcctctataattgtagaggcaccaattgtttatatcagccacagaaaaccaaaaatgggttgctccccacacataaaaacaaaccagcgggctaatgcgacacacaatatctttacccaccgggtgagcggtccgtagaaaagccccacatcggtgagggaaaagcaacaaaacacaggacggaactactcagaggcgacccaccaccaccaacagaggggcggagacccccacagatgcgctgtattacaacaccacaacaacaaaacaacataaaattcaccccagagaggaagagtacaccatcagggcgtgacacacaggagggggcaggggggagcaccctattctccaaacagaagcgccgacaataatatgcagcggcccatcgagatggtggcgcacaaacagcgccccccactctctctacgtgcggcagggcacgaccaaacactttgtcggcacgcatacatcgaggcacaactctcgcccaactcccccctnaacaagagccacacaaaacgggacaggcaccccgga

SEQ ID NO: 695026 - DNA, 213 bp, Homo sapiens
gagcctggccagtccattcacctgctacagtgatggaatctaagttacttttgacaacaaatcgtccttgcatacactttttatttgctcccaaaaaggcgttatttccatactaagatctactattaagacgataaattgcgttaagagcgattatgggatattccttctaaactgtcaagtatgttttggtgagcgggggatccgtctagt

SEQ ID NO: 695027 - DNA, 1244 bp, Homo sapiens
  misc_feature (449)..(449): n is a, c, g, or t
  misc_feature (465)..(465): n is a, c, g, or t
  misc_feature (783)..(783): n is a, c, g, or t
gacaggagtcgtgaataactagcccgtaaaagccaagagatgggagaaggaaagagattcatatcaacatagtcgtcatcggacacgatagaattcggggcaagttccatccatgtacttgggccatctgactctattaacatgcggttcggcattcgacagagaacgaaccaattcgacaatagattgtgacgaagggacggctggctgacgagtgggaaacgggcgtccgtgtcgaaggtagtgcgcatgggtcgttgagatatagactggagaatgctgacggcgtgacatcgtggtcagtcacccagttgactatctcctgtgctggatagatgtagtagaaccagcagagatactagtgtggagctgaatcatttggatggacctcacaggcagcatcagacgcagctattatgcaagagacaacatgcacttggagcagcggnaccggtcgtacatggnactgagcgtgagtgcctgctgcgctgaactatggttgcactggctggatggttggctggaagtcttgaaagactggatagtctcgcaagaagtggcgcagaacccggaggagcgatgcgcctgtcatggactctacatcgacgtgggatgatgaagagcaacacttcagtagggtcggatggttgaactgaagaatggagatttccactctggagccaagccgtacagtgccaggaagagcatactgcaggaacatcggttaacggcacaggtcaagcagcgttaacagtgttagcgatacacatttggcgtaacaancccctggatgacagataagcactcttggtgccaagttatctgggttcggcaatggttgaaccaagcatggctgggcagaccaaagtgctaaacatggcctttggaatcaaggggcatggacacagtccacccgggaagggattggcaatggccagtggaaccaccgcttgcttgacggctcctgggacgtggaatcctacaacagcgcaactcggtccaacaggaaaaagacccgggagcccttggcaacctcccaaggaccggtctaccacaaaactgggagggaactgaggaacggggtcctgggtgggcccagtggagcaacagggcgtacacaaaaccaggtaagcgagacaacgattgaccacagacaacggaaagaccaaaagacacacaacagaaagacagcaaaaaactatgagagagacaccagagaaaacgagaggtcactcaaaacgacg

SEQ ID NO: 695028 - DNA, 285 bp, Homo sapiens
  misc_feature (73)..(73): n is a, c, g, or t
  misc_feature (77)..(78): n is a, c, g, or t
  misc_feature (89)..(89): n is a, c, g, or t
  misc_feature (106)..(106): n is a, c, g, or t
  misc_feature (144)..(144): n is a, c, g, or t
  misc_feature (171)..(171): n is a, c, g, or t
acgttgacgaacaagtaagtgaacacattagttgtatgaaccacttattacgatactcgctgatcataaacancctnntgtgtaatatntttttctcaaaaaacgnagcacccttcagcaggaccctataaaactttcctccancccttgcctctttgcaggtagcccctnctctgctgagctgcccactgcaacatattttcacaatttctctaataaatctgcccttctttacctacaactatcttggtaaatggctttaccacctgcaaaactgaccctagg

SEQ ID NO: 695029 - DNA, 212 bp, Homo sapiens
ctctagcaggatctcttacacgggagcagatgttgcagggttctgtgagcaagattgcacactgcactccagcctgggtgacagagcaagtctcctgctcagctccccagtagctgggattacaggcatgccgcacacacccggctactgtttttgtatttttaatagagatggatttttgccatgttggccagggtggggataccaggggg

SEQ ID NO: 695030 - DNA, 125 bp, Homo sapiens
tatttattaattatctattaataatattaatatatattaatatatttttatataatatataatataaaatatataataaataagtagcctagtaataaaagaataccagcctgggtagtcacaga

SEQ ID NO: 695031 - DNA, 492 bp, Homo sapiens
gcgtttatgtctattaataggagaacgaccatgggcgcgctatcgcacctgcgggtactggatttgtcgcgagtgctggctgtggcccttgggcccgggcagatactggctggacctcggcgctgaagtgatcaaggttgagcggcccggcaatggcgacgacacccgtgcctgggggccgcccttccttaaggatgcctatggtgagaacaccactagaggcggcgtattacctatcggccaatcgtaacaaggagtcggtgacgatcgacttcacacggccggaggatcagaaactggtgcgtgacttggcggcgaagtccgacattactgatcgagaacttcaaggttgggggctatgagcaggcctaacgggctgaactatgagtcgctcaaggagatcaatccggagtaagatctactgtactattaccgggtacggtcagactgggccctatgcgacaagggcgagctacgaattcatgatccagg

SEQ ID NO: 695032 - DNA, 541 bp, Homo sapiens
  misc_feature (166)..(166): n is a, c, g, or t
  misc_feature (214)..(214): n is a, c, g, or t
aatggtgccaggtggattattcggctgcggaagggctggccctcccgttgctgggagatctcattttggccatgctgggggcacagtttcatggttggggagaagatctgtggggctgtggtgtctgtcccctttcaggaagacattatttcaatatggaataagnctgccagtgaccaagcaaccacagcccgaatccgggacacacttcggngagtgcttaacctacctcccaaccccattatggaatacaaaactccccccgccagcatcaaaatgccaggcaggttgggcccccaaaggctcctttttcaaaacctttggaagccgcggttgaatgtgccatgaccctctccctttttggatggccccatcattgaagctggggtcatcggagtttcttgttttgttggcgtgcaacctggaaaatccttctgtcctggccaaaaggaattggaagagcattttttgttttaagaacaggctgccccccagcagctccaccaacagctgagatcccttaataaatggtgttaaacta

SEQ ID NO: 695033 - DNA, 1268 bp, Homo sapiens
  misc_feature (953)..(953): n is a, c, g, or t
  misc_feature (961)..(961): n is a, c, g, or t
  misc_feature (1010)..(1010): n is a, c, g, or t
  misc_feature (1016)..(1016): n is a, c, g, or t
  misc_feature (1018)..(1018): n is a, c, g, or t
  misc_feature (1055)..(1055): n is a, c, g, or t
  misc_feature (1077)..(1077): n is a, c, g, or t
  misc_feature (1102)..(1102): n is a, c, g, or t
  misc_feature (1104)..(1104): n is a, c, g, or t
  misc_feature (1106)..(1106): n is a, c, g, or t
  misc_feature (1131)..(1131): n is a, c, g, or t
  misc_feature (1149)..(1149): n is a, c, g, or t
  misc_feature (1153)..(1153): n is a, c, g, or t
  misc_feature (1161)..(1161): n is a, c, g, or t
  misc_feature (1169)..(1169): n is a, c, g, or t
  misc_feature (1173)..(1173): n is a, c, g, or t
  misc_feature (1177)..(1177): n is a, c, g, or t
  misc_feature (1182)..(1182): n is a, c, g, or t
  misc_feature (1184)..(1185): n is a, c, g, or t
  misc_feature (1187)..(1187): n is a, c, g, or t
  misc_feature (1190)..(1190): n is a, c, g, or t
  misc_feature (1192)..(1192): n is a, c, g, or t
  misc_feature (1194)..(1194): n is a, c, g, or t
  misc_feature (1198)..(1198): n is a, c, g, or t
  misc_feature (1201)..(1201): n is a, c, g, or t
  misc_feature (1204)..(1204): n is a, c, g, or t
  misc_feature (1255)..(1257): n is a, c, g, or t
tttctttctttcagacacgacggaagaaaaagagaagagaggacagcggggagagagggacagagacgtgtgatttctgatgtgtgtttttcatgtggtcgtgttattctctgctcttcattttgtggcctttcgtttatgcagtctccctctctgtgttcaatcggctctattttctagtttctacttattctttgcacatgttatgtgctctgtccttcctggtcctcggtgatatcttttcgagcgcgtgtgttatgcatgggcgtggattcttttcttatttcggtcctgtgctcacatttccagatggtgtgtgccctgttcgtggtttacccagttggcaaggccttcctagagattttctaagtgttcttggaattgttttataccctggtacccacctgtcgttaaaagcccatgtgatcaggatgctgtttctgccttagctttgtgtgagaaccctgtcaccttgctcctaggctcaatgacgtcgtagctcggtgcaatattgaccttagttcttatagcatactatgcatccctgaacatgctatcatagtccattgtagcaatgattgccttcgatttctctttctcaattctgtgtgctgctgtgtgtaagactgccaattaagtacactggtttcattccatgtaacgcattaaacagtgtatcgtaggtttcaagagattgtgatgattcttaaattcttgaactaccttcacttaatacgcttgaaactgtcgccttaactatgttaagcatctagactaaaagccaacaatcataattattgctgcctttctaaaacaccctaaatgtagttctctattaacctgaaatgtacactagcccagaacagtttaatggtacttactgagctatagcatagctgcttagttgtttttgagattttttagtcaacacataatggaaacttctttcttcnaaaagttnccagtgccacttttagaagtgaatcactatatgtgatgtaaaagttatnacactnancaggataaacttttgactccccttttgttcattgtgngattaagtggtatatacttaantttggcatttgactcttaagattangnancctagctactttggatggtcttagnatatttttctgatactgntccntttcctgnctcctccntgcnaacnaaatnanngntgncncnttanccngantttttttcttctgtcttgacaccgtctactctaagtacatattacctagtnnncccccctccca

SEQ ID NO: 695034 - DNA, 243 bp, Homo sapiens
cggcatgcggactgtaggagggagcatggatacaaactgagtgctgaattcgggcggtaacgggggtagctcatcagctgcgttgaagtcttctgacggtggaggaaaatcactctcgatgtcgaagcctacagggtaatagtccgtatcgacggcgtttgcatatgctgagtacaggggtgtctgctcatcaatcacctcatagctggtgaactcttgtatgcccgtgagaggaacgctagg

SEQ ID NO: 695035 - DNA, 1270 bp, Homo sapiens
  misc_feature (953)..(953): n is a, c, g, or t
  misc_feature (961)..(961): n is a, c, g, or t
  misc_feature (1010)..(1010): n is a, c, g, or t
  misc_feature (1016)..(1016): n is a, c, g, or t
  misc_feature (1018)..(1018): n is a, c, g, or t
  misc_feature (1055)..(1055): n is a, c, g, or t
  misc_feature (1077)..(1077): n is a, c, g, or t
  misc_feature (1102)..(1102): n is a, c, g, or t
  misc_feature (1104)..(1104): n is a, c, g, or t
  misc_feature (1106)..(1106): n is a, c, g, or t
  misc_feature (1131)..(1131): n is a, c, g, or t
  misc_feature (1149)..(1149): n is a, c, g, or t
  misc_feature (1153)..(1153): n is a, c, g, or t
  misc_feature (1161)..(1161): n is a, c, g, or t
  misc_feature (1169)..(1169): n is a, c, g, or t
  misc_feature (1173)..(1173): n is a, c, g, or t
  misc_feature (1177)..(1177): n is a, c, g, or t
  misc_feature (1182)..(1182): n is a, c, g, or t
  misc_feature (1184)..(1185): n is a, c, g, or t
  misc_feature (1187)..(1187): n is a, c, g, or t
  misc_feature (1190)..(1190): n is a, c, g, or t
  misc_feature (1192)..(1192): n is a, c, g, or t
  misc_feature (1194)..(1194): n is a, c, g, or t
  misc_feature (1198)..(1198): n is a, c, g, or t
  misc_feature (1201)..(1201): n is a, c, g, or t
  misc_feature (1204)..(1204): n is a, c, g, or t
tttctttctttcagacacgacggaagaaaaagagaagagaggacagcggggagagagggacagagacgtgtgatttctgatgtgtgtttttcatgtggtcgtgttattctctgctcttcattttgtggcctttcgtttatgcagtctccctctctgtgttcaatcggctctattttctagtttctacttattctttgcacatgttatgtgctctgtccttcctggtcctcggtgatatcttttcgagcgcgtgtgttatgcatgggcgtggattcttttcttatttcggtcctgtgctcacatttccagatggtgtgtgccctgttcgtggtttacccagttggcaaggccttcctagagattttctaagtgttcttggaattgttttataccctggtacccacctgtcgttaaaagcccatgtgatcaggatgctgtttctgccttagctttgtgtgagaaccctgtcaccttgctcctaggctcaatgacgtcgtagctcggtgcaatattgaccttagttcttatagcatactatgcatccctgaacatgctatcatagtccattgtagcaatgattgccttcgatttctctttctcaattctgtgtgctgctgtgtgtaagactgccaattaagtacactggtttcattccatgtaacgcattaaacagtgtatcgtaggtttcaagagattgtgatgattcttaaattcttgaactaccttcacttaatacgcttgaaactgtcgccttaactatgttaagcatctagactaaaagccaacaatcataattattgctgcctttctaaaacaccctaaatgtagttctctattaacctgaaatgtacactagcccagaacagtttaatggtacttactgagctatagcatagctgcttagttgtttttgagattttttagtcaacacataatggaaacttctttcttcnaaaagttnccagtgccacttttagaagtgaatcactatatgtgatgtaaaagttatnacactnancaggataaacttttgactccccttttgttcattgtgngattaagtggtatatacttaantttggcatttgactcttaagattangnancctagctactttggatggtcttagnatatttttctgatactgntccntttcctgnctcctccntgcnaacnaaatnanngntgncncnttanccngantttttttcttcttttgggttaaggccaatcctaataaaaaaggaataaaaaaggtcccttttagct

SEQ ID NO: 695036 - DNA, 387 bp, Homo sapiens
  misc_feature (23)..(23): n is a, c, g, or t
tgagctctcacatggcaccactnttgactcttctgcttccctcttctacactgaaaacttatggccaggagcagtggctcgcacctgcaattcccagcactttgggaggccgaggaaggcagatcgcttggccccaggagttcaaaaccgtcctgggcaacgtggcgaaaccccatctagaaagaaaagaagagaaggggaggggggaggggaggaggagttacatatatacacatacacacacacacacacgtacgtacatacatacatacacgctagctggacgtggtggtgcgtgcctgtagtcttagctttccaggagactgaggtgggaggaccacttgagcctgagatcgcgccagcctgggtgacagtcagaccatgtct

SEQ ID NO: 695037 - DNA, 202 bp, Homo sapiens
cccctttaatacagtatcgtaaaattgaattttatagtaagcaagcgcgtctaattaatgcaaagccgcttaatcgcgaagggcgtattatgctatatgcctcgataagccaatgcgcaagtttaagagaaaatccctctgcaaacagccgccacgatctgaccttaattatccgcggatacacgacctcgtcataaatgat

SEQ ID NO: 695038 - DNA, 298 bp, Homo sapiens
  misc_feature (183)..(183): n is a, c, g, or t
gcaaggtgaaggagcaagagctcacatagaagctgcagcaagttatccagagatctagctaagatcactggtaaaggcggctgcactcaacaagagattttcaatgtagatgaaaaagctttgtattggaagaagatgccatgtaggactttcatagctagagaggagaagtcaatgcctggnttcaaaacttcaaagaacaggctgactctcttgttaggggctaatgcagctggtgaccacaagtttgaagccattttgtcattctgaaagtcctaggaccctttaagattttatg

SEQ ID NO: 695039 - DNA, 1530 bp, Homo sapiens
cgcttggctgcgcccccccccacttgttggtggtggtggcgtatggtgggtccgtcgcgggctgtgtttgttgctaggctggttgttttttcttgttgtcgttgggcttcccacgcgctgtcggtggggtctgcactcctatgttcgtgtttgttgggttgtcgtcccgtcccctcgctcgtcttggtgcgtcttctggcttgtgttgtcgtcggtgtggggcgtacccgttctcgccccccaccgtcgtggcggtgagcgtacgtcgttttgggtgggggggttggcggtggcacgtctgcccctcggtctggcgtgtaggtggtgtagtatagtagatggccgcctaccgcgtgtcgcatcttgttttgcgtccacttcgtcggggttcggtcgcgcgtctgttcaccctcctctttagtgtttggttcactacgtctacgtctggtgttgtggtggtcatcatcatcaccagctctcctccactctgcgggggtggtgttctcttaagtatcttcctccagctcgtgttgttgtcacctcttcgttgttttattatgcgtgttgttcccctccgcctcggggaggagagccgcttcgtggtcttgttgtttgatcttgttgtcgtttcctcgcgtcttgtctattagtcgttcttattggtgtcttctttcgcccccgcttgtggtgttccacacatctcttcgcgccccactccgcccccgtgttgttgagttcttccttctgtcgtggtacgactccacccacctcactcgctcgtctccacactactcctcactcaccacccacagcgtgtggttagaccgcgtggtgtgtgttagttttgtctgtagtacacatcataaatggagataacaacatcatcacctcgtttcccacagtctatgttagtattatatagaataagaggagcaatatatatattctcttgtgtatacattgtggtgcgcattatgcacatcagatcgccaatagtgcgttttgttagtatacgatgttctcgtgtgtgggtttagctcaacacagattggatatcgcctgggtgggcagttcacacagagattgatatagagacacctcatgggagcacacagattgtggacccacaagacactcgttagtgtatagacaccacgtgtgtgtgttcccacaagagtgagagaggattccaccctgtggtggtgattaccgccttgtgggtagaaaggcgggtcctgatccctcgcttgttgtgccacccacacacgatgtgtgtcgtttttgttggtggtaaaataatattataatgccttggtgttattatcccttaaaggataaaataaataagaaagttaaaacttcgtaggcagttaaacgctcgggggcgtagtatatagtatgatgggtggcccgtgggtgaatggtgtctggtgtgtgttggtgattagggtgaggtgatggttgatggttatagatggtaattgttgcagggagtgagatgtgatgagggtggatgtggtagtgttggtg

SEQ ID NO: 695040 - DNA, 116 bp, Homo sapiens
  misc_feature (75)..(76): n is a, c, g, or t
ggggccgcctactactactactactgctcgaattcaagcttctaacgatgtacggggacatggtacgtattctcnngcacagtctgagcaattaaatagattcataagcaaaaaaa

SEQ ID NO: 695041 - DNA, 498 bp, Homo sapiens
  misc_feature (246)..(246): n is a, c, g, or t
tgtatgagaagaaaaagacctctttaaagcaacgtaaggaacgcaagaacagaatgaaggaagtcagggggactgcaaaggccaatgttggtgctggcaaaaagccgaaggagtaaaggggctgcaatgatgttagctggggccacttgggatttttcgcaagaacattaataaactaaaaactccatgtgaaaaaaaaaaaataccagactacatatattctaaacaaaaaaaaattaaaaaaancaatttcagggactttaacctgtgaacatcccagcggcaggacacggggggtcctgtttattcctcaggaatactgaattgccctggtttaagctgccatctttttgtacaatgttatcaacaatgctctaaactccagcccctggatatgcattttgcccccttttaacctcttcgtttttaaacccctggggaatacccatctttggccccttgaaaaaaacccccctttcccgcaccgggtgatattaa

SEQ ID NO: 695042 - DNA, 667 bp, Homo sapiens
tcaggtggcctggtcataggcgactggcaaggccccctgtcgagacatctgctgttctctcatccgcatggagagaggccctcggctcacgtgttctccgacggagtgcatgggagcgcgagcggctggcactgccccgcagcacgacccacggcctcgcaagccgggatcggcaatcgcgccgctggagcccaggccgacggacaaaagcctgacacggccggacacccacctagccccacgctgcaccgaccgccacgcacccccttctcccaccctcaggccacggactcccacccctgcaatcccgccctcgcgcccgccggcccccctggacaccagactgaccccggcagcggagctgacaaccaggtcccgtccaccacaacaataatacttcccccccaacttcaccatttcccttctgcacagatgcccactacccaactacggccgcaaaaccggtcctatcgtgacatttctccctcagcacaacaattccattattgacgacagtcttgacgaccctgtcattacagctcctcaccatctggtcaagcgccaacaccattacaacactacacatacctgacgcaaatcgatcctactcacactgcccaccaacaagaaaccatgacacctcactgcccacaccctacatcgccgc

SEQ ID NO: 695043 - DNA, 597 bp, Homo sapiens
cgggttcaggcgattctcctgcctcagcctccggagtagctgggattgcaggtgtgcgccaccacgcctggctgatttttgtatttttcgtggagaccgagtttcaccatgttggccaggctggtctcgaactcctgacctcaggtgatcctcccgcctcggcctcccaaagtgttgggattacgggcgtgagccactgcgcccggcgtaattttgtttttagtagagatggggtttcatcatgttggccaggctggtcttgaactcctgacctcaggtgatccatcttcctcagcctcccaaagtgctgggattacaggcgtgagccgccacgtccggctaacaagtacttttttatttttattttattttttggatggagtctcactctgtcgcccaggctggaacacagtgagctgacatcgtgccactgcactctagtctgggtgacagagcaagactccatctcaaaaaaaaaacaaaaggaaattttggtaaacctaggtggtttttaaccaacagaaatcagttccagtttgggaggctggaaaccccaagttgaaagccccggttagattgcaacctctttggtaaggg

SEQ ID NO: 695044 - DNA, 245 bp, Homo sapiens
gtagtattctcactgaggctggggttatggtgtcgtcaggtagagtgtggtttcagtgtcgcctgggctgctgtggaaggttgtagattgttgaccaagggatgaggctgtggtactgccaggggacaatgttgtgtctgtggggcctgggctgctgtgggaagctgtagattcctgactgaggcctggcatggtggtactgccggggaatgctgttgtgtgtgttgagccgtcgtaggcagtga

SEQ ID NO: 695045 - DNA, 127 bp, Homo sapiens
tctgggggtttctgcccaccagtaagagcagagaaagggtcggagcatggaaataagggattggggtgcagacataagaggttggggcatggaagtaagggattggggcacagagataacaggttgg

SEQ ID NO: 695046 - DNA, 871 bp, Homo sapiens
cattgaatttggaagatttctgaactacgataggaaatattaataagaagaattaggacacgcttcagataagtgtacaaactacgctttagaacatcttcttagaaagagatgactacaaacaaacaggagacaatttataccagcatgtacgctcagaagatcataaatctgactaatgtagaagtgaaaaatacttaatcttttaagacatgaacgcgtgattcgaaaatggaggtcccatatccaagaactttcttgtatgtttcacgagtgaacagagcttagaaaccaagattgccaagtggaaacctgccaatcagggaatgaatatagacatgatggctatagtgatgaaagaagcacgttggcaatagaacatctgtagctttaaccatacacaggacctcttaaggtttacagaacaaaggcttgaccattttacaggagctatttgaaaagcttacttcccaaatgagagatcaggaagccaagttgtctgaaacaatttcagcttcctgagtgcctgataagtcattatgagacaattgtatagataaaagcgaattggaagtactgattgaaacaatgagaaagcagtcattaatcttttggacgatcctgaagaggatgggccgatcgtggggaaaaaattctggtgaagaaattgcttgaaaagttcactcagtgattgaaatgagactctgaatcttgggaattcgcgattaagactacacttgcttggttgaaggtggagtggtccgcgggaataactcccgatgccgagtgaaaaagaaccttgagtgttaccggtccatgcaagcgttaataacgctcatgcttcaagcctaaccaaaaaaaaatgggcccc

SEQ ID NO: 695047 - DNA, 765 bp, Homo sapiens
aggaggtggcgctcgcagccgccgtctcagtccccgtcgccgccggctgccaagacccaggtaggaggcggcgcatgcccggtgcgctcgtggctccgcgctgccggcgccccgccaccccgacgcagcgccccgatccggcgcctcccgtcctcacgcccctctcccagtcttctgcatcccctctacctctgcccacaagacggcgcgtccctctcctggtgcccctctccacagactccgcgttgccctcccggtgccctctccccgagccactctcccgagcaaactgggtaacaagcgggcgagagaagagagcaaccagaccagaaaaaaatagagaaaaaagaaaaacaaaaggaaaacagaaagagacaccaaaggaagaggaggcaaagcgacaaaaaacacaacaaaaaagaaaaagacaacacaacacagaaaaaaaaaaaaaaacaaaaaaacaaacagaacagcgccccaacaagaaaaacaaagaagagaagaaaaaaaccacaggagagaagaacaaagaaaaaaacgagaaaaaaaaagcaaaacaaccgcacagcaggaaaaaacaaaaccagaaaggaacaaaaaaaaaacaaaaaaaaaaaccagggacaaagaaaaccaaaacgactaagaaaacaacgcagaagaagagagcaaagatccacaaagagggagagaaacacaaaaaggaaaaacaaaacaaaaacaaatcaaacagagaaaaggacgaccatagaaggcagcagc

SEQ ID NO: 695048 - DNA, 279 bp, Homo sapiens
accctcgttgataatctcacatgttggaggaaagttgaagagacgatgtgaactatggtgtagccatgggcatccaagaatgagatatgtatgttaggttgcatgtcaatgacagtgaagtccacgtagagttgaactcccgcaacctttaccttgagggtaatggtacccatgatctccctcttagagttgtcaaagcctttgacaaagaggtcggatggagtgatcatgtcgcgagtcactccaatgcgtacagcggtacgcataacaccacacaat

SEQ ID NO: 695049 - DNA, 227 bp, Homo sapiens
tgagtttcttcagcaaagcctaaaaaggaacaatagtaagcacaatcataacacataaaccacgttaggtcaaggtgtagcttatgggtggaaagaaatgggctacattttctacataagaatacccaccatacgaaagttttatgaaactaaaaaccataggaggatttcgcagtaaatcaagattagagtgcttgattgtataaggccatgaagcacgcacacac

SEQ ID NO: 695050 - DNA, 1224 bp, Homo sapiens
  misc_feature (69)..(69): n is a, c, g, or t
agcgcgctctgagctgcccccagtgtccctcccccgccgccagcagcccatttggagggaggaagtaangggaagaggagaggaaggggagcctggaccgactacccagacagagccggtgaatgtgtgtttgtgtgtgaccctctgaccacgaaatattataaaaatcaaaggtcgagaacaagatcagtgcgcatcacaaccgggcacgcatacgaacgagagcacacatgcaacctggaacagagcaacaacagaacaaaacaggcctaccacgcgcccccacgaaccaacggcccaaccaagcgacacaagaaaaggccaccaccaagagaaacacaaaaaagagaaacaagagagcacacacaaagaaagaataacctaaacgaccaaagacacacaaccagcaaagaacaaacaaacaaacagaaggaagaaagaaaggacaaacgaacaacaccagagagacgaaccaaacacaacacagaacacaaaacacaaaacagacaaacaaccaaaaccgaaaacgagacagcaacgagaaaaaaaaaaacaagaacacacacaaacagaaaaaaacaagaaacgaacccaaacaaaaacgcacacagacaagacaccaccaaaaggaaccagcaaaaacacagaaaacaccaacaacaggacaaacagcaaaactaacaagacctacgacaaccaagcccatagagagacagacaacaaaatcacaacctaacaggccaagacactagacaaacagaatagtgagaaaacagaaacaccaaaaagacaacaaaaaacactcagcgcagcaacaggggaacaacccagacacaacaaaacacaagcgacccgcaacccaagcgacaacaccaagcgaaaacaggcacccacacatcgacacaggaaagcgagacaaaataggagaacgacaacacacggagaacaaggaacaacacacagacagaacagaacgcaggaaaacagcagacaaaacaaaacaaccacaagaacaacaagaaagagacagagaggaggagaaacagaaagagaacaagcggaaacaaagaaaaaaaaaaagagaagaaaagcacaaaaaaagcaaaaagcgctaacaagcgcaaagaaagaaaagaggagaagagaaagagagacgaaccaacaagaagacaacaaaaagaaagaagagaagacagccaccgaagagaggagaagcgagacaag

SEQ ID NO: 695051 - DNA, 246 bp, Homo sapiens
acccagcctttatcacacagcgaatttgcgcaatgactatcaacatgagttttgagattgggcatatgcctttatcctgtctgctataattacataattacttttactgctgttctttctttttgtgggcactgcacgtatcctgtagggtcacttactgtcagcctgaagaactttctttagtatgtcttgtaagacaagttggctaggaacaaattgtctcagtttttcttttgaaggagaaat

SEQ ID NO: 695052 - DNA, 243 bp, Homo sapiens
ggggggggggtttttcccttttttccggggggggggggtctttaacccattccccttgaaggggtttcccaagctaggggggggggtgggtccccggggtggttgggggttcctcgcccccccaatttactccccaatttaaacccggggggggggggcaaccccccaccgggtttcccttttttttcgggggattggggggttttccagggggtttttttttttagggggggattttcccca

SEQ ID NO: 695053 - DNA, 682 bp, Homo sapiens
gcagccaccagcagccagccccctccgatacacctcccgtcctctcctacagacctgcacccctcccccagattagaacgacacactcctacgcaggacggaggacagcccatcattagctcccgaaatcacacctacatcgaacgagccgcctactcatcgaacaacagcagagacagacagaaggccagaaatgacacacagcaaaccccaaaaaatccccacggagcagctacgggcacagcacactcacgactaggagaccacaccacaagaacgacgcaacaatagcacaactgcatcaagacccaaacagaggggctggaaacccaagaacaatccacaaacaaaaaagaccagaaagccgcaacaaaaagggcaccagcgcaacgctgatacaaccagcaacacactgaagcacagaacaaacaagcaaccagaatacacaaaccacacgcgatatgacaccagcaacccagcaccccacaacaaagcccagaacagcaaaagcccgcaagaacgcaacaagcacgcacacaacgcaaaacagcgcaacgcgccacgggacacacacaagccaaaccacccgaccagcagccacacagaagacacaagcaccctcaccacacaaatagcagagagaccaaaaaacacatacacaacccggaacaacaccacaaca

SEQ ID NO: 695054 - DNA, 126 bp, Homo sapiens
gctcccatgatgagatggatttgatgctgaggtggctatttgaaaatcatgatgagaaggatccagagttaatgctagtaagactgctgacaaaaagctcaagcttgggaaggaagatgacagttc

SEQ ID NO: 695055 - DNA, 624 bp, Homo sapiens
  misc_feature (2)..(2): n is a, c, g, or t
  misc_feature (85)..(85): n is a, c, g, or t
  misc_feature (95)..(95): n is a, c, g, or t
  misc_feature (98)..(98): n is a, c, g, or t
  misc_feature (100)..(100): n is a, c, g, or t
  misc_feature (102)..(102): n is a, c, g, or t
  misc_feature (105)..(105): n is a, c, g, or t
  misc_feature (108)..(109): n is a, c, g, or t
  misc_feature (111)..(112): n is a, c, g, or t
  misc_feature (121)..(121): n is a, c, g, or t
  misc_feature (125)..(125): n is a, c, g, or t
  misc_feature (142)..(142): n is a, c, g, or t
  misc_feature (165)..(165): n is a, c, g, or t
  misc_feature (186)..(186): n is a, c, g, or t
  misc_feature (254)..(254): n is a, c, g, or t
  misc_feature (262)..(262): n is a, c, g, or t
  misc_feature (283)..(283): n is a, c, g, or t
  misc_feature (319)..(319): n is a, c, g, or t
  misc_feature (322)..(322): n is a, c, g, or t
  misc_feature (337)..(337): n is a, c, g, or t
  misc_feature (345)..(345): n is a, c, g, or t
  misc_feature (355)..(355): n is a, c, g, or t
  misc_feature (372)..(372): n is a, c, g, or t
  misc_feature (403)..(403): n is a, c, g, or t
  misc_feature (407)..(407): n is a, c, g, or t
  misc_feature (412)..(412): n is a, c, g, or t
  misc_feature (440)..(440): n is a, c, g, or t
  misc_feature (447)..(447): n is a, c, g, or t
  misc_feature (463)..(463): n is a, c, g, or t
  misc_feature (471)..(471): n is a, c, g, or t
  misc_feature (489)..(489): n is a, c, g, or t
  misc_feature (500)..(500): n is a, c, g, or t
  misc_feature (503)..(503): n is a, c, g, or t
  misc_feature (518)..(518): n is a, c, g, or t
  misc_feature (520)..(520): n is a, c, g, or t
  misc_feature (522)..(522): n is a, c, g, or t
  misc_feature (525)..(525): n is a, c, g, or t
  misc_feature (531)..(531): n is a, c, g, or t
  misc_feature (544)..(544): n is a, c, g, or t
  misc_feature (547)..(547): n is a, c, g, or t
  misc_feature (550)..(550): n is a, c, g, or t
  misc_feature (553)..(553): n is a, c, g, or t
  misc_feature (573)..(573): n is a, c, g, or t
cnccacccccccagccccctgcaggcagaaaggaatcaggtgctcctgggctattgaatcactttaggcttctctggactgtagntaattttttntantntnttnttnntnntgcgtgtantacntgtttgatactttttanttttaggctgcgagggtgcgccnttttgaattggcttctctttncgcttttgctgctgcgacggtttaatttacttattttatagctgctacgcgcgagagagcgacgcgcngccgcctngcgcgcaaatgctttttgcanttttgcagcgcagcaagcaaataatttttttgcganatngcgcggcgcagctantgcgcacngcagtaattnggttgtttgcaaagcgngcagcatgcaggcattggcaaattgcgcatnaatngcatnggcaccctttattagcgcaaatgcattngctctgnttatgcgtgcgctcgncatgcagncgcttttttcgcaattangctgcgctttntgngcagcgcgcttttantntntgnttaatnggcattttaaagngcntgngcntttcatttgcaagcacatgncattgggcattttgcttgctaatgcaagcacctgcattttatgcgcctcag

SEQ ID NO: 695056 - DNA, 563 bp, Homo sapiens
  misc_feature (6)..(6): n is a, c, g, or t
  misc_feature (15)..(15): n is a, c, g, or t
  misc_feature (563)..(563): n is a, c, g, or t
tttttnatgttaaantatttttttagggtaaaacccctaagggtttattactaaaaccaataaaaatttcccatttataccgatttgcttttcaaaaaggggtttacttatttattcagggaacatttcctgaatatttaccaaccaagcctttagtcaacatctgctgcattataaatgtccctaaagggtttcccaaaacagacttgataattaattggaaaatgatactggaagttatggggattaggtgcaaagttttattaccttatacagccgtgtttatgattaccataaaacatacaaaaatgtttttatattaatataatactaaagaagttcaatgcttggaactattttaatgggcttctgacttaaagaaaatttacttaggtacaataacaaagttgtaattggaatcataggttactaaaatagaaaataaacttcatagggtacgatttatattaagcccacataattcattctaaaggacaggcttgggggttacatttagccctatatggctctttatgagttctttggaaagcatatatgaaagn

SEQ ID NO: 695057 - DNA, 127 bp, Homo sapiens
tgtggccctatgggcgttcttacattttgaatgaatgtgttatgagtacttgggactccactgaaaaaaattagaagaggccaagagagtaggatgaagggcctctccatacagggggaatagactg

SEQ ID NO: 695058 - DNA, 820 bp, Homo sapiens
  misc_feature (218)..(218): n is a, c, g, or t
tgtcacagaagtccttgtgatactccagccataatatacatcgagcttctgggattgtgcttgccatatatgcatcaagctctgaacaaaggaagtatcgaagatgcagggctataatcatcatggtatagtttgcatgccatgcacatacatacgttcatcgaaaatctgtcattgttactaggtagccaattatgatctatttgaaacgcgtgacnattaaaaatatcttggcatgatctagtacgtgatatcaataaagaaacatccaatctaagtaaatcttagtcaaagcattgatgtagtctaggtagcatcaacacgaagcgctatatttgctaacatactctttttggcactctctgcagtttcttctctgctactcaaggccccatctcaaagtatccacctctattaccaacttgctcctactaccaagtcagtttacgctgttcctagaaatctatcattttatcaaatctacatgctctcttattgaatagcatatttttaattccacctcgcagttgagatagccctgcataaaaactatgcacttggaaacacaataatagtattaactaactagatctattgaatttcagagaagagccttctaacttgtttacacaagaaacgagtatgatttagcattcatactagttgaaattttaatagaatcaaggcacaaaaagtcttaaaaccatgtggaaaaattaggtacttattgcagatttgatgtctctcaatcccatgtattgcgcttatgttacaagttgttgtcacagtttgagatttaatttctcctaattctttgccc

SEQ ID NO: 695059 - DNA, 164 bp, Homo sapiens
  misc_feature (136)..(136): n is a, c, g, or t
agagaaaaaaaaaaaaaaaaaaaaaaaaaaaaaaaaaaaaaaaaaaaaaaaaaaaaaaaaaaaactaataaatcctatcgatcccgttgaccttgatgttgaccaggtaatcccggaaattcccgtccgggccttncaggctttccaattttccgtatagtgag

SEQ ID NO: 695060 - DNA, 309 bp, Homo sapiens
tggagagttcttcaagataatatgaaaaatagaactaccatatgatccagcaaccccactgctaggtatataccaaaagaaaggaaatcaggccaggtgtgatggctcatgcctgaggcctgaggtcaggaattcgatatcagcctgggcaacatggttacaccctgtctctaataaaatacaaaaattagctgggtgtggcggcgggcacctgtcctcccagctattctcagaaggctgaggcaggagaatcacttgaacccgggaggcagaggttgcggtgaactgagatcatgccattgcattgtt

SEQ ID NO: 695061 - DNA, 191 bp, Homo sapiens
aggctcatatactactatcatactaccaagctctggagtcaagacctgtgaactatactatattcacctgctgtctgtgatgtaataaaaccagagataactcttttcaatgactaatatttattatagaattactcaatatagcaaagaagtatccaacataaaagtattggtaggtatgatgaaggacg

SEQ ID NO: 695062 - DNA, 218 bp, Homo sapiens
ctgttctagaggatcccgagaggtgggacatgggctgtgtgtgtgtgggtcaggtgggctgttgggctgtgtgtcgggtcaggtgggctgtgggctgtgtgggtcgggagggctgtgggctgtgtgtgtgtcgggtcaggtgggctgctcagaggctgccatcattctgattgctaatagcatcaattggttttgcctgttactgaacttccttgttt

SEQ ID NO: 695063 - DNA, 431 bp, Homo sapiens
taactgggattacaagcatgtgccaccacatctggctaatttttgtatttttggcagacagtgtttcgccatgttgcccaggctggtctcaaactcctggcctcaagtgatctgcctgcctcggccttcctaaatgctgggattacaggcgtcagccactgcacccagcctaaattaacttttatcgtaggcatctagggaagtactatttatgtaccaaacttgggaaaattgagaaaacagtcactaattttttctattttgtggttcaaatcaggaacccagttgaaaaaggctggtttagagtaattggctggttgtcgtggctcacacctgtaatcccatcactttcgggggctgaggtgggaggactgcttgagctcaggagttcaagaccagcctgggtaacatggtgaaaccctgtctctacc

SEQ ID NO: 695064 - DNA, 115 bp, Homo sapiens
accttctagtcccctggggtggctgtaagtagctcctcatttcaaccttccttcttctcctgcagaatatatggattttagagaggcacaagaaggaactgatgtcatttattga

SEQ ID NO: 695065 - DNA, 252 bp, Homo sapiens
  misc_feature (24)..(24): n is a, c, g, or t
  misc_feature (58)..(58): n is a, c, g, or t
  misc_feature (197)..(197): n is a, c, g, or t
  misc_feature (212)..(212): n is a, c, g, or t
  misc_feature (251)..(251): n is a, c, g, or t
ggtccattcagttccccaagctanccactgccccatccccaggggatgtgcagcaatncctggagacatttctgcttgtcgcaactgtcagggggatgctattagtatttagtcggtagaggccagagatgctgctaaacatcctgcattgcacaggatagcccccaaacagcaaagaattattcaagctcacaatngttgacaagctttcnagggtgagaagccctgcattaaaagctggcgttgtttant

SEQ ID NO: 695066 - DNA, 135 bp, Homo sapiens
  misc_feature (3)..(4): n is a, c, g, or t
tannagactgaggcctggtcgggcacgtgaggcctgctttccacccagtgtaagtgaggaaatggcttccaagccatgcgacaccaaggtgaaccttgtgacatctggagtcgggcgggagtgatgacgtggtgg

SEQ ID NO: 695067 - DNA, 791 bp, Homo sapiens
gctgagaggctctactatgctatgaaaggtgctggcacagatgactccaccctggtccggattgtggtcactcgaagtgagattgaccttgtacaaataaaacagatgttcgctcagatgtatcagaagactctgggcacaatgattgcaggtgacacgagtggagattaccgaagacttcttctggctattgtgggccagtaggagggattttttttttttataattgaaaaaaaatttctattcatagcttatccttcaaagcaatgacctgcttgcagcaattttcaaacttcagctaaccgaaagagctttctggcagggaccgtatcaggggtaatggtggctgggttggcacttgttggttattggccttaattctaatttaattggggtctctacttacattcaaggtaaagccatttcacaaggatccggtaatatggcaaggttggtaaaccttcattcttactagttgcattctaatcaaggaggtcaacttggctttaaattcacagcaatctccgaaaaaaccacaacgacaaaacaaacaaaaccttgggggcggcggttgggctccggaaagcttttcaagccattccgggtggcgagcgggggcccagtagttactgacaacgggccacacacgcgtcccagaggacacccgggaccagcccggggccggtgttctcccaaataaaagggcgggggacccggcgtctttaaaacccggaggcccggaagccggggccttccccgggcccggggccataccgccccggcgccggcgg

SEQ ID NO: 695068 - DNA, 110 bp, Homo sapiens
taatgagctggtaccgattagctcgtagacgggcaggatgatcatttgagcaggagttaacggttacagtgagggtaataatgactgtgtggtgattgtagatattgggt

SEQ ID NO: 695069 - DNA, 481 bp, Homo sapiens
gcaagcaagagagaacatcgccatgtctcacttattgtgagatctaaaaatcaaaacaaatgaaatcatgggcagagagtagaaggaaggtaccagaggctgggaaggggtagtcagggttgggaatagttaatgggtaaaaaaaaattagaataagatctactattgattgcacaacagggtgactatagtcagtaataatagcatatttttaaataaagaacgtaaaaattagccaggtgtggtggcacacctgtagtcccagctacttgagaggctgagacatgagaatcgctagaacctgggaggtggaggttgcagtgagctgagactgcaccactgcactccagcctgggtgacagagcaagactccgtttaaaaaaataaataaaataaaaaataaaataaaagtgtaattggattgtttgtaacttagaggataaatgcttaaggggatggatatctcattctccataatgtg

SEQ ID NO: 695070 - DNA, 141 bp, Homo sapiens
tctcttgaggatccgcaacaccctgctatgtgggccgtcccctgctgctttgggggggcaggcagaaatggactccttttgtgtcccgatgtggggtccctcccagccctgcatctccgtgcctgtagcggggtgtttcct

SEQ ID NO: 695071 - DNA, 831 bp, Homo sapiens
  misc_feature (4)..(4): n is a, c, g, or t
  misc_feature (112)..(112): n is a, c, g, or t
  misc_feature (155)..(155): n is a, c, g, or t
  misc_feature (178)..(178): n is a, c, g, or t
  misc_feature (200)..(200): n is a, c, g, or t
  misc_feature (203)..(203): n is a, c, g, or t
  misc_feature (261)..(261): n is a, c, g, or t
  misc_feature (264)..(264): n is a, c, g, or t
  misc_feature (270)..(270): n is a, c, g, or t
  misc_feature (308)..(308): n is a, c, g, or t
  misc_feature (312)..(312): n is a, c, g, or t
  misc_feature (316)..(316): n is a, c, g, or t
  misc_feature (346)..(346): n is a, c, g, or t
  misc_feature (691)..(691): n is a, c, g, or t
agtnacgtactcttgcaattgcccgcaacctaactcagcagctccagaccacgtgctacaccctcctgtccaacatccaaggtgtaccacagaacatccaagatcaagccangcacatggggtgatggcaggcgacatctactcagtgttcccgnaatgctgcctcctttaaagaaanaaaaaaaaaaaaaaaaaaaacnagnaaggagcagctgcagaaaatgaaggaatctttagatgacgtgatggattctcttgttnacnacacanaaaaaaaatggctggtaggtccattttatcctcagctnactnagtntcagaatgctcaggaccaaggtgcagagantggacaagtagcagccaggagacccagtcgatctggagcataaaactcattaaagcctgcccctatcactagtgcatgctgtggccagacagatgacaccttttgttatgttgaaattaacttgctaggcaaccctaaattgggaagcaagtagctagtataaaggccctcaattgtagttgtttccagctgaattaagagctttaaagtttctggcattagcagatgatttctgttcacctggtaagaaaagaatgataggcttgtcagagcctatagccagaactcagaaaaaattcaaatgcacttatgttctcattctatggccattgtgttgcctctgtnactgtttgtattgaataaaaacatcttcatgtgggactggggtagaaatctcggtgtctgctctggtgtgatctgacaaggcgtcttcactgctttatctcatgatgcttgcttgtaatacttcctggagtttgtcattt

SEQ ID NO: 695072 - DNA, 299 bp, Homo sapiens
gcggatcacttgagttcaggagttcaagaccaacctgggcaacacagtgagaccccttctctacaaataaaaaaattagctggacgtggccaggcgcagtggcctgtaatcccaggactttgggaggttgaggtgtgagccactgcacccggctattgctggcaagattttaaaagaaatttacagtctttataaaatagtcaaaatgttatgttacaagaactattaacattctcaatgcacaggccctcaatattaacacatttagggttgaaatcttggccaataccaaaaactgc

SEQ ID NO: 695073 - DNA, 114 bp, Homo sapiens
gaactgggcagatctcgcgcgccgccctctatctggaccaggaccagtcggtgctgagccgccgcatcaacgcgctggaacgcgagtgcaacgcgcggctgttcaaccgcaccg

SEQ ID NO: 695074 - DNA, 209 bp, Homo sapiens
gcagtatcgtgtccttatggtctagactgtccgagatctcatggttgcattttggccacatagaatatcacgacatattcgatcttgcgtttttaagcattgaaattcatgtatgcttatatagtaaaaatgaaaacatttcaaccatctaagtcaaacacaaaaataataaaataagaaacataccagccttgggtccggggatcctc

SEQ ID NO: 695075 - DNA, 355 bp, Homo sapiens
agccccaaaaaaggggagggaagaaaaagctgccaaaaccagtagagatagcagagggcgctcccctagaaaaaacgctagtgaaaaagaagaagaagaaagattcccaatggatccttcccagccggggcctttcggcccctcagctgtcagggccctgcgggggcagacacctttggcctgaagtcccaacaaagttccccccagagggcctgggggcattttgtggcatgcccatggggtgccgagtcctgccctctcgccccctttccccccagttacattcccaggagggcccttttaatgttttccatcgtgggtttcagacccaaataaatttttttgttaactctga

SEQ ID NO: 695076 - DNA, 276 bp, Homo sapiens
ctacctatcactatcatcttgccttcattattgcagccctagcagcactccgagcgtccatattcttgcacagaaaacgggatcaaacaaccccctagagaatcacctcccattccgaataaaatcaccattccaccctatactacacaactcgaaagacgccctcagacttaacttctcttccgttctctccttgagtgacagttcacacgtattctcaccagcacctcctagagcgacccagtacacattataccctacgcctctagtattcag

SEQ ID NO: 695077 - DNA, 122 bp, Homo sapiens
tggccgtggtccaacttctgtaatggctctcagtgcagatggctactatgcccgttccgaggactacgtggacattgtgcaggcgcggcgtgttggtgtctggaatgtgccctatatttcaa

SEQ ID NO: 695078 - DNA, 190 bp, Homo sapiens
tatacatgatacaaccatagcattcaggaagaggtgaacagctgtctctcttcctgattattccaagtcagatatcacttaagaggtatttccacctttactgaattggatccaggaaataaagataagcatacatagatttttaactcttaatatattgagatgactgttctaccctgtctaattcaat

SEQ ID NO: 695079 - DNA, 432 bp, Homo sapiens
  misc_feature (83)..(83): n is a, c, g, or t
  misc_feature (127)..(127): n is a, c, g, or t
  misc_feature (395)..(395): n is a, c, g, or t
tggcagtacgtccacttgtacagcgcatgattcggcgcagtataccaggcggtacaactaggtaaaatgttaactatagcggntaaccgggctgaaactgggtggactacgcgctttagggcacagncacgcccactgcgcgtttacgcagggtgtatgccactggttagtggccctgtggcacgtcagcaggcaacatgtggctagtattgtaccaccagcacttggtgcgggcgggttgccgtggttgggcaacaatcctggtggtggccctgtgtaacgccactcgcggtggtgttgtgtactcccaagtaaaaaatactaggggtgggggcatttgggcctcccagtctagccacgcaacagccaaactgtgcgaaggtatttttagtcgnccccgggtttttgaacccccctcctcccacccaaccg

SEQ ID NO: 695080 - DNA, 166 bp, Homo sapiens
acaaaccacacaagtagcagtcatatcacaaacacggggacacatatgcctacacatgcacagacatgcatgctaacgccttccaatatggcagccaatggggctcttgctgtggtcagtgagaatgggttggtcggcatgacagattctgagagggtaccgcagc

SEQ ID NO: 695081 - DNA, 627 bp, Homo sapiens
gcttgaacttgggaagcggaggttgcagtgagctgagatgtgccattgcgctccagcctgggtgacagagcaagactctgtctcaggaaaaaataaaaaataaaaataaaaaattaaaaaaacagttgctaagagctgtgttagatgcttccaaggccacacaagggaacaccccagtcacctcttcgacttcatccctttccattccctctcatctctgcctcaattgcattggcctcccttttgatcttccagtaagacactgggtgcactcctgacccacagctctcacgctggccctggcctccccaggctgctctttctgctctgtgtgccttgtcccctcccccactcctttggtcaaatatcaccttctcagtgaggccttccctggagtccttcttaaagttgtaacactcctggctctggctatcacatccccttttcctgatgtatctcttttcctgatgtatctctttctctctctctctctttttttttttgtaaatagatgaggtcttgctacattgcccaggcgggctttgaacttgaactccgtgggctctagcgatgttcctgccttggcctcccaatgtgctgggattacagcaggagacaccaacccag

SEQ ID NO: 695082 - DNA, 358 bp, Homo sapiens
gctaatccacttagcccctagacctcttagccactagcctcttatcccctatcccccaactcattctctcctaaccccttagcccctagtccctaacctcttagcccctatctcccaactccttcgctcctaaccccttagcacaacggtctcttttcaccctctaggctttattaacgccccatcactgtactgtgagtctggccctgtggtctgcaatttttgcctgcagtaacagcggctccctaagccctagccactacagcctgcagcaacactggcctcgtccagaaacaacccttgacccctaatccactcagatgtccactcagatctacataagtgtcgaggggctaag

SEQ ID NO: 695083 - DNA, 734 bp, Homo sapiens
cacagtggctcatgcctgtaatcccaacactttaggaagccaagccggcagatcatttgaggtcaggagtttgagaccagcctggccaacatggtgaaaccctgtctctactaaaagtacaaaaaaattagccaaacgcggtggcacctgcctataatcccagctattcaggaggctgaggcaggagaattgcttgaacccaggaggaggaggttgcagtgagctgagatcacgccagtgcactccagcctgggtgacagagcaagactccatctcaaaagaaaatcaaatgaaatagaaagcagaaaaacaatagagagaaaaactggtcctttgagaagatcaaaaaaaaaaaaactcggtaacctaaatggatcaggaaaaagggcaaagggcacaatttaccatgggtcgggaatgaggaagatgacttcattacatattctacagattttaaaaggataagaggtcactattttgaaaacttttatgccagtaaattggatgacttaagtcaactgtgcaattcctttaaagggcacaaagtggtgaaaatcttatttaagaggagataaatagacaaaatagattatatctgctacagaaatggaatctgtcggtgcgacaactttcccacaaagaaaactccaggccaagaggcttcactaagggaattctgcaaatatttcaggagggatattccaaattctaaggaaggtcttccggaatggcga

SEQ ID NO: 695084 - DNA, 534 bp, Homo sapiens
  misc_feature (407)..(407): n is a, c, g, or t
aagaggacatcttcaaagacttctatgagcgggagcctcataagtaccagaataagaccatgggtatcacccctcggggcgggctggtgctgtgtaagccggggcgggcagaggtcatggctgagcgcatcggggaggacttcatctctgacctggaccagctgcgcaaacggctctccttgggggatgatgaagcttgcgattcgggatgtggccaaagtgaggcaggaaaacaagtggaagttggctgcctacctagagagggactacaaagtcgcacagtgaaccccaaatcactcttcgacatccaggtgacgcggattcacgaatagtaagcgacagtgcctcaagggcctccaggtcatcacccggtacagccgcatcaagagggagcccaataagtttantgtgcctcggacggtgatgatgggagggaaggctgcactcggggtaccacatgggcaagaggatcatcagagctcgtcacagccatcggggatgtggtcaagcatgacccgggagggggtgagccgc

SEQ ID NO: 695085 - DNA, 104 bp, Homo sapiens
agtctagaggatcgcaaatctctcattgcgaccgtactccccaggcggaatgctcaaagcgttagctgcgctactgagatgcaagcatcccaacagctggcatt

SEQ ID NO: 695086 - DNA, 206 bp, Homo sapiens
caggacactccctcttccagctcctggtgactccagtgcttccttggctctgcgagaagtttcacatgcgcttttcagctcttactatttggtctctaacaagaacacctgtcattgcatttagggcccatcttatgttcaggatgatcccacctcaagacccttaattacatctgaaaaaacactttttccaaataacctgtcag

SEQ ID NO: 695087 - DNA, 1053 bp, Homo sapiens
aattgaactaacaaaggctgcatttggctgctttggtaactggcttgcaacagtggaacagcggcaacgaaacaggaaactgagcttgaattgcaaactgaacactgctggactgtataataagagaaacacaagggctttacttcttaacacctaacacacttaacatgccacacgaagactgcattacagctctctgctttctgctaactgcagacaaaactctgaacagcccaccttggttacagctagcacacagactggttacttcaacagtactggactattaacagactgactctgacactatacaacaaacacgcctgctcgcgctgcgacctgctgactcttgctctgcgcctacgctcactcacacagtactcaagcaacctaacatgctctgtttctcccgaacgatggcttcctcctacctacgacagctctacgctcctctgagcgacaaataagctcacgacagtactgaggcattcctgctacccactgcgcgacaccttcacacactgcttacacttctctgcccaaccggagcttggcgaacaaattcaacggacaccctatcagcatctacgcgcgacgactcgaacgctattcaacacgctattcctacctctgagctgcctcactcgcacacccactgcgcactttcctattgcctcgctcgggacagttcctggcactgtcagccctgactcgcaacttggcgcacgctgccacactggcacacacacgtccacacactgctctacgcacgctcacctgcggaaacccccggagtcaccttaacgttccacgaaccaaagtacttcggaattcgcacaatccgtcgtccagcctcgtcttctccaatccttggggcgcttccccgcaaccgttctgactcgcggcccaacttctccaccgagcaccctcgccttgcaggcccctcaggagtcccacttggattatctcctctcccccgcaaggggcccaactacctcccccctccgcccgccccgcctcccccctgcggagccccctcggtctctgatcacc

SEQ ID NO: 695088 - DNA, 355 bp, Homo sapiens
cttttaagggcttctcagccttgcaccaaaagatccccctggaaattaggtgggaaaaaccttaacttttgtggggccttgtgtttgtcttaaaagttcatgcccatagccaggtgtggtggctcccacctgttatcctttcctggatcccttgagtcaaggagtttgagaccaacctgggcaatatagtgagaccccatttttacaaaaaataaaatattagccaggggtggttgtgggcatctgtagtcccagctactactgtggctgaggcgggaggagcccttgatcctgccctgagctctgatctccccagtgtattccagcctgggccccagagcaagaccgtgactca

SEQ ID NO: 695089 - DNA, 369 bp, Homo sapiens
tctgtcaggatcataaatctcaaacactatattttgtaccacagagcataatgtgtcagagaaagttgtgcttattcttggatagccgacatatgattgtgatgattgggatatggtacagagtctaatgattgcagcatggttgtatacagatccgagggggtatgagcaactgtatattctcagtttgtgcggagcagcattagatgataataaataggtcatattaaagtgggctgatgagagttgcaaaagagtacttctaatgtgcatatggaaccaaacaggagcccgtattgcctagacgatcctcagcccaaagaaccaagctggaggcatgatgctatctgagttcgaactatactacaa

SEQ ID NO: 695090 - DNA, 343 bp, Homo sapiens
ccatccttctcctggcaaccagaggaggcgtgagactcctgaagccagaggaccggaccagggcgtggtgggagccgtagacccgagtttttatccttctctggcccagcacccggctgcggaatcaagtttgagctcggtgtagctgaagtttaaattgtagctgtttcagaggtagacccccacctcacccccagcccctggaccaagacctctggaagcgtcctgccttgaagccgcttgtgggagggctctcctaggtctccagctcccgtgagcacgcctggagatgccttggagtctaggaaccccagattcagcacccctgcttaacctgctttta

SEQ ID NO: 695091 - DNA, 1080 bp, Homo sapiens
  misc_feature (613)..(613): n is a, c, g, or t
  misc_feature (671)..(671): n is a, c, g, or t
cgcgacgccagccagcccgtcgagcgcgccaaccctgagggcctctgctacggcctcgtgcggggacctggccttcgccgccaaggagagcctcgtggctgccgagtcggggcgcaagccctacactggcgaccggcgccaccccatcttctttaagcgcaagctggaccctgccgagcccttcgcaggcctcgcctccagtgccctcagtgtctttgagacggagccaggtggcggcggcatgcgctggtttgtggacacagctgagcgttatgcgctggctggccggccactggccgagctctgtgaccacaacgcaaaggtggctcgagagcttggccgcaaccaggtaggtaggtgctgagcctgggggtccctgggccacgacctcagggcaggggctggttcctccgtcagctgcgctcaccccacctcaagctccgcaatggactccagccagtcgcaccaacaggccttgccttggtagctgagggtgtcaggatcacacagggccagggctccagggtgggccagggctccagggtgggccagacccaggactgtcctctgaggggcgggggtctcgggagtcgtgtggctcaagctctctgtncttccccccttgcttctggagctctccaggcaccagcagcggtggagccgggagctgncattcccatgcccatctctagctgcccgcaagtcccactgcccattctgttttcctctgtgctgctgtagggcggggaccggggttttttgtctttcccatgagcctcagctttcctacctggggtgggcctggacattggtgtactgagggcagctgaatgctgagggctttgtgactgtcccaggcagagagggacctgcatggggtgctgggtgtccagggaacgcccagcaagtgaccagtgcccggccctaaggtggcgcacacgtggacccatgcggcggaatcagtctactggagggccggggcctagtggcccaactgcaaaacctcgacacacagggtgggccaagcgggggccccggggagcgacggtcaggaacaggacaccgagaaggaaatggccc

SEQ ID NO: 695092 - DNA, 157 bp, Homo sapiens
cggaagataggacctctcccacattctcaaattattccctctattacttgaacatttccatcatatacagaataagaacaagtatgctgttatatcatccatctaaaatacaaatatttatcattagatcctagcttcaccctaccaaactctgacc

SEQ ID NO: 695093 - DNA, 356 bp, Homo sapiens
aaggactcggcaatgttacccgtctgttaccaaaacatcactctagcatcaccagtattaggggcaccccgtgcccagtgcaaatgtttaacggccggggtaccctaaccgttgcaaaggtaggataatcatttgttccttaatagggacctgttttattggtccacgggggttcaacgtgtttttaatttttaccaagtaaatgccctcccgtgagggcggggatgcaaaggaagcgggagccgttttggcgtttaatttttaatcgaactagtccttacaaccccaagtccttaactcctaacctcgatgaaaattcgttgggcggcctcggggaggccgacctcgaggatcca

SEQ ID NO: 695094 - DNA, 679 bp, Homo sapiens
gaaaggagggaaaagtgcatttatttgatacagagttacttaattacctccaaaacacatatgtggaaatcgctttgctggtgcaaagtatattaatgagcaggaatacatacatgaggttatgaatagagagctcaattggtacctttgcgtgtcttgctcaagcttggtatggcatgaaaactcgactttattccaaaagtaacttcaaaatttaaaatactagaacgtttgctgcgataaatctcttggattttgtgttttctaatgagaatactgtttttcattacctaaagaacaattggctaaacatgagaaatcactcacttgattatgtatagattacataggaagaacaatcacatcagtaagttatagtctctattcaccaggtacttttctgtggctcataacaaatataccagcattcatgatagcatttcagcatttccaaggtaccaagtgtacttatttggtcggtagtagtagtagtaggtattttagagggaattcagtctgatgtttttaaagaaaagcagcatctctgatgttgcaaatacgtgtaaatgggtgtacatcttatcctgcatttaaacccaagtttataagtggtgaaataatagtagtctggatggtgctgactggtaatactgttaagtcataaagataggttcatagg

SEQ ID NO: 695095 - DNA, 1428 bp, Homo sapiens
  misc_feature (633)..(634): n is a, c, g, or t
  misc_feature (637)..(637): n is a, c, g, or t
ggccggagagcgttggatcacgccttgtaatcccagctctcaggaagcgctaagaggcgggaggatacgcttgagcccaggagtccgagacgtgctcgtggggcaaatattacgcggagaccccccggatttcttcccagaaaactggtgatcataataatacacagccgcaaaataataaaatttatctatcactcatcctccacaacccatatgcgagacagcctctccatcctctcttgaggaagaaacgcttagacagaagacaacaatggcgctgggcagagcggacgcgacggacacacaacgagcagggacaaagacagcgcacccttgcgagaaatcagaacgagggtggacacacacaagagagagaacacactcgcggacatccgagaccacaagggggtgccgaggggagactattctactccgcctcagaccagtagagtaaaacaagaggcggtcctggggggagaggctcacactacagcctcctctgcagtgctttagtggagtcaagagataaatatacttcacaagaggatggtggtttagttttttcagagggcgaggtgtcatgaatgacagagggggggtagaaattatcttcaagcaaaagggggggtggcnngtnccaacaaccacacacgtcagcgcaacgccacgaggagaagaagcaagcaagatataggagcgccccagcagacagccagtctggtggggcaagaaaacaacagccagcagcaagtagaaagaagagagcaacagagaagccagacaaggtgaagagaaagaagataaaagtaaaaacacagctgagagacacaaacaagaagaggcaaaagaacgaagacgagcaagagagggagagagaggggtagcaggtagcaagttggtgacgaggggaagaagagtagaggtaaagagaggaagggatagaggaaagtaagggagtaggtgtatagaggataggagaagaaagggcatagaggtatagagaaaggaagaagagaggaagaagaaaggacgtagagaagggaagaagaagtgaaagaataaaacgatagagagagagaggagaggagggggaggaggggggagaaaggaggaaggagagaggagaggagaaagagggggagagggaagaggagaagagagaaacagggaaaaaggacagaggggagagggaagggggggagtggaggagggaggagaatagtcagtcaagcatggaatctgagagaggaggaagggtagggggaggagaggggcgaggagagaagaagagagaagagagagataggaggagaaggagacgagattgaggggaatggaggtgaaggggagaatagagaggggggaaagaaaaagaagagggaagtgaggtaaggagagaggagaggagaggatgaggaggggatcggg

SEQ ID NO: 695096 - DNA, 1159 bp, Homo sapiens
  misc_feature (435)..(435): n is a, c, g, or t
tggggcagcggggtgggcgcggcatcgggctgggggtgtccgccgccggttgtgggtccctggtagaggcggcggctggtgttcgcgcgtccgggtgttggttgtgagcggcgcgctgtgggtgtttgttattttgcgcgcgcgtggcgtcgatggtgcgtaccgtcgtggtcgctctgttgtgtgggggtccctgcttgcacgagcgtggtgtttgtttgtttgtagcgggcagcgtgtggggggcgggccctgccctgctgtgtggtgtcgcctgggttgtgtcggcgcgggggtggtgtccgccccgtcggcggtgttgtgtgtggtggtgtgggggtgtggtgggtggtgtgtgggtgtggggggtgctgggcgtttttttgggtggaaaaagagtagtagtatgagaagtacgaatatgtccgcgaaatntagcgcacggctgggagactccccgttttagatggatgccccagtgtttgtgtggcaaacagtccgcaagcgatctgtaatccacggagccacgtctgaacactatgccttcgtgtctcgtccactcacggccgaaatcacgggtggttgaccctatgaaggggccaaaaggggaaccgcgaagaatatagggtcctgagatcacgagatcacgtggtcttcccgccacggtgaaaggtggaacaaatgtttgagaaaattatggtctgaaattcccaagagagaagtatcggcaagtccctgtaactatttatattccacggacagagcacctaaggggcgaactaaccacgaaagggcctgtctgtaacctgttgttggtggagaatgagctgaagcccgaacccggcctgagcgtccacgaaaatggtgctcacaccacatgcttccacgctaaacacggtttatgaaaaccacgcttgcgaaataaccacgtccccgtggccacatccctgtgaagggtgaacgttatgcacttatcccccacacctcacttttagttgcctaagcacttgcctggccttcctgttctagtctctcctgtaagccacaagaaatgaacacttccaaggagttggaaagtgaagttctatgaatgtgaaaacacctttgcctcctgtgtactgtgtcataaacagatgaataacccgaatttgtaccttta

SEQ ID NO: 695097 - DNA, 463 bp, Homo sapiens
aagcttttaccgcctgtataattaacgtaattcttagctttcttggattaggctgcaatgtattcctgcatctcaatgatcttcgttccttccacattctgaattatatttctgtcatttcagccacctcagcccagttcagaacccttgctggagaggtagtgtcatcatttggaagaatgaaggcactctggcttttgtgttgtcagggttcttgtgcttgttttttctcatctttaggagctgatgttccttcagtctttaaagtggctgccctttggattttttggtatcttttattcaatttatgctcttgagggtttgactgtggtataaggtgggttcagtcaactggcttaacatctctaagattttagagagttaaggctccactcccaactcttggactgcatgttctaactctggggaacttgtatcaggccttgaatttgttttctggctc

SEQ ID NO: 695098 - DNA, 708 bp, Homo sapiens
  misc_feature (115)..(115): n is a, c, g, or t
  misc_feature (172)..(172): n is a, c, g, or t
ggaacaacggagggacaagtgttagtaaaaaagaaaggccaaaaaaagagagaggcggtattaaaaaaaaaaaacgcccccccaacacgaccaaaaaagaaagaggggagagggnaggagggaacgagcggacgatacacaggcaaacgcgaaaaagggaacagagacaacngaggaggaaagaaaaggggacaacaaaaaaaggcaacgcgaacacagaaaaacacgaaaaggggagcgggggaaaccgaaaacggcgcgaacaaaaaagaaagggggaaaaccaagcggcggcaaaaggagggggcaagaaaaaaccaaaaggcgccaaagcaaagcagggcggggaaaacgaaacacagaaagagaaacggcaaaaaaacacaagggagaagacaaaaagaagagcgaagaccaagaaacgggggagaaacaaaaaccaaggaacgcgcggcaggaaaaaggagaaacgacaagaccgagaagcagaggggcgcgaaaacaaaaagagaaaaacgggggaaaaagggacagggaacaaaaggacaacagaggaacgcgagaaaaggcgacaaaggaaacagaaacgcagacgagaggagggacaacggagacagagcagagcaacagagaaggcgagaagaaagcaaaacgaggggagggagacggagacggagagaccggcgcacacgacaaggagaaccaccg

SEQ ID NO: 695099 - DNA, 659 bp, Homo sapiens
gtacatcttgtccgctcgcctcgactcagctgcatcgattagagaatgagcccggacctctaatcgagaccgaacgacctgctggagaatcactgggaatcgacgatcagtgcgacgaggtgtgcatcgaaccatcgcagagccttgtcgcgtagttccactgtacatcgcgtgaggcattctatcgacctttctagaatctagagcatgcccgtacgtgacaagtcgcaagccacgagatcccgatttcgtcatccatatgcctcgcaaggagaggatgagagatggctgtacttcgctcacatgcacgccacacatgcatggtgtaccttggttgaataacagcaggtgtcctacttctatgacacaatagtcatgattacgtagcctttgaagcacgtacggcacgtacactgactttcgtacacatatgccgcaagtcctcgaaggggccctatgggctcacgctcttaggacaaggcaccccaaggcatgcagacgacatactaaggcgtattcgaaaggcgacaggaattacgcggcacggaccagtggctacgggctaccgacgttgcgaccactccgtaacgtgggacggatcgttaaaccgagttagggcggtcggacgccgtgcaccttttggactcaaaactgggctc

SEQ ID NO: 695100 - DNA, 493 bp, Homo sapiens
  misc_feature (452)..(452): n is a, c, g, or t
ggagaccgggttcactggtgtaacccgaggcgggtctcaaacttcggggcctgagcgatcctcccaccttggcctctcaaagtgctgggattacaggagtgagccatcatgcccagccggcctatcctattttattctgaggctactactactccttaggggtagatccaaggatctgacatcattttcatacatccggtgcagggtgtgagtatagaatggaggtaggctgacaacacaaaagggggcagaggtttcccactcatccccgacagggattctctgtgggcataggtgggctcgggtccaactccgggccgacatgagcatggacaatgtggcacagtggtggctctgcatctggtgtgtgactgcggcccggttttggtttagcaagcggtggtgccaatttactatgcatgtggttacatattcggctctaattggactgncattttgcttcagcgagacgatgatggtttatggcagggct

SEQ ID NO: 695101 - DNA, 232 bp, Homo sapiens
aactatggtgagcacatttctggcgctcaggcgtgtcgggctcagtcatctccacacacaggtacagcagcgcttctggtagtcggccttaggtgtcttgctggatataatagtaccgggacttgcggtactttctcttgaattcagacctaaattttcaacattgtccacttcacttgcgggaaggaaccatgaattctggatcagggacctttatctcggcgtacccctt

SEQ ID NO: 695102 - DNA, 1377 bp, Homo sapiens
  misc_feature (955)..(955): n is a, c, g, or t
  misc_feature (1003)..(1003): n is a, c, g, or t
  misc_feature (1093)..(1093): n is a, c, g, or t
  misc_feature (1108)..(1108): n is a, c, g, or t
  misc_feature (1157)..(1157): n is a, c, g, or t
  misc_feature (1161)..(1161): n is a, c, g, or t
  misc_feature (1167)..(1168): n is a, c, g, or t
  misc_feature (1188)..(1188): n is a, c, g, or t
  misc_feature (1190)..(1190): n is a, c, g, or t
  misc_feature (1193)..(1193): n is a, c, g, or t
  misc_feature (1196)..(1196): n is a, c, g, or t
  misc_feature (1205)..(1205): n is a, c, g, or t
agcggggctgtcctcccttctggtgtactgggtgggaggtggaactagtcggacaaagccctcgcgtcggacccttgccagaactcaattaatggatgcctcgaagttgacgtacatatatattcagaaatgttttgccacctgagacctatgaggaggttatgtctagagaagatatttccacactggtttcccttttcaagagctttatcgggagctgaagcagtcaatgccttgaggcctttctattttgcagtacatccagatttctttggacagcaccccgtagaaagggatgatacatggaagagttttcaatgccctagtgatttttccttatgatgcatgctgctggaccactcccctacaacatcagttaatgtgtgctccaggaatacaaactgatatgaaaaatgacttatggtagatgtagttaagacagtcaatatattttaacattagaaaatacagtcagtccttcatatccatgggttttacatccatggattcaaccaacctcagactgaaaatattaggggaaaaaaatacatctgtactacacatgaacaaacttctctttcttgtcattattccctgaacaacacaggataacaactacttacatagcacttacattatattagatattataagtaatctagaaatgacttaaagtatatgggaggatacacataggttatttgcaaatactacactattttatatgagagacttgagcattcgcagatttcggtatccacgggaggtcctggaaccaatcccctatggataccaagggactgctatgtattacaaagccacatgctttggaattacttcagtgttccttctattttcattaacactgatatctagtttaatatgaaaaggaacttgaaatcttgaaaattagaacatcgttatttttttctacttgcaatggaaaatctatttngcttttttgcttctaggaaaatattctgattatgatatgtgatatgtnggtactcaaagtcagaacttttcaaagtaatcagtaaattgaatcaacagaaaaatattcattaactcggggatgcattaataaagtttntaaattcaaaatgtntagaaaaatcaggcttagtaatactttaatattattctacaatgtattntttnaattannacttctgtatgcagcagagntnggnggnacacctgtnagtcccaggctaataaggagggtgaaggcagaaggataccttgaacccaggaattcaagccgggccaacataaggagtcccaagcatacctaattacaaaacgacacaaaaactttaacgtggggtaaagggtaacacacagagatgggagataaacctggacatcccagaa

SEQ ID NO: 695103 - DNA, 849 bp, Homo sapiens
  misc_feature (704)..(704): n is a, c, g, or t
  misc_feature (778)..(778): n is a, c, g, or t
  misc_feature (801)..(801): n is a, c, g, or t
agcggggctgtcctcccttctggtgtactgggtgggaggtggaactagtcggacaaagccctcgcgtcggacccttgccagaactcaattaatggatgcctcgaagttgacgtacatatatattcagaaatgttttgccacctgagacctatgaggaggttatgtctagagaagatatttccacactggtttcccttttcaagagctttatcgggagctgaagcagtcaatgccttgaggcctttctattttgcagtacatccagatttctttggacagcaccccgtagaaagggaaatcaatgaaaattctcttaaaaggttaagtgtctacctagaaaacctccagaaaccaggcttcaagtctttgaaaccaactcagcttacattttatgtaagagaaacagaccagagttcctccgatggccaggaaccttttagtacttccggatttcgagcagtcaaatttactttgcacaccagagatctgctaagcacagtgttatatattctcaactcctgcagtttatctgttgaacatatccaaagcttgaatactaatatgcatacccagcctctcaaagaagctaaaaggatgcctgacaggcccatcaaatgggacaagtcttattactcctttactggattcaaggaccctgatgaagaccttgaacaagtctcgagagtggaaacaactctcacatnctggttagataacaatgggaaaagtgctgttaaaaagctaaagaacagtttgccacttagaaaagaactagatngtttaaaagatgaactgtctcancaattgcaactctcagatatcatgtggcaaaggagctggggcatcgcc

SEQ ID NO: 695104 - DNA, 122 bp, Homo sapiens
actgaagtcacaatgcttctgaccatactttgtctagcagagcaaaaactggccgactccgaccacatcgaaccagcagtgtccccaacgccctgaggaccaacacccatctgtgaacaagg

SEQ ID NO: 695105 - DNA, 773 bp, Homo sapiens
  misc_feature (628)..(628): n is a, c, g, or t
  misc_feature (702)..(702): n is a, c, g, or t
  misc_feature (725)..(725): n is a, c, g, or t
agcggggctgtcctcccttctggtgtactgggtgggaggtggaactagtcggacaaagccctcgcgtcggacccttgccagaactcaattaatggatgcctcgaagttgacgtacatatatattcagaaatgttttgccacctgagacctatgaggaggttatgtctagagaagatatttccacactggtttcccttttcaagagctttatcgggagctgaagcagtcaatgccttgaggcctttctattttgcagtacatccagatttctttggacagcaccccgtagaaagggaaatcaatgaaaattctcttaaaaggttaagtgtctacctagaaaacctccagaaaccaggcttcaagtctttgaaaccaactcagcttacattttatgtaagagaaacagaccagagttcctccgatggccaggaaccttttagtacttccgtttatctgttgaacatatccaaagcttgaatactaatatgcatacccagcctctcaaagaagctaaaaggatgcctgacaggcccatcaaatgggacaagtcttattactcctttactggattcaaggaccctgatgaagaccttgaacaagtctcgagagtggaaacaactctcacatnctggttagataacaatgggaaaagtgctgttaaaaagctaaagaacagtttgccacttagaaaagaactagatngtttaaaagatgaactgtctcancaattgcaactctcagatatcatgtggcaaaggagctggggcatcgcc

SEQ ID NO: 695106 - DNA, 1169 bp, Homo sapiens
ggaggagagagagaactagtcgcgagttatattatttttctatttggttaagcacgggtacttaatggatgtgccccttgacaagtgtgcggttccctaggcccctccccttcttacaagggttctacatggcaactgtaagtgagggagaaatccagtgtggggggtgggcactgagtttgtggcagggactcccgcagcgagtgagggtctctctcttcgctcgttgtgctcattgactggggctggttggctccaggggttcatacatccttggaggccattgtgggccatgaggtccaccacccgtgttgctgtagccaaatttcggtggtcactaccaggaaaatgagtttgacaaagtggtcgtgtgagggcaatgccagccccaggcgtcaaaggttggaggagtgggttctccctgtagaagtcagaggagaccaccgtgggagctcaggtgtaccccaggatgcccttaagagggagcccttcagaacagccctagataagacgcaacactttgttgaagtatcatcaatattggagacagggtatctctaaacaggaggaaagcgtcaggttcacagccaatgtgacacccgcttgagataggtggggtagcaacacggaaaaggcgccatgccaagttaaggctacccccggtatcaaacgcaaccagggagaatataacacttttgcgccaaaagaggacttttggggtcagcgccgagagatacaacggcccaggacaactagaatagtctcttgaggaagaatcccccggaggaggcaacatatagaggcccacgaagattcccacgaggagggggggcacaacacaaaagagcatttaggggggagtggagagaacaacatggcacaatgcaatttgctgcgcaactagaggagtactcccttcacaaggaaaccccaaaaggatggtacaacgaaataaggacccctttccgccaaggggcattgaaaaaacaccacattggtgatgtgttatacggaaaaggtatattcgcgataaaagaaacttaaggaggagagtggggcaacaaaatgttccttaatgggtctacaagcccatatgcacaaacacattgggggtgtataaacaacatgggaggcacgaaactgaatacccctttcgtgctcccccacag

SEQ ID NO: 695107 - DNA, 105 bp, Homo sapiens
acaatccaatattacactgcaaatgaagcatgtagaaaatagctgaccgggtgcggtggctcacgcctgtaatcccagcactttgggaggccaaggtgggcagat

SEQ ID NO: 695108 - DNA, 188 bp, Homo sapiens
cttaaaagttacagcaagtgaaggtggtgtctcccgtcgataatcccagcactctggaggctgaggtggatggatgacctgaggtcaggagtttgagaccagcctgaccaacatgatgaaaccccatctctactaaagatacaaaaattagctgggtgtggtggtacgtgccttagtcccagctaatt

SEQ ID NO: 695109 - DNA, 313 bp, Homo sapiens
aatgcttaaagcttctgtagaccgaattccaccagaagcggaaaacatccgttcatagaaatgttcacgcggcggcaagttgccatacaaaacagggtcgccagcaatatcggtataagtcaaagcacctttagcgttaaggtactgaatctctttagtcgcagtaggcggaaaacgaacaagcgcaagagtaaacatagtgccatgctcaggaacaaagaaacgcggcacagaatgtttataggtctgttgaacacgaccagaaaactgggtcgacgcggccgcgaatttagtagtagtagttggcggccgc

SEQ ID NO: 695110 - DNA, 1076 bp, Homo sapiens
agcggatgttgtactatgcttccacggcttggatgtgggtgttaactccaggtctccccggagcaagggggcttccgtctgcgtctttggatccgcgtaggtgaatcggagcgttgtccgacgccttgtggaggccgacatactcagccggacccgagaggcctaaccgcggtaaccaaccaagctcaatggagataaagaccaatgtcatccaggagttggatagcagagttgctagagtgcccgactaactcgcattaggatcggtctaaagaccgtgtcgagatataaggaatgcgcacccggcgtctcgtgattggcacagaatcagcatcgttcctgctgcttcagcccttgatcactagcggcggcgagtgagggcggcctacttagccaacaggcctgaacagccggacccaaccgccggtctcgagcagttgacaatggttactgagaccaccatcgggctacgtgcgcgaccggtctcgcgaaaaagaaggaattagcgacctttgttcacttgggtcgcttgttgccaaggggtcaaggccgtaaactcgaagactacgatgacgtctgagatcacgcaggtctgcgaagcagtcagtaggctgagtcgcggatgggatccttcacatctttcgggatacgaatcaattggggacatcatcggccccctaaggataaatgtctaggactaatccgcattgccacagtatgtagttcatgacgacgcgtgaagacctaggtcttgaggaggaccaattcgaggtgcccctacgcgaaaggtttggaagcgtagttccccttgtatggattgcgaggaaaaacgatccgaattaaagggggcttgcctacccagtatcatatctttacgtgcaattcatgatgggagcacccgaaaaagcgatggcgtgaccaattgggttggtttgttcgaattcctaaatgtgggtaaccaatggtacacgggacactttgcttcgggtaagagggacctcccctaaggattcttgcttaggtttttccagggccccttgatggtttgggggaaacagctaaaggcccaaacccca

SEQ ID NO: 695111 - DNA, 116 bp, Homo sapiens
gtgtggtttttctttctttgtttgttttatgtgttttgtgcttacctcaatgttgatggctgctgactgatcagggtggcagttgccgaaggcagaggtggctgtggcaattgcca

SEQ ID NO: 695112 - DNA, 837 bp, Homo sapiens
ggtgtggcccagacagggcactgtctgtggccccaggggttgaggacccctggctttaacaacagaaagaccccagttactggattgggatccaccctcactcaatatggcctcagcttaatgaaagacatctgcagagaccctatttctactaaaagccacattctgagacttctcgtgggcgtgagtttttgagagacactgttctgctccatgcagggagggaattgggatctgaagacgttgcattcgaggtctcggggctcctgatgagcagcctcggcctgacctggggcaggtgtgatgtctgcggctcaccatctccaccctgcctgctgtggaatctccacaacgacaggtgctttggaggccagagtgcatgcgtacgggccctgcacacgctgaatgtcactgggaacaaggacacaccccgcttccaggagaagatagaacatgtcgaccccttttagccatccccagtgcaggacatgctattgacttccatgagacaaacacctacttggaaatcaggttttttctgtaccttttgaaggagcaggaatttcccagcatttcctggacaaagacggaggccacattcgctgcatcctttccagcaagatgtaattctgagatttttgtcattcctgggcgttatgaggactgccaagggacacaattccatgggaggaaagttttcttctaagctgcaagccagctctggcttctggagtttctccttaggattgcaagacagtagttccctgtcctttaggtcttctccagaaataccttaaaatagcaaataaaataagatataagcaaacaaaaaaaaaa

SEQ ID NO: 695113 - DNA, 117 bp, Homo sapiens
tcggtccgaaacccatgctgcgttactctggcacggcaaggccataagacccagctcagccatctcgcccaggcctccttggagtagccaccttccttgatgatgccgcgcgggtct

SEQ ID NO: 695114 - DNA, 955 bp, Homo sapiens
ggtgtggcccagacagggcactgtctgtggccccaggggttgaggacccctggctttaacaacagaaagaccccagttactggattgggatccaccctcactcaatatggcctcagcttaatgaaagacatctgcagagaccctatttctactaaaagccacattctgagacttctcgtgggcgtgagtttttgagagacactgttctgctccatgcagggagggaattgggatctgaagacgttgcattcgaggtctcggggctcctgatgagcagcctcggcctgacctggggcaggtgtgatgtctgcggctcaccatctccaccctgcctgctgtggaatctccacaacgacaggtgctttggaggccagagtgcatgcgtacgggccctgcacacgctgaatgtcactgggaacaaggacacaccccgcttccaggagaagatagaacatgtcgaccccttttgctctcgttctgttgcccaggctggagttcagtggcatgatcttggctcactgcagcctcgaactcacaggcttaggtgatcctcccacctcagcctcctcagtagctgggactacagagccatccccagtgcaggacatgctattgacttccatgagacaaacacctacttggaaatcaggttttttctgtaccttttgaaggagcaggaatttcccagcatttcctggacaaagacggaggccacattcgctgcatcctttccagcaagatgtaattctgagatttttgtcattcctgggcgttatgaggactgccaagggacacaattccatgggaggaaagttttcttctaagctgcaagccagctctggcttctggagtttctccttaggattgcaagacagtagttccctgtcctttaggtcttctccagaaataccttaaaatagcaaataaaataagatataagcaaacaaaaaaaaaa

SEQ ID NO: 695115 - DNA, 349 bp, Homo sapiens
ctccattgcttggggatatgcttcctcaaaataaacccccctggcatcaagggttccggatcagaaacaggcagctaatcaaaggttcatcaagaatggctgggaagccagggatccaagcggaatcaagcccagctttgtcatcttagcactatctttgtctgtggtgagttacagttccctgtgtagaccaaagacaggaccccaaagagaagtaacccagaaaaactacctttgcttggatgtgaaaatatgaaaaacataaaggttggggtatttttcaaaaatagaaggagcccttctccatcctatatttttttaaaaataaatatttttttttaaagtttaa

SEQ ID NO: 695116 - DNA, 480 bp, Homo sapiens
agattctcaaatggatcgagccacctcggtgattaagtataaagcatacctatcacatatgtaaacgcgagtaatcctctccaatataggggaggcatataggaaacagggaaaagtagcagtatgaccaagagtaaaccaggtagtaaaaaacaccagcatagggatgaaaccctggcaaacaaagaataccaaatttaaggggtaaaattttggcaaggggaagatacctcaattcctacattttccagctcctggtataaaccatttttccatcggtacctagatatgggttttcctcctccatagtaggatcaccggattattggatatttcaggcctttaataacaactggtttaatgatcccaccatttatgtccacttcctcagggcttaatttccaagaaaaaataaggtcgtagtagcacaaggtgataagctccatctcccacccaattttcactggtctcatgggtagg

SEQ ID NO: 695117 - DNA, 510 bp, Homo sapiens
tggggtctttgctggcgagtgtggcttcctgccatggcaccaaagaagagggctggcggattagtcctgttgtctctcatagctttgtagggacacagcgggccatgtggactgacagctggagccttcataaagatggcctagaaaattaggacactgtcctgttgacaaagcccctaggcctgcccccatcaggcctcatgggtccttttcaggcctaagccagggttctgaaatcatctgtaatgtgaatttatatttctaggccacattcgctgcatcctttccagcaagatgtaattctgagatttttgtcattcctgggcgttatgaggactgccaagggacacaattccatgggaggaaagttttcttctaagctgcaagccagctctggcttctggagtttctccttaggattgcaagacagtagttccctgtcctttaggtcttctccagaaataccttaaaatagcaaataaaataagatataagcaaacaaaaaaaaaa

SEQ ID NO: 695118 - DNA, 985 bp, Homo sapiens
gccctttcctcaggtgccgacgacttgctcggtacttccgatgaagctaaggatgtgtcgcgtgtgaggtcctcactacagtccggagaataacaccgcgtccggccgcgctcgggccttacccaactcgccctgcgccctatgcgcactctgttccccgcagacttccgcctgcaattcttatcctcggtactcttctacttctgtcgcgtcgcatcgagcgtgcacggttcaacggaccgtagttaatgtcgatgccctccttgtagcagccggtgttgacttgttggagcccttgtataggggctcgtggcttgtttgcctaagtgcgctctgggccctaccgttcggtcggtatagttcacgctctgcaattcatcgcacttggttacaggaggccagtgtggatccttgtcgacactccgtaagacataggggagcgtcgctctccagaagaggaagtttcctgtgcgttaccagtggttgagctcgaatcaatcttgaggataaggaacctgtagttaagccctagtgacaaagggaactagttgcccggagagtagttctgactgatagatcgtagcgtcctttctgcgctctcagtagaactaaaggtcgctcgtgttgggatgagcatgtctacggggatagtgagtgtgtacccggttgccaaccatggtatgggttaacaatcaggtggttatatgggtgccgcacgccagaaccgcatttaaagctagtcatggactaacttccaatatttgtgtgggcgacgcacgcttttttgaaagaacaaaacacactggagcaatgatccagacttttcatgaaattcgagacgccggcttcatgtgcgtttgtagaccttgggggaaacaaatgcgcgcacgatcttgactccaagcttttagagcttaaggtccatgttgtccccgaggagttgcgggtttgttcaacaggtaaacacgtattctaaaaaggaagc

SEQ ID NO: 695119 - DNA, 799 bp, Homo sapiens
gcaaacgaaggacacgctctttgctacttgtgcaggaagaaatgggcttagattaaatacttggtcgacaagcagataatctgaatatcaataacagaattctttattctaaccaccagacttacggtgagccctggggttaaaagattccattggtaataaggcctggttgcttgggtgaatcctgtattctattcaagaaagcagcaaaatcagtgatctcagtgcaggtgaagattgtgatcgttcttaacagctgggtgattacctgtaagagaagataagctacattgacggagcagaaaaaaaaagccgtgaagcattttattgcagaatgtcttccctattattagaatataagagtatagtagtaattactgttcattgaacagaaaatagcacgacttacatttagtttccagtggtcaagttgtagattcggaactgtggtgaaatctgttgaaccagacgattttcacttaactaaactctagttcatgttggaatcaatctgggtacaaccgtactcatggttcatgggaagcagagacttcacgtcacaaatcactcattgtcatgctatccatgttcaagtcacgacttacatgatttttgaacccagagcaacatccacttgtagcaaagtaggtttgcacagtgctaactattaaatcttctagtagagtttctaaagcaacaagttcgggtctaaatagagttagattactgcttatttccctagttaagctctggatggaagtggtaatgaagcttagttaggataagggggaaaggcaga

SEQ ID NO: 695120 - DNA, 506 bp, Homo sapiens
acggcagtactcctacggtttaagtggctagtctggatcggtagcgggagcggagagcggaccccagagagccctgagcagccccaccgccgccgccggcctagttaccatcacaccccgggaggagccgcagctgccgcagccggccccagtcaccatcaccgcaaccatgagcagcgaggccgagacccagcagccgcccgcgcccccccggcgcccccgacctcagcgccgccgacaccaagcgccggcactacgggcagcggcgcagggagcggtggcccgggcggcctcacatcggcggcgcctgccgggcggggacaagaaggtcatcgcaacgaaggtttggggaacagtaaaactggttcaatgtaaggaacggatatggtttcatcaacaggaatgacaccaaggaacgatgtatttgtaccaccagactgccataaagaagaataaccccaggaagtaccttcgacagtgtacggagatggagagactgtggagtt

SEQ ID NO: 695121 - DNA, 368 bp, Homo sapiens
tgagtgtactgtatacgtatgatacataacacacagacaaaaaaactaatcgtgtagattgtgaacatgatactgcatcctaccctccagtgggatctattttaaggacaagaggagtggcaagaaaatcctgcgctctacttggtagattggttgtctacaatggtcttgggggagtaattccaaaactatttggtactaaaaagacgttgctatcacgtgggaaacagagtttcaccatgggagaaagaaaacacaaataaggaatgggagatggagagaaagtaccctcagatgtgagactggaatggaatgtattagcatgacattgtgatttaaatgaataaacatttgtaaaatacactcaa

SEQ ID NO: 695122 - DNA, 147 bp, Homo sapiens
agaggacaaacagtattaatgggggatgtgggatatggcgttgtattagtttgctagggctgccctaagcaaacaccacagactgggaggctataaatagacagaaggatattctcttatagttatacgaggctggagggggccgcg

SEQ ID NO: 695123 - DNA, 476 bp, Homo sapiens
acggcagtactcctacggtttaagtggctagtctggatcggtagcgggagcggagagcggaccccagagagccctgagcagccccaccgccgccgccggcctagttaccatcacaccccgggaggagccgcagctgccgcagccggccccagtcaccatcaccgcaaccatgagcagcgaggccgagacccagcagccgcccgcgcccccccggcgcccccgacctcagcgccgccgacaccaagcgccggcactacgggcctcacatcggcggcgcctgccgggcggggacaagaaggtcatcgcaacgaaggtttggggaacagtaaaactggttcaatgtaaggaacggatatggtttcatcaacaggaatgacaccaaggaacgatgtatttgtaccaccagactgccataaagaagaataaccccaggaagtaccttcgacagtgtacggagatggagagactgtggagtt

SEQ ID NO: 695124 - DNA, 238 bp, Homo sapiens
ggcgtgttatcccataactttaaaatcattctatcatcttggagcactttctcttagcggggagatgatggaattctgtgatcataagaagtatcgtgtggttcttgcgctggtggagcatgtgctaggacaagacagcatcctcaatcaatccaacagcatattcgggtgcatcttctacacactacagctattgctaggatgcctgcggacacgctgggcctctgtcctgatgctg

SEQ ID NO: 695125 - DNA, 801 bp, Homo sapiens
  misc_feature (18)..(18): n is a, c, g, or t
  misc_feature (88)..(88): n is a, c, g, or t
  misc_feature (101)..(101): n is a, c, g, or t
  misc_feature (118)..(118): n is a, c, g, or t
  misc_feature (156)..(156): n is a, c, g, or t
  misc_feature (208)..(208): n is a, c, g, or t
  misc_feature (232)..(232): n is a, c, g, or t
  misc_feature (235)..(235): n is a, c, g, or t
  misc_feature (268)..(268): n is a, c, g, or t
  misc_feature (274)..(274): n is a, c, g, or t
  misc_feature (295)..(295): n is a, c, g, or t
  misc_feature (331)..(331): n is a, c, g, or t
  misc_feature (352)..(352): n is a, c, g, or t
  misc_feature (365)..(365): n is a, c, g, or t
  misc_feature (372)..(372): n is a, c, g, or t
  misc_feature (379)..(379): n is a, c, g, or t
  misc_feature (393)..(393): n is a, c, g, or t
  misc_feature (427)..(427): n is a, c, g, or t
  misc_feature (436)..(436): n is a, c, g, or t
  misc_feature (454)..(454): n is a, c, g, or t
  misc_feature (459)..(459): n is a, c, g, or t
  misc_feature (465)..(465): n is a, c, g, or t
  misc_feature (493)..(493): n is a, c, g, or t
  misc_feature (495)..(495): n is a, c, g, or t
  misc_feature (506)..(506): n is a, c, g, or t
  misc_feature (566)..(566): n is a, c, g, or t
  misc_feature (569)..(569): n is a, c, g, or t
  misc_feature (586)..(586): n is a, c, g, or t
  misc_feature (593)..(593): n is a, c, g, or t
  misc_feature (655)..(655): n is a, c, g, or t
  misc_feature (687)..(687): n is a, c, g, or t
  misc_feature (728)..(729): n is a, c, g, or t
  misc_feature (735)..(735): n is a, c, g, or t
  misc_feature (768)..(768): n is a, c, g, or t
ttcctgtagacacaggtntggctgcccggactcctgctgttgagggtatgacagaggctgaggaggaagagctcagggctgagcttancaaggtggaagangaaattgtcactctgcnacaggtcctggcagacaaggagaggcactgtggagagntcaagaggaggctgggcctctccaccctgggggagctgaaacagaacctgtncaggagatggcatgacgtgcaggnctntagcgcctaaaagaagactcaggaaactctttnacaggnaggaaagaagacttcagctgncctatccacagatgggctctaccatcagcaggaagnttggagacatgaggaactctnagaccttcaaatngtttgangaccganttgggaccataaantctaaagttgtgggtgacagagagaacggaaatnccaacctcncttcctcagcggggagtngtganaagccnctgtcggatcccgcacctttctaagccnanggttgcttcanccgctgcagagcacacgcaacccagcctcagcatcacagccgcagctctgttcagcgganagncagccagggcggatgancagagcnggccctgaggacagtcctgcccatccacgcggagatgtggctgccgcgtttgcatgaatttnaagaacacaggcttgtacacagatgttttacnctcacgtttgtagatgaaacagatcactgtgctgtccttcnnaggggngcagaagtggacagggcggagggtttgaaaaanattgaacaaaacccaggctccctttgggaatca

SEQ ID NO: 695126 - DNA, 327 bp, Homo sapiens
acggcagtactcctacggtttaagtggctagtctggatcggtagcgggagcggagagcggaccccagagagccctgagcagccccaccgccgccgccggcctagttaccatcacaccccgggaggagccgcagctgccgcagccggccccagtcaccatcaccgcaaccatgagcagcgaggccgagacccagcagccgcccgcgcccccccggcgcccccgacctcagcgccgccgacaccaagcgccggcactacgggcagcgggcggagggtggccggcggctactgggggctgcgggggaaaaagtatgagaagttggaaaac

SEQ ID NO: 695127 - DNA, 389 bp, Homo sapiens
atttaatgactacagcatgaatgacatccactctggggaaagactcagctgtgcacgagtgactagcaaggaaagcagggctcaccaagagatccttgacacttgttaaggcatttgaacttcctcctggggataagggggagctactgaaagccttagagcacatgaatgacctggacagacttccagtttgcaaaagatcttctgtgaccatgagtgagcccgtagaagtgaaccaggctgggagcaggttgaagtcaagaccagttgaagtcattcttccctgagagtgaaccttcttggctgagacatctgtcactccatgaacaatactgaacacttgctgtgatccagggaatgttctagaagctgctggcagtagaaaaagg

SEQ ID NO: 695128 - DNA, 293 bp, Homo sapiens
tactactaataaattcgcggctgtgtcgacggcagctgttgcagcatccagttcctaactgcacctcctgctgtgcagcccggttcctaacagaccacaaactggtagggttggggacccctgccccagaggtattctgaccacagagcactgaagatgaaatgaatttggcaacagctagtatatattcccaaactgggcttcccctattgccataagacacaagtgaattcaagtcttctggacttaaaaatagaaataagtagtcgacgcggccgcgaatttagtagtag

SEQ ID NO: 695129 - DNA, 162 bp, Homo sapiens
  misc_feature (71)..(71): n is a, c, g, or t
gtggcagagaaagtcctcactcagaggcagagactgagttaaggcataggtggccttaggcatctgcatgnttgcaggggttaagttttccttccagtgagggctggagggaatgaaataagctggtacctggagcccgcttaagctctgcactctggcaac

SEQ ID NO: 695130 - DNA, 203 bp, Homo sapiens
cctcctttaattccaagcagtcgactccaggccctactgagcgggtgacgagtactccacagcgtcgggcgcatctggctgtccgtggtgtcgtcttccgggtgcgtaggtatacgtgtgtgtctgcagagcgcgtgtggggggatgagcagaacgactttgtactgccacaccaagcagcccgactgcttggatcacaagga

SEQ ID NO: 695131 - DNA, 1302 bp, Homo sapiens
cggcgggggcgggtcaggatcttcggcgtgatcttccattctcagtgctgggatgccggaatgtcctgggcgccctgggatctgggcgtgggcccgcgcccatggcaatgctgcggcctgccctgggccctggggaccctgccatgtgaggcagtgcccgggctgggtgtgcccgtgccatggcctggtggaacgtgtccccactgcgagtggccctgttgcccggtgcctggagagtgtgcctggggggatgtgtggcccccagtgggcctggggtggcactgggctggagtgccctgtggcctgtgtggcctgccctcctcctaccggtgctctccgcagctgcctgtgtctatgccgtggcagcgtgtgtgacggattttcactgcgcctggagaagatctgtgggcctggcttcttctctgagggtcatacaagggttccggcaccgaccatgtcaggtggccaagtcagtggttgcttgaagcgatgaacgaagctcccccagtaaaccggagggcaacacactactgggaagtgcatgctgatgaaaccaggctcaggggcacccccaacatcctaaggttcattgggagtcgtgtgtgcaaccagggacacgcctgcatcgctcttacagagtatatgaatcgggtgtggaccatagggacacagcttgctcaggctatccacctgaaaccccagtgtaccatggcccgggtacaagagctccaccatgggcaccttcggacatttgccccgagggccctgacgagttaccttgaaagatccaaagagggatgataatttcacccggcgatacttcacagtccaaggaagctggccgatagtccctgaacgggggaaagcaatctgaggggcattcaaccgggcgttgtacagaggggttgacattacgaagagcatggggccgcacaaaagaattaccgcttggtggatactaagggagaagcggggcggcaaacggcaaaagtgaaaccccagattaagtgccaccaggatcgaatagagagaattacccacaaaaataagtagagaaagtggagcaccaaagaagtagttggtataacaggggcggttgaagcgcaatgaatttaaactcaagaaaataggcctcgattagtcaattaacacaccttacagagaaaataaggaccacacatatgaagacagcacatatgaacacagaaaagaaacgttgtagaagagccacaagacagtagcagtaaaacaacagcgacatgaacgacaccaatagagcgagaagaagttcgcaaccagatg

SEQ ID NO: 695132 - DNA, 889 bp, Homo sapiens
  misc_feature (373)..(373): n is a, c, g, or t
tatagtagctcaccctggtaatatcaatgcttgggaggccgaggtgggaggattctctgagcccaggagtttgagaccagcctgggcaacacagcaagaccccagctctatgaaaaaattttcaaaaaatcagccaggcacggtgacatgtgcctgcagtcccagccactcgcgaggctgaggcagaagcaccgttgagctcaggagttcaaagctgcagtgaaccgtgaccgtgccactgcacccggcctgggtggcagaacaagacctcatctccctttttttttttttttttaaaaggatggggtcttgccttggcccaggccggagtgaaagcggcacgatctcgactcagtgaaactccaccccaagnggttcaagcgagatctccggacgtcaagggaaaggagcagagacctccatcctcgtgacacaaaacaaaaacacacacacgacaacaacaactatgtggcgggcgcgcagcgccccaggagaaagttttaaaacacaccggttggggcggcaggggacccaagaggaacgagaaccacctgctgcccaacaggcgagtgcccaaagagagcgacctcgcgtcctcagcaccaatggtcgctggcgggtcccccccccaaaaaaaaaaacgcgcggggggagacacccccggccgttcgtgaacaacaccccagagggggcgtcggagggcaaagggggctcacaccaggggccacacggaggccgaaaaaaacccacgccgccggcgtgacaggaaaacatacaccacgctagcaagcaacacacgcaacgctagaagcctcaagactgataactacatgacacgcaccacgagcagagctgacaacacaacaagcacgaacaagcacactactaa

SEQ ID NO: 695133 - DNA, 308 bp, Homo sapiens
gtaaagctagtaccaaggaagatgaccggagaacatctgccatcaaggcccttaatgctacaggacaagcaaacctcagcctggaggcacttttccagtgaaagcaggccaggtgcggtggctcacgcctgtaatcccagccctttgggaggccaaggcgggtggaacacttgaggtcaggagttcaagaccagcctggccaacatggtgaaacctcgtctctactaaaaatacaaaaatcaaccaggcatgacggtgcacgcctgttatcacagctacttgggtactacgctttggcagtgtaccga

SEQ ID NO: 695134 - DNA, 993 bp, Homo sapiens
atcgatgtatgtcggcctctttttaattttctcccgctttgtttctcctcccggggggcattttacctcttgtttcgcgctttttcgccccctttgttgtcccgggctccccccctttcccggtttgtgaccccgcgctccatttgttctccggggtctttgtaccaaaccgccctttcgcctgggtaccgcaggtgccacgtggtggctcctccccggccgcgcactgtgtcgttcgacaatcgccaccccgttctttttcagtgccctgggctgcgccccattgtggcgcccccaaacataaaactggcgtggaagaccaattgtgggcaccgccgggcttctttaacaccctgaaggtgcgggcacacaaccccctttcccattactgttcgcggtggaacccacaacagtcttcccctcattggcggccattccagtgtcaccccccacggatctattgggagagggccctggtggcgacaacccgccagggtggttattccactcctggtgcccccccctgttgtccactcatgtaatgtcgccacgccgccctactaacggtttcctgcacctcacagggcgccattctggtattgtcacgcctcgcttccactagggcgctccagttctacacatttctccccgaccgcaccagggaatctcaatatcatctccacacaacaatcggggcttatccccaagatcttttaagatgcggatgcatttgcaatacacacatatggtggtccgagacaagagaccgacgattccccgagtagcgtgcttggagtgcttcaccaatatgtctgcccactctctgtcgacgctcctcttcgagaccacattgcgcgcggggtatcaccacgccacccctaacagagacggttgtggtcccgaaaagtcttttcatcctctgctgctcactcaatttgtgctgcattgtgagcctttaaaaaaatttcttctcttttctgcccccacataaca

SEQ ID NO: 695135 - DNA, 1297 bp, Homo sapiens
  misc_feature (484)..(484): n is a, c, g, or t
  misc_feature (1142)..(1142): n is a, c, g, or t
tcgaagccgcgcccgactggggactgctgaggcgcgcacagggtcgacgctcgcacgcggaacctgtcgattccgcggtccgtgcatgaggtctcggcggcgggcgtgtgcagccatgtctgatgactgagacctgccaagacaacaggttcatacaacggcagagacaattcgatcgagatagacaatgagtcggaagcgcagccagaggggcaccagagcctggacttatgaccttcatatgacgagtggagacaagacagcgtgcgatttcactcagctatagtggcgtgtgtaaccgtaatcctgctgaggcacagcggatccatcaggagatacacttgacagagcccatactcacaatccactcttacgcgagcttatacgccctgaagcccgagttgacgtacacaccagcggtttggtcgcgaattcagtcacggagggcacagcagtgcagacgagagaactcgctttgcgcatnacgcgctgatccgctctgttgatgcgtgcgctttcttcgcgagccatagttgcacattgatctcgggcgcaatacggacgtccagaggcagccattgtgatgcccgccgcagcgaggtacccacacactttcttcgcgtttgcacggtcctcattggacttgagtattttcacgagtcggaaacttcccaagtagcacaggacctgtcgctagtgaccatggacgaggcttgcagaccccgtaccttttcgcccctttggctacggaagtccgcatggtgtccacatccgacgcaaattcttcccaatattgtagatcaccctcgttcctacgaatacaacgttgttggccgtacggaagacatgaacccttcggagacgtcaaggattctcaacgacagcactttccccttgtaaacttagcaacgcttggaagagagcaccgacccagtccatgagatctttcagatgcgtatctgatcgatattgaaacgccgggtatgaggtgacaggaggtcccctcgcagatgaagggaccacttacctgtcccacttggcgttcctgttgaggaaaaaggaacctggatcagacaatttctccaaaagggaagcgttccgcataccacacaagaacattccaattggcaccatagaccgtntccatgttgtacgaaccttgaaccaattcgggccccccatgggtagattctcccaagcctctatcaagaccactttgtgtaagtacttcaggctacgtcttaggatcttaccccaagcctggtccaagctcactagtagccacacataccttggg

SEQ ID NO: 695136 - DNA, 406 bp, Homo sapiens
gatgcgatactcctagaactgataacacttcagtaagttgaggatacaaatcatctataaaacagtagcattctatatcccaataacatccaggtggaaagccacttcgaaaaggcaatccccggaccaaaacttaaccacacacacccagagagagagagagaacggagaagagaaagagaagtcacctaagaacatttctaaccaaggaggtggaaaggccctacaaggagaactacaaaacacagatgatacaaaccagatgggaaaacattccatgctcagattgggagaatccatatcattaaagtagccatactggccaaagcaatctacagattcaatgctattcttaccaaattacccatgtcatttttcacagaactagaaaaaagctattctgaaa

SEQ ID NO: 695137 - DNA, 134 bp, Homo sapiens
cctccccccatcacagccgaacgatatttcctattcgcctacacaattctccgatccgtgccgaacaaactaggaggcgtccttgcccgattactatccatcctcatcctagcaataatcgccggtcacgagat

SEQ ID NO: 695138 - DNA, 274 bp, Homo sapiens
gggggcccccccccccccccgggtttgggggcccctttccccccccccaatgggggttatatgggggggggggggggccctttttccccctttgggggggccccctttcccccggggggaaaaaggggtttccccggggggggtttttttaatttttttccccgggggtttttttttttttttttttttgtgccccccccgggggggggggggggagaaaaagttttttttggcccccccccaaaaaaaataaaagggggttttttttttttta

SEQ ID NO: 695139 - DNA, 167 bp, Homo sapiens
  misc_feature (77)..(77): n is a, c, g, or t
  misc_feature (93)..(93): n is a, c, g, or t
  misc_feature (114)..(114): n is a, c, g, or t
  misc_feature (124)..(124): n is a, c, g, or t
tgggtgtttgcgggggtctcgcggggcggctgcggtgtttcaccggggaaaggctcgaggagagcgcggctcacganagataacccagctttnctccctggaaccttcaatttnaaggcctccntgcctctactaggcgccttagctcactatggggaaccacttga

SEQ ID NO: 695140 - DNA, 700 bp, Homo sapiens
gctttagttttggaggaaatattgtgtgtcattctaaaggctaaagtagggtgatgggtgcagatactagtaagtggatttgaaacaatcagacgtcaggcaatgcaaggggttgcctcatgaggtggcaatggggggtatttatgcagaccacctgtggagatgctgttcaagccgtaaattgttggggacactggatgagaggacctctgaggtcctggtgttctttaattctcggactaaggccattgaaaggagcaagctgggctacttgaagaaaattagaagtgaacaaaagtatagggctcttgaaatccattttcgccatttgaaaatggtgggattgtttctgatgcagcggagatgttgaggcagttgagactgaagctgtccttctggaagagatggttgggttgtgctggaaaacagtggattggaaaccgttgagagtcttaccgcagctagggcaaagggcagggaaacagaatgctctggttgcttaaaagttcgttttctatccgaacatactgaagttatggatcataccttgatttgaatctgtaatttctagaagttgtgtttctagcccagttcttggaccatcaagccagctcattgaccaaatacttcaaaacaggagaaccaagcagctctcatttcgaaagccttctgtatgtaataggaacagcagctttccagt

SEQ ID NO: 695141 - DNA, 264 bp, Homo sapiens
  misc_feature (1)..(1): n is a, c, g, or t
  misc_feature (44)..(44): n is a, c, g, or t
  misc_feature (106)..(106): n is a, c, g, or t
  misc_feature (115)..(115): n is a, c, g, or t
  misc_feature (140)..(140): n is a, c, g, or t
nctgcattcctgaccggtgtgactgagccgctggaattcctgtncatgttccttgctccgctgctgtacctcctgcacgcactgctgaccggtatcagcctgtttntggcaacgntgctgggtatccacgcgggcttctntttctctgcgggggctatcgactacgcgttgatgtataacctgccggccgccagccagaacgtctggatgctgctggtgatgggcgttatcttcttcgctatctacttcgtggtgttcagtttg

SEQ ID NO: 695142 - DNA, 399 bp, Homo sapiens
cttataatgcaatctatcgtcctttttgctacaatgagacccgactcgtgtgctacacgaagaggctcccagtctgttcccacctatacgtggttggtaacctccttgcctgctactttactcatgctcttccaccaggaagaattaataatgtattttctgataccatttctgttgcatatatgcacataattcttacatacattgggttcaagtttcacaagtaaagagtgcaattgtttcaattatttattgaccatatatttgttgtatgactctgtgaggagaagaaacaaaccatttttcctccgctctcataccacaacagtcacagaaagactactgtgagcaaatgtgtttccccacacacaaggcaagcaatcagttctgcagtgcaca

SEQ ID NO: 695143 - DNA, 550 bp, Homo sapiens
tattactatttcctttttttaggcacatgacagtgttggtattggaggaccttccaaggaagagggatgctgtaccagtggtgcctgggtgcctggcctccagtgtcccacctccttcaccaccccactgtggctccttgtgccatctgtgatgctgaggtatcctgttgggtgaaatcaggttgtttggtggtaacaaaggaaaggaaagggcttctggatggctttgccacaagcttacctgtgggttcacagtcctgagaaggccaccaccagttcccatcagcactgtctccatgcagccaagttgcatgggtcccatgtccagctgcctctatgggcttcaggggttattctgcttccgtgaccccacaccccactatgtgcaatcctcaaagattggtcctgattctatattcctggacacctccactgcctgttcctgggggatatctacttactccctgtgatggaaagccctataagcctgttgagtctaacagcgtacaagaacatgaccctgtgacctattgactggggcccccagaaa

SEQ ID NO: 695144 - DNA, 808 bp, Homo sapiens
  misc_feature (450)..(450): n is a, c, g, or t
ggcacactggtgactacgcagcttttggcgatactgctgcgtcaatccgcgggcaaggatgggcaatgtgtgtcaccaaaggaggacactcgactgagatcagggacatgttgcaggccaataaggtgccagcggcagcccgtgctggagccagtgccccaagtgaagtcactgtgccagcccaggacacgtggtctcgggcccagagaagacctcctttttccaggcctttaggtatcaccaggtccaatctccagggagcaccattgacaatcctgaggctgatagtgcagctggatcaagatctggagacaaagtgggatgcctagcgaagccactgctgctgaacatgcgtcaatacatctcccccttgctcctttgggactggtgcatccagcaggtgttcgacaatggcatgcatctacaaccgctgaagtgcttagatatcancagatggaaactctgcaattctcgcttcctggagggtgtccgcaatgttagccagtgtctgtctgcagaattggctacccaactgttgcatcagtaccccattctatcatcaacggggacaaacgagtcctggccttgtctgtggagacggattacacctgtcgcacagcttgactgaaaaggtcaaggccttcttggctgatccatctgcctttgtggctgctgcccctgtggctgctgccaccacagctgctccattgctgctgctgcagccccagctaaggttgataaccaaggaagagtcggaggagtcggacgagatatgggatttgtgctctttatttactcaccataagca

SEQ ID NO: 695145 - DNA, 1604 bp, Homo sapiens
  misc_feature (1371)..(1371): n is a, c, g, or t
gcaagtgtgctagaataccctgatctccagggtctaaagagacacagctgagacccagaaaatgatcttcgagtggtacctcattgtgcggagaaccagagaccctttcgagccccttagaaatgcttatttatccgcgtgctgtacctctcacgcgtccagtcattgctcacactgcacctcacgccatactcactgggtctcgcattctcccagaataccttggaaggaatcttcctaggaggaatggcgagttcaacgacggaatagacctgtatgactcaatgtgttcttgccagaagtcgtgcgctgtacttggaaagggtctgagcggctcctctgtaatagcactgccattcaataatccagcctacgtagacccaggcacggacaggcctatcttgcgccttccggagggatccatgtctgggtatagcgccccttggcccaaggctttcactccagactagtgtagcttgaatgttctctatgcctggggggtcaacatggcggcgaatcctcacttcatacaacgtgctccgagacgtgacaagggtccgactagcgaggcgtgacaagacataattgttagagtataaagcttttgacaagtaagggactcgggggtagtataaaaccattaggtacgttggacataaaccccacgaatctcacattacgaaaaatctaaggctgaccacacgtgccttccatacctaggtcggccccatttgcccccccaaggatatcaaacgcacgcctttctaggttctcgcgaatggtacagggtcactcttcctaattactcaggatcccttgcggctatattttccccttgtggagaatggaacgaaccctgggtgggcaattaacccataagacgatctcaatagcgtctgtggacgattttgctctaatcgcaacggtaatttcctgggaaggcgaagactgaatagcggataggagcccagtggcggttctatctgtggcgaacttccaacccgtttttgtgaggttcctacccataccaaatggagatgtttattacccatagactgaaggtcaaagggtataccctttctcaaccccaaaatttgcctaaggtaggtaactctaaacgcgtaccatacgtggcgccgtccttttacaagaatgactcctatggaaccatagggaaaacccgcaaattataggattccatgaagggccgcaaccgtaacgtgttacttcggttggttattccaagtacgttaaacccaaaggcgaagaaaggcgctcccttttgaagcggcatacagcatgctgctgaatgagcataagacgcatctcgcgatgtacaacaaccgtccggtggagccagaatttccaatncccgggttcaccgaaggaactaaaatgtacgtgtttcattgtccccccattgtttgggacggccatttatcctccggaattgtaaaacgggtgagaacacgagcatgcgaattttgggcgccatgcgcggtgtcacatttctttcctccttgtggatagttgcggcccccacaaccgtgtagtggtcatcttccggacttatttgtgggccactcctagacaccaatagaatt

SEQ ID NO: 695146 - DNA, 195 bp, Homo sapiens
gtcgtatctccctgagtccattgatggccatctacagcctctggccccatccagactatccctttacctggagcaggactacttcctcccccagacagttcttccctggacacatctattcattgcccgtatagattctagggttcaataagcttctccgtctcaaacactctcacattactccgtctgaatcta

SEQ ID NO: 695147 - DNA, 108 bp, Homo sapiens
tataggagcattactcccacataggaaggcagagccctcatggccctttggcttcccaaaattctcatattctaataccaccagggtgggaaccaaatttcaagcagg

SEQ ID NO: 695148 - DNA, 351 bp, Homo sapiens
atctcactacacaatgcgcatgacgccgcggggctctgtgagtatgtcaacgttctcatagctgtacgccatgatcactatgcctgagtaattgatagatgactatgtgattacatacatgcgagagaaagaaagaactcgagggagaatagtgaagcgatacttgtggaagatggaaatggaagttcttgtagtgcattatgtgttctatagtctagggaggatgtatattgtggaatctaccgatatgcaacatgtgtgactgatttgccatgaactaagacttatggtcgggatgactttggcattggttttgtccttcaagaagctgagaacgaacagttccccctg

SEQ ID NO: 695149 - DNA, 368 bp, Homo sapiens
  misc_feature (261)..(261): n is a, c, g, or t
  misc_feature (275)..(275): n is a, c, g, or t
  misc_feature (334)..(334): n is a, c, g, or t
tgagatggagtctcactctgttgcctaggctggagtgcaatggcataatctcggctcactgcaacctccacctcccgggttgaagcaattctcctacttcagcctcccgagtagctgggactaccggcatgtgcaccacgcctggctaatttttgtatttttagtagggacggagtttcaccacattggccatgactgctctcgaactcctgacctcaagtgatctgcccatcttggcctcccaaaatgctgggattacanggcacgagccaccngcgcccggtcaagaaccatgtaaaagcccctctaagtcatgttggcataaactcttaanttcattcttttttaaattgactattttcattagt

SEQ ID NO: 695150 - DNA, 115 bp, Homo sapiens
gcaaacccaccccaccctaccaccagacaaccctagccaaaccactttatcccaaaaaaagtataggcgatagaaattttacaccctgcgcattatataatagtgaccgcaaggg

SEQ ID NO: 695151 - DNA, 676 bp, Homo sapiens
ccccgagggttaagataagcttgattggggatggcggggagatcgcttgaacccagcagttcgaggccagcctgggcaacatagcaagacctcatctctacaaaaacatgcaaaaaattagctactcaggaggctgaggtgggaggatcacttgagcccaggaggtcaaggccatgatcggctgcactgtactccagcctgggtgacagagcgagaccctgtcaaaaaaaaataattccttgcttttacataactgggtaagaaggtggacgtgctagtaaggtccaaacactcttgtcctttttttcttatttttttttttggcccccctctggggggcttcaaccccctgtggaacctttaaggaggctttggtggtggtggtggtggtgacattctttttaatttaggcccttttttggcctctctagagagctttggtgttttaacaggccttcccaaatcgattccttgcggccgggggtacccatattttatagggggcccgccccgggtgaccccccagttttggccctttaaagggggaaaatggccctgggaaaccaggcaaagtggcctgggaaacctaaaaaaaaaagggtcgcaacatacacaaactcacacccactcacctaactacccagcccaacaacgtttacagcgagtaaccaacaca

SEQ ID NO: 695152 - DNA, 494 bp, Homo sapiens
ctagctgggtgatggagtgacgagactattgcatgatcagtctgtacttggaaatcgtttctccatctgtttgagatgtgtgcagatctgtgcttacccattgaattttattttcaatggcaagcacagatagaattgcataaagagtcctagtaatccatcatagatatgagaatttttgctgcacgtctatgtggttttttttttcatggtggatggaggggatttggtaagcatgtgttaatgttccagttccatgggctgtcagaatgataaactttggagtgtctctctggtgagagtgatcatctaaccaaatccctcttctgttatggcactgtgtgtctaaggtgttgtatttatgttgccaccagctacccattatcactccattctttctgggcttatatggttgaaggagaatggtcctgtatcacagtttctttgagccctttctccatccctggccaaaagcaatcttaagttatttgcca

SEQ ID NO: 695153 - DNA, 1006 bp, Homo sapiens
agcacaggagcagtcacctgctgccactgctactgccgctactgctgccggcgcgtctgcacctctcgtgcctgccagtgtacctgccggcgccttcggttcgaccgtcccctcgctccccgtctcctcgctttgcgctctctgtatctccttgtttcgttggctcgctgacgctctctcgtccccggccgcgcccgtagcacacacaccaaccccagacaaccccacacccagccgcaccaaccaacccggacccacacctgcccaccgcatcacgccaccccatagcagcgaccacaccaacaacctcccactacactcactccacctcacctccgacgcgacacaacacgccacctacacataacgagataccaacactccctaacgtctccactaaacaatagcaaataccatacaattaacacaacaaagaaacaaaacacaccgcacacaaagcccacatgtggaacctgccacatccagcatacgtacacaccccactcatatacctactcgacagacccccgccacggatatcgtgagcctttaccttattagaacatcaacagataattatttgatccaaacctacagactacactctagaccaccaacaaaataagacataataaaacatactaatatatatatttatctactagaacactacacaaccttacaataataaaaatacagtcgaccacaacatacaaaaaacgaaaacggacagaacctcacacataacaacacactcctcgcaccacaacgagaacaacgcccaccccacgccacacgcgaacgagccagcacccactagccaccgcaccaggctctcgtctacacttaccccgctcacccaacaaaagagaacgcctactagccacactctagcagctaaccacaaacacgatgctgaccacacactacagactcagaactcacccgcactcacacaaacggcgccacaggaacaacgtagcaccaaccatgcgcgtacacagag

SEQ ID NO: 695154 - DNA, 332 bp, Homo sapiens
gctcgactgactcttaatattaaccatcacatcggtaaacccaaaggaatataaaccgttcgaagatacatgcattcatatgttaatcacagcactattcacaatagcaaggatgtggaatcaacttagatgcccatcaaccatggactggataaaaaaattgtggtatatatacagcatagaacacgacacaggcataaaaaaagaatgagatcatgtcctttgtagcagcatggatggtgctggaggccattatcctaagcaaactaatgcagaaacagaaaaccaaataccacatgttctcacttataagtgggagctaaacactgagt

SEQ ID NO: 695155 - DNA, 513 bp, Homo sapiens
  misc_feature (28)..(28): n is a, c, g, or t
  misc_feature (36)..(36): n is a, c, g, or t
  misc_feature (154)..(154): n is a, c, g, or t
gttaagtgaaataagcccagttccaaangaaaaatnctatatgattctactaatatggggtccataaatagaaccagtagaatggtggttgcttgtgggaaggcagaaatgggagctgtctaatgggtacagagtttgttttgccagatgaaancattgggagatctttttcacaacaatgcgaatatacctagcactactgaatgtgcacttaaaaatggctaaaatgggccgggcgtggtggctcatgcctgtaatcccagcactttgggaggccagggcgggtggatcacctgaagtcaggagtttgagactagtctgaccaacatggtgaaaccctgtctctactaaaaatacaaagaattagctgggcatggtggcgggcgcctgtaatcccagctactggggaggctgagtcaggagaattgcttgaacccaggaggcggaggctgccgtgagccaagatcgtgccattgcacttcagcctgggcaacaagagtgaaaatcagtctc

SEQ ID NO: 695156 - DNA, 527 bp, Homo sapiens
gaactactctttagagagaattatccccattgtgctggtgtgggctcagctactttgggaggctaaagcaggaggattgcttgagcccaggaattcaagaccagcttggtcaacataacaagactccaattccaagaaaaaaaaaaacccaaaggacaaacaaaagaagaatttaggctgggtgtgctgcctcatggccttaatttcaatactttgggaggccaaggcaagaggagtacttgagggcagaagttcaaaaccagcccgggtaacagtgagactgtctctacaaaaatttttttaaattgtagggcgcagacactttgggaggcgaaggcggccagatcacttgagctcaggagtttgagaccaacctgggcaacatggtaagaccctgtcaccactaaaaatacaaaaaattaaccaggcatgatggcacacacatgtgtgcccaagctactcgggaggctgaggctggaggatcgcttgagtccaggagttttggcctgtagtgcgctttgccgatc

SEQ ID NO: 695157 - DNA, 1003 bp, Homo sapiens
  misc_feature (1003)..(1003): n is a, c, g, or t
taatagtggtgctttttggaatcagcattacaggtggcttgttttacacgattttcaaagaacttttttcttcatccagtcctagcaagatatatgggagagccttagaaaaatgcagatcacatcctgaggtgatcggtgtctttggtgagtctgttaaaggctatggggaggtgacaaggcggggtcgccggcagcatgtcaggttcactgaatatgtaaaagatgggctgaaacacacgtgtgtgaaattctacattgagggctctgagccagggaagcaaggaacggtgtatgcgcaagtgaaagagaacccaggaagtggtgaatatgattttcgatatatatttgtagaaattgaatcttatcctagaagaactattatcattgaagataatcgatcccaagatgattaaaatagggtttctgatggatgttgaatggcgtggactcgctactccgttcttcacagctgccttccagaatgtgttcaaaagaaagacaagaaggagtgtatggcttataaagtgaatctaatacagtatttgttgcatttaaacaaactagacattttcttacggaaaaattatgaaatacagcatattttatgttctcccattgactcaatcatgacaatatttctgctttaacaccatctttcatgattagaaatgtttgttattggaaatgttacaccatgtaaataaaggaaatagattttagtattgtattcattttatattatagaactccataagtctggcggaataaaatttaaaactaaccaactaaaaaagaacaagaaacaaacagaaggagaaaatggagagagaggcaaggagaaccgaggaaggaggaggaagggacggaggagggcggaaaaaggcagaacgtgagagcgaaaggcggacgaaataggagaggagagggaggaggaggagagcggagagaggaggagctaagaggggaaacaaagaagaagaagacggagttggggcgcagn

SEQ ID NO: 695158 - DNA, 949 bp, Homo sapiens
  misc_feature (949)..(949): n is a, c, g, or t
taatagtggtgctttttggaatcagcattacaggtggcttgttttacacgattttcaaagaacttttttcttcatccagtcctagcaagatatatgggagagccttagaaaaatgcagatcacatcctgaggtgatcggtgtctttggtgagtctgttaaaggctatggggaggtgacaaggcggggtcgccggcagcatgtcaggttcactgaatatgtaaaagatgggctgaaacacacgtgtgtgaaattctacattgagggctctgagccagggaagcaaggaacggtgtatgcgcaagtgaaagagaacccaggaagtggtgaatatgattttcgatatatatttgtagaaattgaatcttatcctagaagaactattatcattgaagataatcgatcccaagatgattaaaatagggtttctgatggatgttgaatggcgtggactcgctactccgttcttcacagctgccttccagaatgtgttcaaaagaaagacaagaaggagtgtatggcttataaagtgaatctaatacagtatttgttgcatttaaacaaactagacattttcttacggatatttctgctttaacaccatctttcatgattagaaatgtttgttattggaaatgttacaccatgtaaataaaggaaatagattttagtattgtattcattttatattatagaactccataagtctggcggaataaaatttaaaactaaccaactaaaaaagaacaagaaacaaacagaaggagaaaatggagagagaggcaaggagaaccgaggaaggaggaggaagggacggaggagggcggaaaaaggcagaacgtgagagcgaaaggcggacgaaataggagaggagagggaggaggaggagagcggagagaggaggagctaagaggggaaacaaagaagaagaagacggagttggggcgcagn

SEQ ID NO: 695159 - DNA, 766 bp, Homo sapiens
  misc_feature (697)..(697): n is a, c, g, or t
  misc_feature (715)..(715): n is a, c, g, or t
  misc_feature (734)..(734): n is a, c, g, or t
  misc_feature (762)..(762): n is a, c, g, or t
agaaaaaagagtaaacagaaatgaacaaagtctccaagaaatatgggactatgtgaaaagaacaaatctacatttgattggtgtacctgaaaaagatggggagaatggaaccaagttagaaaacacccttcaggatattatccaggagaacttccccaacctagcaaggcaggccaacattcaaattcaggaaatacagagaacaccaccaagatactccccgagaagagcaaccccaagacacataattgtcagcttcaccaaggttgaaatgaaggaaaaagtgttaagggcagccagagagaaaggtcgagttacccacaaagggaagcccatcagactaacagcagatctcttggcagaaactccacaagccagaagagagttggggccaatattcaacattcttaaagaaaagaattttcaacccagaatttcatatccagccaaacgaagcttcataagtgaaggagaaataaaatcctttacagacaagcaaatgctgagagattttgtcactaccaggcctgccctacaagagctcctgaaggaagcactaaacgtggaaaggaacaaccagtaccagccacggcaaaaacatgccaaattgtaaagaccatcgatgctatgaagaactgctcaactaacaggcaaaataccagcttacatcatatgacggatccgttccacatacaanttaccttaatgtaatagntagtgccattaagcagagntgcaatgataaagcagacatatggtgtnggac

SEQ ID NO: 695160 - DNA, 1102 bp, Homo sapiens
  misc_feature (1102)..(1102): n is a, c, g, or t
taatagtggtgctttttggaatcagcattacaggtggcttgttttacacgattttcaaagaacttttttcttcatccagtcctagcaagatatatgggagagccttagaaaaatgcagatcacatcctgaggtgatcggtgtctttggtgagtctgttaaaggctatggggaggtgacaaggcggggtcgccggcagcatgtcaggttcactgaatatgtaaaagatgggctgaaacacacgtgtgtgaaattctacattgagggctctgagccagggaagcaaggaacggtgtatgcgcaagtgaaagaggtgtgggaatcatgggatgtggggtcagaggttctgagcgcggtgttatttaagttctggaaaggaaaataatacctggaaacactacatttttttcagaacccaggaagtggtgaatatgattttcgatatatatttgtagaaattgaatcttatcctagaagaactattatcattgaagataatcgatcccaagatgattaaaatagggtttctgatggatgttgaatggcgtggactcgctactccgttcttcacagctgccttccagaatgtgttcaaaagaaagacaagaaggagtgtatggcttataaagtgaatctaatacagtatttgttgcatttaaacaaactagacattttcttacggaaaaattatgaaatacagcatattttatgttctcccattgactcaatcatgacaatatttctgctttaacaccatctttcatgattagaaatgtttgttattggaaatgttacaccatgtaaataaaggaaatagattttagtattgtattcattttatattatagaactccataagtctggcggaataaaatttaaaactaaccaactaaaaaagaacaagaaacaaacagaaggagaaaatggagagagaggcaaggagaaccgaggaaggaggaggaagggacggaggagggcggaaaaaggcagaacgtgagagcgaaaggcggacgaaataggagaggagagggaggaggaggagagcggagagaggaggagctaagaggggaaacaaagaagaagaagacggagttggggcgcagn

SEQ ID NO: 695161 - DNA, 1316 bp, Homo sapiens
cgtcctgttcactaactgcgccgctccttctgctgggtatgcattcttctcttctatctcggtcgctctctgtgtgcttcgtatcttgcttcacgatcacggtgtgtgcgctcgtcatgcttttccgtcggtaatgtgtgcacgccgccggcgctgtgtagcgccgcgtgtatgcccctctttttttttcctcgtggctcttcatcaagctgcgtctgccgcgggccaggcattttgttgtgggctgtagtatagtcgacgatcgtccgccagggcgcccgccaacggtgttggggggccccctctcgcgggggttgtgcctagccgccgcttttcgtgattcgccatttattgtgtgttgtgcctccgatatggtcgccccctttgttcgctcccggatcagtttgttgtcgttggattcccgtttgtacatttcaccctggcccgtggcctttgggtttcgtcgacacatggcgtcgtgttgtacgtggtggatctcccgccgttgcccagttgccgaagcccccccggggtcaagcccgtcagccctttaggccctcctgatttatttcttaccccaccttttagcctagcccgtgtgtactcaaatcctcgtgatacagggttgagccatctcaactcctaatttacccccctgatacggcgccactgcggagcagtagccccccacaccaatctcaaaatgaagtccaccccttagccatcagttgctactattccaccacttatctaataaggtggctccctttaaacctttcccgcccttatgtcacccacaccaaggaacacccttctgattaactcctgccactcatgaccccttggccataaatattgatttaatctccaccacctagcacgaggactccatccgagacccccttcgacccttgccgaaaggggaagtccgaaactagtctcacggcttcaaacacttgagatatccccgccacggccccttcgccctatttcttcaatagcccgagaatatcacccacaccacttatttaataaatataacacccctcacccacctaccacattcttcctatgggaccacaacacatattgaacgcacactttcccctgaacttctacacaacatattttgtcaccccagaccctactttctaacctccctgtttcttatgaattcgaacagcatacccccgattccgctacgacccaactcaaacaccctcctatggaaaaacttcctaccactcaccctagcattacttatatgataatgtctccatacccattacaatctccagcattccccctcaaaccta

SEQ ID NO: 695162 - DNA, 1180 bp, Homo sapiens
  misc_feature (833)..(833): n is a, c, g, or t
  misc_feature (878)..(878): n is a, c, g, or t
ggcatgtgttgcgccggcgttgtcctgtctgcttgggggctccctgaagaaatccccaggcccgctccattgcttctgcacatgtctgatctcacatgggtgcccaggagattcaagagaaatagatttcatgacatctttagtcgctcaactgaggacgaggtattttatttctgataaggtggtagatcagggagatcatgggaccatcttctgtccctgtgctttagtgctcggtccggtgcgactgtgtttggcatctccagacatggttccagttaactgcgttgcttggcttggagacgcgtttggattcatactgcgatgtgtgactcatttgcggtgcgtatcgtcttccgttgcttttcacttgagttggatgagatagctgtagtttgctggcgtcagcgtcctggaaatgcgtcgggcgcgtgaagatgcctagccgccgccgacgcagactcatctgtctccttcccagctcttgttccgactttaggtctattcatgcgcgacaagcacgttggacacccctggggctcgagagatgggtcacaaagactacgtagtagaggagatagtagcggaaacatgtctcgcatcttgaccctaggatggcattcattagtcagacaggcagtgacgcttaggttggcaccaagtagatgggtgcaggttcaccaaaggcttcgatgtcaagggtggactcaagaatgtccttggctaatttgtacaaggacgctctgtgatcggacaaatcccaaggagggcctgaaacacaaagacgacgagatggagttttggagaaaacgcgaagaaagcgccatcatcgntactaataacaagtcttcgcatggtcgtgtctataagagttgcgncgttgtttagctactagtccacccttgttgagaaggtgtcttatactaacgaaatgcattcttgtggaagacagacctatgcacacatattggaatcccacgcatgatgttcgatggcaacgggtgctttcacagcgggcttccttgatgtaccttcccattggccattagcaattgggaaaattcttgagactaaactttcggtggtttgtaccttttttttcccatgtaaagcgcctctccttgttctgagtgcgccccaaagtgggacacttttgggaaggagaccagcccataacttg

SEQ ID NO: 695163 - DNA, 348 bp, Homo sapiens
gcagactggtactaaagtgactctgggggactggtcccttgggaatcagagggcctgaagcatggaccaagatgacctgggctacctgcatggaaacctctctctcctaccaggagagccctggaactaagcctggctctggtaaatagctccaatgtgcgagccatgatgcaagagctgcaggcctttctggagtcctgccctcctgacctacgggctgacctgtgcctcaggcatcctgctggctgcagagaggtttgctccaaccaaacgctggcacatagacaccatcctgcatgtgctgacaacggcgggcacccatgtgcgggatgatgcagtggaccgtag

SEQ ID NO: 695164 - DNA, 1039 bp, Homo sapiens
gctcgcgtattccctgggagatgaggccgggacgttctccctgactgctggtggctggtgctctgtgaagctggtgcaccttcgtgaccgctcacagctatgaccaacccggagataacaacagaaggtctcaaatcaagtgaagacatgtcgcctgagacagccttcagagaagcataacagcggtcgaacaagcccggcggggactttgcagggtcgtccaggggcctcattcgatcccaggtcctaacatccagatcactacagcggtttgcatgtgcatcgggctgttcgtggtgacgtatatcccctagtaacgacctgttgaggatctaacatgacgtagcttggtggataccctgtattgatgtcgcgcgtcggtaattgcaatctgttcttaactgtacttgcatctatattcccagttgggctacagagggcggacgagggctgtgactcggtcactcacacatggtcagtcgagtcatattcgggtggactgctaggatgggaaaacacgcgaggcgtcagaagagtatttgagacttgtttgacctagtattaatccatctaattttctgaattcatattacgatgctatagacctggcattatgcgtttattaatccagaagtacctgatgaaaagaattttgatacattgatgaaaacatctgatggtcttacattgaatgctgaatcatatgtttccgtttacaaccaaaaatggaatattgctactggcttgctaaattattgagtatgggggttctcttgctaaaacttgatattcggtatatgagattacttcgataccgtgataatcatcgctgtgcagtgataaataacctgaaagtcgttcttgatgaaccaggctgtaagttgggccggaaaaataatttagagcacgtgtattaatttaagcctagaggggggttaaaaggggccgaaattgaggtccttgttagaaaagtccttatgtaggaatggataagttaattaatctaccgaggggatatttttacaattttaatggatta

SEQ ID NO: 695165 - DNA, 406 bp, Homo sapiens
agttcgctcattagatacatgcgaatctttgtgttatatactgttcattgtgtgcctaatcccctgttaggggtctaaatttttactttcttctttgttttttctttgtctgtactgtttttgtttagagacagggttctcactccttgctctgtcatccaggctggaatgcggtggtgcaatcttacctcactgcaggctctgcctccggggttcaagtgattctagtgcgtcagactcccatgtcgctgggattgcaggaccctgacatcatgccttgcctaatatgttgtatttttcagtgcagatcgggttccaccatgttggccaggcttgtctcgaaattctgacctcaaggtatccgtgcagctcggtcctctcaaagtgctgtgattacaggtgtgag

SEQ ID NO: 695166 - DNA, 99 bp, Homo sapiens
gcaggtcaaaaagaacctctattactttttatgattgccacttatgctttcttcccagatgcctttgcaccaggtgctttctgggctggagctttttga

SEQ ID NO: 695167 - DNA, 518 bp, Homo sapiens
cgcgctctcctcgccggcgcgcgccagcctgcgcccgccgttgcccccagtgcctgggcacctgttggaggcagagccagggtgctgcatgatgggccgcaggggcgatcgcatgaccatcaacatccagtgagcacatggtccatcaactgtgtgccccgggcccatcctggcccatcctgctcagcatctctgactgacttcccactcggtgggacctaggacctggaaagggggctggcggtggtgcttgctgcgtggcaggcgccccctgcccatccttggtcccctcattggcctgctggtctgcctctcctgttcggggaccccttctcttttggggcgacttgaatctaggcttccacatgcagcgccattgcgtggccagggcacggcttgcgtaccgagcgcttatggaacgttcccgctttggattgctcgcgcccgacgctttaggtccagctgcctgggtagcctgttggaacccatttcttcctatggactcggggcccttcctg

SEQ ID NO: 695168 - DNA, 103 bp, Homo sapiens
ctctagagtgatccctaagagtgagctacagcatgatctattgcaaagagtgaaagaacaaaacttctacagtgctggaacgcgggacccaagtggtgttgcc

SEQ ID NO: 695169 - DNA, 262 bp, Homo sapiens
gagctccgtacctaaagcgaaggtcaaaggaggacccaagatgagaggaggaaggaggaggaggaaagaggaggggtagtaagcaggaagaataatagaaaggaaagaagaggtagatcaagaaggtagggagtagcaggacgctatgctggcatagtagtagggcagggaaataagtagtagtaggaggaaagtagtagtaggcaaacgcagaagtaaggtggccagagtagcagtaaatacacgtcctagcacataccca

SEQ ID NO: 695170 - DNA, 397 bp, Homo sapiens
atggagtataacttgacttctatgtgttatttgattgaatcttgtgacattcgggaatgattcagcttataacacgtattatttatcaaaatgttatcaaagtaatatcatgtgataatctaggatgacataagaatatctgtgacttggacagaattatagtctgtgaaggaacagcttaaatacccaagattgtacttatatttcaagagggctgtagtaataacgtttgatttaatgatataaatgcagtaggtaatccaggtatagtaaatatgttttacagtgtgcatagtctatgttaataatttattaaaatactgagacatttaatattgtatttttatttatagcaatttaacttcaattatgtgacaagctttaggtgatagatgag

SEQ ID NO: 695171 - DNA, 930 bp, Homo sapiens
ggagagagagagagagagagagagagagagagagagagagagagagagagagagagagagagagagagagagagagagagagagagagagagagagagagagagagggggggggcgggggggagcgggcgagagagagagagagagagagagagagagagaggatcgggtgtgtgtgtttattatagagagagagaagagagagatatagaatagagagagtgagtgagtttattagtagagtgatgatgagagatgagatgatgtgaggtctgagttgtgtgtctcatttttgttgtgatgatgatctgctgtgtgtgtgagtagtagtagtagtagtagtagttgtgaaggatgagagtactagtaatagtaatagatataagagtggtagtagtaggagtagtagtagtagtggtggtggtggtgactgactactagcagagtagtagtagtagtgagagcgtcgagcgacgccggcccggaagcaggcacgagtggtgttgttgtttgtcgtcgttgtagctgggacgactgctagcactagttgatgttgtgtgcttcttcgctgcgtcatgcggcgaggcggaggaagggacagagcgcgcctcgttccttgttgttgttcaggaaggaggagccggcgctagtagtagttctagtcggtagacgacgtccgtggtgggaggagggaggcggaagacgaacaagaatagtatgaagaatggagaatgggcgaacggagctaagtcgcttgttagtttgtaggttgttagtgagagtgttgtggatgactggggagggggtgatagtcgtaagcagtcgttgtacttattagtaatgcggaggaagtgggaagagtcgatgattaataggtaggaggaagggaggagagaggtaggtgttttagggaggatgacgacggaagagg

SEQ ID NO: 695172 - DNA, 484 bp, Homo sapiens
  misc_feature (218)..(218): n is a, c, g, or t
  misc_feature (220)..(220): n is a, c, g, or t
  misc_feature (266)..(266): n is a, c, g, or t
  misc_feature (276)..(276): n is a, c, g, or t
  misc_feature (329)..(329): n is a, c, g, or t
  misc_feature (348)..(348): n is a, c, g, or t
  misc_feature (382)..(382): n is a, c, g, or t
  misc_feature (406)..(406): n is a, c, g, or t
  misc_feature (413)..(413): n is a, c, g, or t
  misc_feature (417)..(417): n is a, c, g, or t
  misc_feature (477)..(477): n is a, c, g, or t
  misc_feature (479)..(479): n is a, c, g, or t
gggggggaggggggaaagagggggggggggggggggggggggagaggaggggaggggggaagagaaaggggggggagaggaaggggggaagggggggagggggggggggggggggaggggggggggggggggggggggagaagggggggggggggggggggggggggggggggggggggggaggggggggggggggggggggggcgcggggggcgggngnggcggggaggggggggagggggggggagccccaggtggggggaccngggggggagngggcccccccggcaagcccgcgccgaccgcaggtaaaaggtgctcctttgccngggtttggaggccagcgcngccacacccacggggcaccgccgggcgagtttgngcgaggccccacgtttaaagcganggcaccnccgncccaggggggtgtgaggattacccagtgtggtaggtgctcaataaatgttggtcaatgtnancactg

SEQ ID NO: 695173 - DNA, 545 bp, Homo sapiens
tcggtgaccgccgccgccgctgcctcgagctgatcacgcgccttcgtcgcagccttctccgcgcgagcacgttctgtcgacgccttctcgacggttgccagtgcctcacgaaccgcgcgtacgtcaccgtcccgctcctcggcgtgcccgcgaagagcggtactgatctgatcactgcgagccgtgcctggcagcggtgtccacacgatgcccgcatcctcggctgcagtctgcagctcttcctccgcgcgcgtcacgccggcaacggagtcacggagtgcggagtccgcccgagcggcctcgacggtgcgctgttccagttctgcttgcgctttccgtgcccggtcggcctgctgtgccgtcgacacttcgagcttggcagcagattcggcgaggtcgtccagttgctgcttgccctcgtacgcgctcgagcgctggagagtctcgcggtctgcgacggcctgatccaatgcgcgttcggcctcgtcgaaccgggtttctgccgccgctcgttccagcagccgccgatccttcagcgcggccgc

SEQ ID NO: 695174 - DNA, 491 bp, Homo sapiens
cgcgtacggcactatgggtctacgtgcaccagcacaggtagtccagcctgaaataacagactcactggatacgagcgtcaccaaacaatgcatggttctgtatgaagctctattgaagggcgagtgggatttgaatatttggacccctgccgctgaggtacagaagaagacgtatgccttcaactgtcacagactaaaacgcaaataactatcgagcacgatccacccagtcaatgccatttcttctcacaatatccacaatacatatgccacaggctggttctgatggctttgtaaataatatgggatccatttcacaaaacgcgactgtgccaattccatcgataacccacgaacatcgcatcacttgccttcagtaatgatgggactacgcttgcaatagcgtcatcatctatgtctgaaatggatgacacagaacatcctgaagatggtatcttcattcgccacgtgacagatgcagaaacaaaacc

SEQ ID NO: 695175 - DNA, 560 bp, Homo sapiens
ccctagagttcccagtgtcttcaagacaagataggctaccttccttgtttgtttcattagtggctacatccccaggcttagaacagtgccttgttcctgccaggcgcggtggctcatgcctgtaatttcagcactttgggaggccgaggtggtggattgcctgaggtcaggagtccaagaccagccctgaccaacatggtgaaaccccgtctctactaaaaatacaaaaattaactgggcatggtggcggacgcctgtaatccaagctactccggaggcagaggaaggaaaatcgcttgtacctgggaggcggaggttgtagtgagccaatatcttgccattgaactccagcctgagctacagagtgagactgtgtcttcaaaagaaaaaacaaaacaatgaatacatatcaccgaaagaggacaccaaactgggtatagtaccaaacgggttcagagggtagattagtaggattgagtattcactggattgctgaagtgtgtgccataggtcacacatccagttctgggcttgagagacgacaggatccctgcttcttg

SEQ ID NO: 695176 - DNA, 198 bp, Homo sapiens
tatgaggatgtccagcatccaggcatcaatgtcatcagcatctgactggaactggtgcagcagggaggccacctaccaggcgcttcttccgaatggccagagagctgctctaggtacggcccactgctcccgagatgtaaatgatcctctacacggatctatctccgacccgcaagtgctcctccgacgctcatgtct

SEQ ID NO: 695177 - DNA, 427 bp, Homo sapiens
tctgaccgttgacgtcgtagaccgtggcaccgtgagccagctcgagcagctccgagccgttctccttgaggtaggcattgcagtcgacgagcagctggtcgtcgatggcgtgagcggccgcccacttgtagatgctctcgttctcgctcttgtcgggcttggtcaccggccggaaggtgagctggtcgacaccgttggcggtggcgaagtcgatcatcttcttcatctcgtcgacgctgtcgagatagcccttgaccagcaccgttgccagacgcacggtgaagttgaacttcttcagcttggcaatcagagccggcaagtcttggtactcgcggtgaggcgtgtaaatcgacttgttcttgctgcgctcgcagtgcaccaccgaaatggcgatggtggtgaggccgaggtcataccacttttgcag

SEQ ID NO: 695178 - DNA, 468 bp, Homo sapiens
gacctctactcccctgacacaaaatcattcaagaagaaatagatacagcctgagcaacatggcagaatcccatctctacaaaacatcaaaaaaaaaaaaattagtcggggcatgggggtgcacaccctgtaatcccaggtagctgccactacaggtgctgcaccaccacgccgggctaattttggtatttttagtagagacagggtttcaccataataagccaggtgggtctggaactcctgacctggtgatccacccgcctcggcctcccaaagtgcggggattacaggcgtgagccacctggcctgggccaaaaatctcagaatcctttaagacggttttaatggctccatcagtaatttggaagcactttcctttttttttttcccccttttgggccctttccccaaggccacaatggggtggaataattgtgggcggggaaaaagaagtgtaggaagattcctg

SEQ ID NO: 695179 - DNA, 333 bp, Homo sapiens
  misc_feature (140)..(140): n is a, c, g, or t
  misc_feature (260)..(260): n is a, c, g, or t
tcaacttctacagtcaggatatcatccaggagagcttccccaacctagcaagacagaccaacattcaaattagggaaattcagagaaccccagtaagatactccacaatgaagatcaacccctaaggtgcataatcatcnagattctccaagagttgaaacggtgtacgaaattgacacgttcatatttctacacacaaaagttatacgccacatgtgccgtgtatagcgatatatacgggtactactccacatgtttgnacgcatccacagtggaggtcttataaagcgcatccctatgcacgataagcgggaggactactcaaagaaagga

SEQ ID NO: 695180 - DNA, 547 bp, Homo sapiens
gtgcggaggattatcctggcggctcatttctgattctcctctgctggtccaggtatgctctgagttgcgaatctcagtggtttcacgtcgaggttgccgtgctttagatgccatgtgtcggtctgtaatcacgtgtttctgggggtgcgggaaggtctgtggaaacctgacccctgtacagtcgtgctgcaggtatagtgccttgctccaggtgtctatgcaaagctagacagtcatgatatcctctgttgttttgatcctccttatacaacccaaagccaacagaggatttcaacttccccaaatttctgccctgagcattaaacaactttttcctatgctaaatttggttttagttttgaagtgcctgagatgcacaattcaaaggggtcaagttcctggcctcttatgttgatgaaaccatccccaatcctcagcttacatggcttgcccctatgcctaccacctcttatagctcttccatccatcattcaagaggttccatgaagaaagctcagggttaatgtttggggtagtacaagctaaa

SEQ ID NO: 695181 - DNA, 1096 bp, Homo sapiens
gatggccgaggcagccccttaggcggcttaggcctgccctgtggagcatccgtgaggggaactccggccagcctgagtgacgtgatccaaagagcgctcccgggtaggcaattgccccaatggaacgcctcgccagagcagcgtgtagcaggcccccacggaagattaacacagtggctgaacaccaggaaggaactggcacttggagtccggacatctacaacttggcccaaccaccgagaccacccttaaacatcagtagactgggagctgtacgtggatgggagcagctttgccaacccttgcaaagtgactctgaagaagacgacaagccttgttccggtcacacccggaagctgactggttcacgcatggccgaagcatgaggaaactcatcgcgggaataattttccttaaaatttggacttgtacagtaaggacttcaactgaccttatgctaagctgcctgatcagtggacaggtagctgtgtaattggacaggtagctgtgtaattggcaccattaagccatctttcttcttactgccaataaaaacaggtgaacttctaggcttcctagtctatgcttcccgtgacacatgaagcatagccataggtgattagaaaataatgaatggcccctgaaagaatcatacaatactatagaaccacacttaggcacaagatgggtcatgcggatatcgaacccccatctaaatgcttcaacgaattcttacggtaccaagcggtttacgacaatcttcactaattaaaacccagtcaagcttggacggtctggcccggacagacgaccccgctgacgaaattattctatcagaatttcttatcgccttggacaactggcagccagccgaatacgggactattggaaccaacttaccagtgaagcagagtctgactagccctatacgactaacgggacagcactacatacgttaagcgatccacaagcctggcctgcgcagtgatccgatggggcctaacggctcttttgatgtgtgccagtaagcacttagtgaggaacatagcagagcagcccgagcatactgagaagaaccatacgcgaattacgggcg

SEQ ID NO: 695182 - DNA, 536 bp, Homo sapiens
  misc_feature (10)..(10): n is a, c, g, or t
  misc_feature (62)..(62): n is a, c, g, or t
  misc_feature (125)..(126): n is a, c, g, or t
  misc_feature (141)..(141): n is a, c, g, or t
  misc_feature (208)..(209): n is a, c, g, or t
  misc_feature (216)..(216): n is a, c, g, or t
  misc_feature (222)..(222): n is a, c, g, or t
  misc_feature (275)..(275): n is a, c, g, or t
  misc_feature (277)..(277): n is a, c, g, or t
  misc_feature (418)..(418): n is a, c, g, or t
  misc_feature (448)..(448): n is a, c, g, or t
  misc_feature (524)..(524): n is a, c, g, or t
cagagcaaantcataaaaaaaaatgctttttttttagcactgtcattacaaaaccccaaggngcacatggcaacaaatccacccactatgaccaaaaaaaaaaagccaactctactattggatannccctgaaatataaanaaaaaaattcatccttcttttaaagaaatatttttacccatgccctcactcaatcacagccctgggnnagtgtgngcattntcaaaatggtgcctaaaccctaacttctaactcctatgggggggggggggggngncagggggaaatggggtcaggggtccttggcaactgaacaactaaggatactaaaagggggggaaaaattcaaacatctctcacctgcctcataaggccatggtgaagcaatagattggaatgaagcacaatccctgtgtcngggcctcccagatccctcatgcctgtgggngggcaaacaaggggctggggcaatcatttttctgcagcccaccccgggctgagtcttcagtctcccagcctattanggtgaggcaaaa

SEQ ID NO: 695183 - DNA, 831 bp, Homo sapiens
gtagggaggggggacgatggcgtgacgggtgggccggggtgccagtcctgggcctgatctggagcaccgggaccctgtcgctgaccccactacgaacaatggaccgcgcagggccgatgtgacctgggatcgaccgtcattgcgcgcacgctgtgaggtgccatgggccgagcaggcggacggagagtgtggcacggaaggcgcgcacggccgagggagccgggtactctgagggatgcataggaggggagaacgcacggagtccggtccagtagagccgcgtcgtgggcgcgtggacgagggtatcccgcgaagactgtgcgtgaggcatggggtggaacacgaggtcgagtcactaggacggtcacagggtctgaacactctacattctgcaggatgtggtgagggccacaatttttgcctagggatgcttggggctctggttaagaagagcactccagcgaccagatgatcgtatccccttcctgatccactggagttggtccttcaaggggagcgtcctttgggccccctaggggcttttatacgccagcacggaaggctcggagataagcgcgcccccatccgggaggcatggacgggtgttcccagcggctctgggaatgaaagctatacagggcacgcggaaaccgtggctgagtggtcagccggctgccagggaggagcgcaagttggccacagccgtgctagaacgggccagttgaccgggaaccgggaaagaccctgatgagcatcgccacccggggaggccggggaacgccacaggcgggccccagggctgttacacttaccgaaccgggggcgtgggaa

SEQ ID NO: 695184 - DNA, 101 bp, Homo sapiens
aattcaagcttctaacgatgtacggggacatgtccttgctacttttaaaaacttgcatttattcctcagattttaaaaataaataaataattcatttagga

SEQ ID NO: 695185 - DNA, 534 bp, Homo sapiens
gccttttcacaagatggcgccgaaagcgacagaaggaagctcctgcccctcctaaagctgaagacaaagcgaaggctttaaaggccaagaaggccagtgttgaaaaggtgtccacagccctatctaaaagacagaagatccagcaacggtcacccaccttcctgggctggaccgaaagactgctgcgactcctggagacagcccaaatatcctcggaaagccagcgtcccaggagaaaacaaagcttgaccaatatgctatcatcaagtctcccgtgacctgatgaagttctgccaatgaaagaacagaataggacaagaacaacacaacagaacaactatggatgtacacaattaggatgggaatcatcacaacacgcccaacccaaggcacccagacacttacacacacggcttcgagacagaaaagccttggacattgcacctttgacatgctggccaagggtaccaaaaagccccgttcattacgggccttgccctcacgacagcacgaaggactaatgtacacgacatg

SEQ ID NO: 695186 - DNA, 959 bp, Homo sapiens
aacacccaaccttactaccagacaagcttagccaaaccatttaaccaaatagagtataggcgatagaagttgaaagctggcgcaatagatatagtacccggctagagggaaagatgaaaaattcataaaccaagacataacgatagcaaggactaacccctataccttctgcataatgaattaactagaaataactttggcaaggagagccgaaaagctgaagacccccgtaaatcagacgagctacctaagaacagctaagaagagcacagccgtctatgtagcaaaatagtgggaagatctataggtagaggcgacaaacctaccgtagtcctggtgatagctggttgtccaagagataggaatcttagttcaactttaaattgggccacgagaaccctcgtaaatcccctgtgaattgaactgttagtccaagagcagggaaccagggtctttggagcactagggagaacaaagcattgtgagagagagtaagacaacatttagcatccatagtaggcctaagagcagccagccaagttatgaaagcgttcaggctcaacagccacatacctaaagaatcccaaacgatataaactgaactcctcagacccaatgggaccaaatctatcagcctagtagaaggaactaagagttaggtataagtaacatgaaaaacattctcctctgcataaggcggggtcagattaaaaccactgacctgactaatgtaacagcgcaatatctacaagtcaaccaatccagtcagttattacccgtcactgtcaacccaacaaagggtggtcctaaggaaggttacaagacaggtcaggactcggcaattttacccggggtaccaaaaattactttagcatacacagattgaaggccgcctgccaggccaggttaggcgggacacgaacggcaaaggcatacactggtcctaaaggacggataaa

SEQ ID NO: 695187 - DNA, 338 bp, Homo sapiens
tgctttttgagacagagtcttaggctctgtctcccaggctggtgtgcagtggcacgatctcggctcactgcaacctctgcctccaggttcaagtgattctcctgcttcagcctccccaagtagctgggattacaggtgcacgctaccacgcccggctaatttttgtatatttagtagagacagggttttgccgtgttggtcaggctggtctcgaactcctgacctcaggtgatccacccacctcggcctcccaaagtgccgggattacaggggtgagccaccacacctggcctgtgccattcctttttaccccatctggccccatccctctgctgtca

SEQ ID NO: 695188 - DNA, 799 bp, Homo sapiens
gtagtgggatcgcgcctgtgaatagccactgcactccagccgagattgcgccactgcactccagcctgggtgacggagggagactgtttcttaaaaaaaaaaaaaaaagaaaaaagaaaaaaagcctggttgccagttttaaaattaacctaaaacttttgggttacattcagaaagtacatacaagtttcatgtttatcctatgaacaaaatggttttggaggcacacggtctggtcaaaggctggccaggattcagaagtctaccaggaagtgtcaagcattcggcgtggaacatcactggtaagggtccattcggtcacttagtgtaaagatgggaggttacactcttggttgcccagggcgtggagagtttgcaacaggggcacgaatcttggggattacaacggagaacacctcatgagcataccaaggggttcaaaagacgagatcatcacttaggattcaggcccacgagattgagaataagctgggggaatatacaaggagcatgtgttgcacatttaaacaacacgaaagacatacaatcagcgggaacctagtagaacaaggacaaaacaacgaattgcacgagtactacgccacacaaggggtgaggcacacaaagggcaagggcggctcactccagaacaggctcccattggacacacccatacgagaggatagaaacccagcagcccgacgctctcaagagcagtccccccacaaagagagcctgggaggaatacaaccagaggcaggtgaacgcccacctgggaacacccgcaaggcacacgtgg

SEQ ID NO: 695189 - DNA, 206 bp, Homo sapiens
aatgaaagggaaagtgtgtggcaaagagataaaggggtacggggaaaagtaacaaggaagagatgaggtgacagtttgggccaaggaaaataccaagggaagacttcacactacctttttttgttctggttgtgccattcttttattcatgttgtaacactcagtataggatagtttattaaaatcgttatgtctgtagacgttca

SEQ ID NO: 695190 - DNA, 535 bp, Homo sapiens
ggcatctcttttatttaccattaactgtatttcagaaagaccaggtactttcttaaaaagtcagcaaggccagacgtggtggctcacacctgtaatcccagcacttcaggaggccaaggcgggtggatcacgaggtcaggaggtcgagaccatcctggctagcatggtgaaacctcgtccctattacaaatacaaaaaattagctgggattacaggcacgtcccagcacgcccagctaatttttctcgtattttttagtagaggcaggttttcaccatgctggccaggctggtcttgaactcctgacctccgcctgccttggcctcccaaagtgctgtgattacaggcgtgagccacgtgtgcctggcctgattttcctcttcaacttttagcaaaatatcggaaaacacagtaacatataagaagttaatcgaatattacttcttatattccacctggactggtactggaacatactaagaagttaatcgaaatatacgaagtcctccgacgtacatgacttctcccagataac

SEQ ID NO: 695191 - DNA, 103 bp, Homo sapiens
  misc_feature (61)..(61): n is a, c, g, or t
  misc_feature (77)..(77): n is a, c, g, or t
  misc_feature (101)..(101): n is a, c, g, or t
agtaaagacatctttgatatagacattaatgaatttctaaatgggcttctatgctaacctnataatactctctgggnagaaggtcatgctttccttttcanct

SEQ ID NO: 695192 - DNA, 888 bp, Homo sapiens
  misc_feature (34)..(34): n is a, c, g, or t
ggtttcattgagtggctgcgcgaacgtgcggtcntgctgaccggtgaaccacagccgattgaattcacagaccgcgtcgttgccgttgtgcgttaccgcgatggctcggtgatcgatgttgtgcatcaggtgaaggaataagccatgcacctgcttcctgaactcgccagccaccatgcggtatcaattcccgagctgctcgtcagccgggatgaaaggcaagcacggcaacacgtctggctcaagcgccatcctgttccactggtctcctttaccgtggttgcgcctgggccgattaaagacagcgaggtcacacgccgaatttttaatcatggcgtgacagccttgcgtgcctcttagccgcaaaacagggctggcaaattcaggagcaggctgcactggtttccgccagcgggccggagggcatgttgagcattgccgccccggctcgcgactcaagctcgccaccattgagcttgaacatagtcatcctctcgggcggttatgggatatcgatgtcctgacgcccgaaggcgaaattctctcccgccggactattcactgccgcctcgccgctgctgttgtgcgaacaaagcgcagcgtctgcgcgcgtggaaaaaccatcaactgaccgatttactcaaccgcatggaggcactgctgaaacgaatgtcggagtgcctggaaacgatcaataaagaacacaaaagcttgcgacgtacatttcaatcgatgagtacgccctggtgggactgggcggcgccagcagactggaagcaacctgtcccgagaaccaggctcgggatcgcattaactgcgcggcgcacaagatcatggcgtggaagattcaacgagggcgcggacatcacggggataaccggcacggat

SEQ ID NO: 695193 - DNA, 140 bp, Homo sapiens
ccgactagccgacaggttcctgcctaactctctctgacagtctctgcctgattctccctgactggtcctcctgcctaactcctccctgactgtctccagccctaatcctcctgacagtcctcctgtcgggctagtcgggg

SEQ ID NO: 695194 - DNA, 185 bp, Homo sapiens
tggtgagcgtgtcagggaaatagagtgttttctccgtaagatctcaggataacttaaagaactacagtaggcaatgcatgtcacagaagactggcccgatggtggacaacagtaagggtagcttaaagaataaatactgtaataatgacttttttttttttttaagagggattcttgctctgtgg

SEQ ID NO: 695195 - DNA, 161 bp, Homo sapiens
tagcctgatcgtactgcatgagatattccttcttcctccaaacgtcagcgagaacccacaacactgccgaggagggggcgtgtaggataaaactctattatcctttcttcaggcccttttgaacatctttaattctgcttgatccccatacttggaatcct

SEQ ID NO: 695196 - DNA, 334 bp, Homo sapiens
  misc_feature (28)..(29): n is a, c, g, or t
agggggggcccggggggggggtttgttnnttggttggtaaactggggccccccccccggcccaacaaaggggggggcccccggggccccatttttccaccttccggggggggtcaaaaggcggccccgcctttttaaccccaaaaccctttttttttggtaaaagcccccggggcctgggaagtacccgggcctgccaagggttttttttttggcccttaaattttccaaaaattggggggccccgggcccgggccccccccccgggccccggttggggtttccctaaggggaatggttttaccaaagaaaataaaaagtttttttttttggga

SEQ ID NO: 695197 - DNA, 611 bp, Homo sapiens
  misc_feature (35)..(35): n is a, c, g, or t
cgtacgggggggagtacggaatcactagaacccangtttttagcagaaagaatggcacagagttggaaccccagagagcaagaccacgtatttaaaacaagatctgcctaacagacttggcttacaattcaacaattgttagctttgctttctcattaaatctcattctttctttgccatgtttgtgggggtttttgtttgtttgtttgttgttgttgttgttgagatggagtctcgctctgttgccaggctgaagtgcagtggcgcgatgttggctcactgcaacctccgcctcccgggttcaagcgattctcctgcctcagcctcaccagcagctgggactacagacatgcaccaccacgcccagctaatcttttgtattttagtagagacggggtttcaccatgttggccaggctggtctcgaactcctgacctcaggtgatccacccgcctcagcttcccaaagtgctgggattacaggcatgagcccatctttaccatttttaactgtgcattcgtagcattcacattgttgtgcaagcaagctccagaacccttcgtcttgcagaactgaaattctatacccgttaaacatcatgtcccaattcc

SEQ ID NO: 695198 - DNA, 979 bp, Homo sapiens
atcacccaccaagttcacatgcctatcatatagtaaaaccgcagcaccatgacccctaacagggtgccgtctcagccctcctaatgacctccggcctatccatgtgatcacactaccactccataacgctcctcatacataggcctactaatccaacagactagccatataccatattgatggcgcgatgtacactacgaggaaagctacggtaccatacggcacatcacaacatccacgctggtccaacaaagggccttcgatgaccgggagtaatgccttatggtacagacctgcagaagttaacagcattccgcgcgcatgtattgctgagcactattgccactctccacgcactagtcacctaactgcgcattatggagggccactggaacccccagaccaagggtttcacaccgcggatactgacctcgaatatggagatgtcgaccactgcctaactttcgttcgcggtatctataatcgacagtcagagtagtctcttgcatctgagacacgtgttgggactagataggtaactatactgtaaacccaaagtgggtcagtgcacaggtctatagacgatcattacctgggtactctatctttacccttcatatttaagagtcgcaaggggcatgccagtcggccctcacgtcagagccgctggattttctggtgcaccttgtctcgtgagccggcgtctgtctcggacacggggattttgggcgcaggcttacctcatgttctggtttctccggcactttgttgccagttttcggccatgctcactttgcgtcgcacggcgctgatttggccaccgtcttggggagcttatggacctcgcatgcggtgtcgggcaaaagtgtgtgagcctgttgctctgcctggttccccccgtgggggtccacggtgccttgggggcccttttggtggtcaagcggcctcaaagagggggtagcgctcccgcgggtgcgcc

SEQ ID NO: 695199 - DNA, 230 bp, Homo sapiens
gatggacggagctgaggaggctggagttagtgttgatctggatgcaccgggtgcagcaggggctgccgttggtgcggactctggtagaggctgggtgttgggcgccctggaccgcctatcctcttgccccggtgatgatgaacttcctcttgaacatgggacaggaaccttggggttctcctgctgctgcgtcaatgcgataccaaccatccagacttcccagtgggaac

SEQ ID NO: 695200 - DNA, 212 bp, Homo sapiens
tggtagagatggggctccaccatgtggcttaggtggctctcgaactctggggctcaagcgatctactcacctcggcctcccaaagtgcggggattacaggcgtgaaccaccaggcttagtagggggggccaccttttggatccaggtttcagccaaccaaacaaagactcagaggccttcctaaacttctaccagttggcaactatggaatt

SEQ ID NO: 695201 - DNA, 233 bp, Homo sapiens
ccattgtgccaggctggtcctgaactcctgggctccagcaattccccccgtgcttggctccgcaaagggctgggataacgaggtgtgagctcctgcaatctggcccgaatgctgctttgattaccagtctgttgaagtgtggggggaaccagccttttgttaatgtgagcttccagtgttgcttggtctttggtattctaaattaataacagagtgatgtgtctggggtatag

SEQ ID NO: 695202 - DNA, 193 bp, Homo sapiens
ataaacaagataaacactaggtgcttttgaatttttttcacttccctttatagttttgggaaaggagtgggatctttgatttcagggtgaaaacagagtacccctttaaacacacacacacacacatgcacatacacacacacacacacacacacacacagtgtgcaactagccccagttttgacagaataat

SEQ ID NO: 695203 - DNA, 687 bp, Homo sapiens
gggagatagaactgcccactacctcatgccagtgcgccgcgcccaagctttatgataaagcagaagggagtgagagatggaaattcgaggcatgtgcgcacgactctgagacaagagagcttcgtggtcctgtcaaagaaatgcgagttcaggaggctcgcgcagtcttgaggtacgagagggcaataacactgagactcggacggcgaggaatactacgcgcccagttcatctcgtaagtcttaagttagaggagtattgaactgtatatccttaaacgagttccacggaaaatcgatcggagcttatgcccgacggcctgactaccatcaaatgtgcattcaaattggggctcgtcgcgtgagggagcggggatacctactgcaacacagctggaggctcaactggcagcaagagaccgttacgttctaaacgtggacagtctttttcccatgttcaccctaggctcgacaggggacagcgctggaccgtacagacactgcctaacatgcaaagcgcagccaacgcttcactctatgatcctcgggcatttactctggggagatcaggcctgaggcccagctcgggagccaagcagactccaaaccactacaaccttgccagacacagcccactccatttcagaccgccttcctgaggagaaaatacgcctggggtttccagtac

SEQ ID NO: 695204 - DNA, 465 bp, Homo sapiens
ttaggactatttaaaaaccgggaaaatcttaattatctaatactgatacacgaagaaaggattccacccaagaaatcctgccctgaaacaatcatgaatctcggcagaacgcagtgggtacagggtaacctacacacactgatgaacaggcaatgactcctactttgtcacgcgccgtgatacagacgaccccactatctatagggcacggggctatgtccaacgggtcaacgtgaggcttgaacccaaaatgctgcaaaatggcacacaacaaatgaaacagctctcttgcaggcacgccttatccaggacacactcattgtactgaggaaaatggcttgaaacactccctgttctagaactttccattgtcatatcaggaagagtgctagcttcaacggtgctggatcaggaaattcttgttgtcatacaaaacagcgtacagatggtgcactacgactgatc

SEQ ID NO: 695205 - DNA, 1087 bp, Homo sapiens
ccgacgccctaacccttaggctaggtacgaggctgggtggtgccgagccggggctatttctggcgctggcgcggctccaatgaatggcatctgcatttgctaccagcggcgtgccgcgtgcggagcctgtgccggtcctcagcgcccagcaccgccgctcccggcaacccggagcgcgcaccgcaggccggcggccggagctcgcgcattcccagccatcactcttccaccttgctcctttagcagaagggcacagactgacgtgagtcgagctcgaagtccagccagccctttggccttccaagcaggaaacaggacggcactgacgaagcggggccgggccaggccgcgcaagcagcctccggtgagtcccgggacagcgctggtagggagtcagaaggagcccagcgaagttgccaacacccttaagagacctcggggccggaccaaagggaacgccacaaaccacagggcttgctgccaagacccggaaaaccaccagcaacatccaggaaaggcaaaaccaagggcggcagacccaaaacaaacctggagacgcgagcgacgccacggagggcattctcgccaggaagctcctcgccaccgcacggacccaggtgaccccattgcgttgccggcgtgttctttcactggcacgcgaccagctccctttctgggcgactgcgacagcttttgctccgttcccactccggctccatgaccctatcacccacaagcctccaaccaactcacaacccgtccaatttggcccgtccaccccatgcattatcactgcactgttcccaccacatcacccacatccaattacacgtcacccactcgtttagggggttcgcagtggctgttgattttgggggtctgtgtttccccgctgggtcgtcgtttcacgaggtttccgcctgggcccccacctccctccactacccgaccaacgtacctccctacccgacgccaccacggccctacactacctcaccgtactcccgccctcgcggcgccctactacgtctccactacccctcgctcgctccaccccctcgcccccactcggcaccatacacaccga

SEQ ID NO: 695206 - DNA, 376 bp, Homo sapiens
gctgtacttgtggaatatggaagttcctgggctagtggactgaatctcagccatagctgtgacctaaatcacgagctgcagcaaagccagatcctttaacccactgtgccaggccagggattgaacatgcacctctacagtgacctaagctgctgcagttggattcttaacaaactatgccacaacaggaactcctgagactgtgttcttataagcaggaaaatttggatgcagagagaacactgtgtgaagagaagggtgagatctacgagccaaggaataccagaaattttcagcaaaccggcagaagatcggggagaagaatcatataaattctcccccagcaccctccaaggggtatcttgtacaaattaat

SEQ ID NO: 695207 - DNA, 994 bp, Homo sapiens
cctctgtgctgacgtgctcttgttgtcgttgttgtgtgtgttgttgcatgagcgtgttgcgattgctttcgggtgcgcggtgttgtctgctgtgtcggacctttgcctccggggtgtgctgcggacgtattcagtttgatcgcggtgctgtcctcgtcgggggtgctttctcgtctttgccctcgtgtgtgttgcgccatgcttgcccgcttctggttcccgctgttgggttagtgtcccttgtcagcccatttccgtcgccttttagatcttcaccagtgcgagcccccttgggcaggaccacctgcgtctggcaccccgggaggtggggcagactcctggtttagtgataaggggctgaaccggctttggggagaccgagggggttcagacttgggaagaatctttcagtgttgtcatggagatgaatggtgatgtgtgttgtggatggatgtggcacgtgtggcacgacggttttttcttgtgctgccgtgaggaccgtgtgaaattttggggcatgtgtttctaccagagagcacttcagccttctctcccccaataaggactggctgtgaaccttaagcccatcaagttacttccagcctgtgagagaacctcacccaacatgctggtgtggcctagagggtgggccatggtgggaaatgggcatgagaatacatacctcccccaattcaatctgagccccgcatggagagggatggtaggcgttgccacgggctcagaagtgccagctcgattactcaccccaccctgcctcccgcacctttcctttgtttccttgggtgaatgcaggaccagcagtggctgcccatcccacctggacaatggtgtgtgtagaaaaccacctggatgtctgtgcgtggggcctcatggtgcctaggacggagattaagatgaggagctttttccttatccgtataaatgaatatttgtatgattccaagtaacacaccacacccgaaagacaatagta

SEQ ID NO: 695208 - DNA, 1445 bp, Homo sapiens
  misc_feature (1122)..(1122): n is a, c, g, or t
  misc_feature (1445)..(1445): n is a, c, g, or t
gccgcaagtacagatggcagtggtcctgatccgtggcccgttggcggcgtcactgacacttggtgtccggtcctcgagatcccgagcgcggggaggcagaccggtgacgtgacgggtgccctgggactggactgcctagtggagtctgctgcgcggccatgtgctgcgcccggtcggcggactggatgagggcgggtcttggatgggccgtcgccgagctcccgccttgaggctgcgggcttctgtccgtttcgctctggccttgagccctggcagagagcgtccgccgactggccgcggggctcaccggggggacaagtgactacggccgatcgcatcgactggaccgtccgcccgttgcgtacgtggacgtgtctggttactacctaactggctgcaagagaactatcgaaagtgtgcatgcgggaagagtggatgggcccaatggtggtcttggtttggactcagcagtttatctggcagagtgcggaccttggacaaggcttgcctcctgctttccctgtcgccttgcgcttcctgcttcttgaaccggtgtggaaccctcatccccgaacttgtgaggctggctttgtacccctataccttgcgggcagtccctgggggacacatgaagccctacctgtagaatgagccgggggatttgggatttggagcccagggaccttcacttacttccatactagagccgttgacccatgtagacacctaaacccaagaaactaggtcccaaaaacaccttggcaagaactcgccctattggggccaggcgccccttgggattgacgccaatctggctgtccactcgacgtgaggctccgacgcttcatatatgggaccataggaacacagtaagctatgcactattaggcatcactatgagcggggacaaaccaatacttagcattggacacgcaccttctcgtgcacatgggctgcgacaaacaatatcatatgcacaatcatagagatatgaacattaacaaaactcgcgctgctaatcatcatgaacatacgaccacacagcaaaatgagtgcacactactattgttcatcagcgaccacataacactaacgcaagtgacacacatacatataatctanaaaacaatatcacacaatagtcgcacaccaactacacacaccatatcgacaccactacatacgctccactcacataccaacacaccatacacgcacatacaacaacaggacctaacacacaaaccacacatcgacacaacaacacctaaacataacacatacgcacagatccataggactaacactcatccataaccgctctatcgctttctgtttttcttctgtttccttctcactgacaattcgactaaaacaccaccacctatacacaagaaacgacccacccaacccaaatacactaaaccaacagaccacccccagan

SEQ ID NO: 695209 - DNA, 124 bp, Homo sapiens
tcccccagctcctgtcacagattgctcccagggctctactctacctcactctcctgtgttcccctctaccgcgccagaagctctcattactttctgctccccaactgatttgtggctttctcca

SEQ ID NO: 695210 - DNA, 566 bp, Homo sapiens
ggagagagaactagtctcgaagtttgttttgttttttttggaaactttaaaatccctcaaaaacggtttattatccaagtgagtttggagtcacaaggggcttatcggaaggattccgggtaccgagcgcgggcaccagggcctccaaacttttgggactcgcaggcgacgagggtcagctaccagcgagggctccggtcataccgggatgaggatgctcattgagatctccttctcgtgggaaagcctcaatccacaatattctcgggataatgaggcccaccgagggctttgggcagacagtggcaccgtgacggcatacgcataaaactcgggggcccacgttgtacccaccaacgccctgtgtaacgggcgggaccagcggcatgttctaaccccgagcaaaaaatgcgtctcctgtgctcgtagaaaaagtccagaaatgggggtctcccagccagcgtctggtcttacctggttcagcgcggtgtgcggcgggtttccaaattcacattatcttccgaggggtggccggccccgtttcaacctgtgtattggagaaccca

SEQ ID NO: 695211 - DNA, 493 bp, Homo sapiens
ttacctctatgctgttctcatgatagttagtgagttttcaaaagatctgatggttttataaggtgtttttccccaccttcactctgcacttctccttgctgtcaccatgtgaagaaggatgtgtctactttcccttccaccatgattgtaagtttcctgaggcctccccagcgctcagatctgtgagtcaattaaacccctttcctttataaattatccaatcttggatatgtcttattagcagaatgagaatggactaatacccagaaagtacggagaattattacatactcatgcccaatttttctgtgtgttctcatttttaatctggtgttttcttcacaatttttcagtggtaaataattgtcttagagttttacatgtagagttagaagaaaaatgaaagagtcagtcatctggataattccagatcagaaaacaatttagtgtgaaagctatagataatcgagacagaatttttgtgtgtgtgtgt

SEQ ID NO: 695212 - DNA, 816 bp, Homo sapiens
ccacgcgtcgcccacgcgtcggaagagtgcgggtgcccaggagtgcacttgaccaccgctacttcataccctgagaagagtaaatggtctggaaggtgtctctgagaggtaatgccgcacaccaccctcccgtgggggcagggtcaggctacacctgccgttaggtcagggggctgcagcagccatgagagctcatcagtagggcctcagtagcctgggagggagcaaggggcagtggggcagggaaagaggcgtagtggggctgtcgcagaagggcctgggaaatctggtccctgaggcctgggcacagcgtacaatcacttcggatatatggctgtggggccagtggactgggaaggaaagaagcatataagagtgaccaacgtgcagaaggctgtcaggtcccaggtcgacactgccttagtgcagatgactgcctcagtcattttctggggtgatgggctgtcgttggtacacaccattttagcatgatgaggagcaccgaggcccagaaagagttaagttacatgtcctaagtcacagcagtgttgtaagtgccagaactgagatcaagaagcaagtctctttgactttaaagtctgtagtctgaccccaaagagatcctgtttggtcacttataggaggtccctagagctgcagactccccttgccggtacccacatatagagacattaatcctttcgcctgcgagggtcagctcaaatagtcttttagctgggcgttctcctgcagttccatctaatgcatcccctgggtgttgccaaacctgaactggggcagtggggtgagaggagg

SEQ ID NO: 695213 - DNA, 533 bp, Homo sapiens
  misc_feature (28)..(29): n is a, c, g, or t
  misc_feature (32)..(32): n is a, c, g, or t
  misc_feature (38)..(38): n is a, c, g, or t
  misc_feature (45)..(45): n is a, c, g, or t
  misc_feature (49)..(49): n is a, c, g, or t
  misc_feature (53)..(54): n is a, c, g, or t
  misc_feature (60)..(60): n is a, c, g, or t
  misc_feature (65)..(67): n is a, c, g, or t
  misc_feature (69)..(69): n is a, c, g, or t
  misc_feature (82)..(82): n is a, c, g, or t
  misc_feature (102)..(102): n is a, c, g, or t
  misc_feature (108)..(110): n is a, c, g, or t
  misc_feature (116)..(116): n is a, c, g, or t
  misc_feature (118)..(118): n is a, c, g, or t
  misc_feature (121)..(121): n is a, c, g, or t
  misc_feature (124)..(124): n is a, c, g, or t
  misc_feature (127)..(127): n is a, c, g, or t
  misc_feature (129)..(129): n is a, c, g, or t
  misc_feature (136)..(137): n is a, c, g, or t
  misc_feature (140)..(140): n is a, c, g, or t
  misc_feature (150)..(151): n is a, c, g, or t
  misc_feature (153)..(153): n is a, c, g, or t
  misc_feature (156)..(156): n is a, c, g, or t
  misc_feature (158)..(158): n is a, c, g, or t
  misc_feature (173)..(173): n is a, c, g, or t
  misc_feature (176)..(176): n is a, c, g, or t
  misc_feature (181)..(182): n is a, c, g, or t
  misc_feature (186)..(186): n is a, c, g, or t
  misc_feature (191)..(191): n is a, c, g, or t
  misc_feature (194)..(194): n is a, c, g, or t
  misc_feature (196)..(196): n is a, c, g, or t
  misc_feature (198)..(198): n is a, c, g, or t
  misc_feature (200)..(200): n is a, c, g, or t
  misc_feature (215)..(215): n is a, c, g, or t
  misc_feature (237)..(237): n is a, c, g, or t
  misc_feature (239)..(239): n is a, c, g, or t
  misc_feature (242)..(243): n is a, c, g, or t
  misc_feature (249)..(249): n is a, c, g, or t
  misc_feature (252)..(252): n is a, c, g, or t
  misc_feature (254)..(254): n is a, c, g, or t
  misc_feature (270)..(270): n is a, c, g, or t
  misc_feature (279)..(279): n is a, c, g, or t
  misc_feature (292)..(292): n is a, c, g, or t
  misc_feature (296)..(296): n is a, c, g, or t
  misc_feature (310)..(310): n is a, c, g, or t
  misc_feature (327)..(327): n is a, c, g, or t
  misc_feature (335)..(335): n is a, c, g, or t
  misc_feature (346)..(346): n is a, c, g, or t
  misc_feature (363)..(363): n is a, c, g, or t
  misc_feature (387)..(387): n is a, c, g, or t
  misc_feature (424)..(424): n is a, c, g, or t
  misc_feature (443)..(443): n is a, c, g, or t
  misc_feature (456)..(456): n is a, c, g, or t
  misc_feature (463)..(463): n is a, c, g, or t
  misc_feature (477)..(477): n is a, c, g, or t
  misc_feature (479)..(479): n is a, c, g, or t
  misc_feature (517)..(517): n is a, c, g, or t
ttgcgcggggtgggttcccccccccccnnctnctttgngaccatngaangttnngggacnaaaannngnttcccctgagccncaggggagaatgtttccccngccctnnnaacaanancanaanggncnattcccnnggnccccctcctnntnctnangggggtcccgggatnaanagganngagnttcanttnanananacccttgggcagttncagtccccccagaaggggtccntnttnnccagcnggncnttcagagccagggganggtgaaccngcagccccctttnagtnatgcctccctcagnggtatgcctgccaaaanacgcaagntccggtttganatacaaaaagggttgcnggaagaccccaattacagtccccngggtttccccaatgcccagggggcctttgttgatganccttagctttttgctttanggcccttcctcancaggggnccgtttcccccctntnccttcccagtatttaaaaaataaaagtgggattttttnggcggctttctctcta

SEQ ID NO: 695214 - DNA, 153 bp, Homo sapiens
aggatccccctgatgatctctcacagcttgtaaggtgtgagacagctgccttgtgtgggactgagaggcaagagttgctcctgctcgccacctgacttgctcccttcaactccctatttttacctaatctatcttcctgccttcatgccctac

SEQ ID NO: 695215 - DNA, 155 bp, Homo sapiens
gctgagcggctggtcctcctcctcatccgcggtctgggcatctgcaccttcaatgtagtgggagagctttccatttagtaccggttctgaagcatcactggataggtgtcatttccacatctgtgctggtgcagttaggaagctcaaaaaaaacc

SEQ ID NO: 695216 - DNA, 420 bp, Homo sapiens
ctagatgaaaccagaaacctcagcgctcacaagatctcaggaaattttctgatggaatttcaagtgaaaaatgttccttcagaaagaattgcaactcagaagatcctgtctgtgttaggagagtgccttgaccactttggccctggctgtgtgggtgtgcaaaaaatattaaatgcccggtgtccgctcgtgagggtctcaccccaggccttcggatttcaatgggatttgacttccaaccattggattggcttgaccaggtcccaacttctttattatatatggtgccctaaactcaagagtgagagccttggggttcagggtccggggctgggctcgagcacattcactaacaggtagttttcctgggccatggatcacaaatttctcctttccaatgatgggcatcttttttctcca

SEQ ID NO: 695217 - DNA, 412 bp, Homo sapiens
gagccccttatcgcccaacactatacttacctatctgctcaatcttagaagaacagtatgtagtttcagaattgctaacccctatcactgtgaaaaacaaacctactaggccaggcaccagtggctcacacctgtaatcccaacactttgggcaggaggctcacttcagcccaggagacagagactaccctgggcaacagagcaagattgtctcaaaaaaaaaaaaaagggaaggaaaggaaaaggaaaaggaatttcccttttttttgatatgcagagccccgtttttcctggccagggggaagttcccagaaaaatacagcccagggccctttgtttgacattgccactgaaaaaagcataccccaaaagcggggggggtcttttttttttttacccgggcattgggggg

SEQ ID NO: 695218 - DNA, 697 bp, Homo sapiens
catggtggtgtgagcctgtagtcccagctactcaggaggctgagacaggagaattgcttggattcgggaggtgggggttttagtgggccgagatcacgccattgcactccagactgtgcgacagagcgagactctgtcaaaaaaaaaaaaaaaattttatcctgggaaattttggaaagggaaaaaaaaaaaaaaaaaaaaaaaaaaaattgtgtgggggcggcccgggggcccaggaaaagaatttcaacaacacactatccggtggggggcgcgggggccccagggagtgagaaggagaaaaaggtggccaaagcggtggtgccccagaggagaaaaccgggggacagaagaaagagaggcgggggagaatctccacacaccaaataaaaagaagcggcgcgcggggggggagacaaacaacgagggagcgcgcttcgagcgaaaaccaaaaaccgagaaagaggagaaaaaccgacgagagagactcaaaaacggggggggatccatatatcaacaaaaaagggaggggacgtcccacaagagacgggagacgccgcaaaaatacataacaaagataaacgccccccgcgagctcgtggggtgggtataaagacaaaaaagcaaagaaaagcacaaagaagaagaagaagacgcagacagaagcagagagaacaagaagaaagaaacaaaagca

SEQ ID NO: 695219 - DNA, 150 bp, Homo sapiens
agatggacctctcacagagctatgctaaaggatcattctgcctcaaagcaaacaaatacaggtcagttgcctctcacttcattagcaccaagatgaatcacccttttagccattttagcctaaaggagacatcctaacagtcactcctag

SEQ ID NO: 695220 - DNA, 201 bp, Homo sapiens
cgtgtaccagtgaactccttttcaacagaattgcctagaaagtctcgggaaagtgacagtctcttcaataaatgctgctgggaaagctggatatccatatgcagaagaatgaaactagacccttacctcttgccatatacaaaagcaaatcaaaatgaattaaagacttaaatctgagacctcaaactatgaaactactag

SEQ ID NO: 695221 - DNA, 429 bp, Homo sapiens
  misc_feature (1)..(1): n is a, c, g, or t
ntgagaagaaggtgagatgatcatttttcttcacttttcaactgaagaaattgagtcttgaaggtccacagctaaaaggagtagcagagtccagactcagtcccaggtctcctgaccccaaatccactgtactgtctgtttccttgtctgtcaaatgagggtttcttccagatctgaggtcctgggtcacctgccttttaacacagcgagttagttaggagtctttgggaattaacaggaactggtaacttgagcagaatagaaattggcaggatcgtacagaggctcagaggattggtgagaaggtggaccccaggctggtaaatgggcatgattcaggctaactcctggggtttcagaagcaggggcctgaaaagcactgccattgaagggccaaactccactgttttgcattctctactcaagatg

SEQ ID NO: 695222 - DNA, 321 bp, Homo sapiens
gctggtaccaggttgatcacacaatgctcgtaagtactgctttgtgggtaacagttcaacagttccctccttaggcttcatgtttcaaacagcctttctgctgcctaggatagaatttcccgtacaagatctgtggcttctcactccatgggccataataatcccttacatatgagcgatgctttacatttttcacaagtgctgacaaattacctcccctccaaacataaatcttgaaaatgattctgttaggtaagtagaacaagtgtagtgaagcctgtttcacagatgcagatctttactcagagaggggcggagcag

SEQ ID NO: 695223 - DNA, 309 bp, Homo sapiens
aagtggttctccatcttcacctcccagtttcaagcgtctcctacctcagcctcctgagtagctgggagtacaggtgcccaccaccgtgctgggctagcttttgtatttttagtaaagacggggtttcaccacattggctaggcgggtcttgtactcctgatgtcaggtgatccacccgctttggcctcctaaagtgttgggattacaggcatgagccactgcacctgaccagatttcagatttttggattagggatgttcaacctgtattaggtaaatggattgtagtaatgacatggtagaaccgact

SEQ ID NO: 695224 - DNA, 773 bp, Homo sapiens
attttctgtctctatgaattggagttctctaggtatttcatgtaagtggaatcagtatttgttctttgcgactggcttatttcacttagcataatatcttcaaggcttatccatgttgtagtgtgtgtcagaatttcctccatttttgaggctgaataatattccattgcatatgtataccactcactttgtttattcactcatcttttgatgtacattaggcttgtttctaccttctggctcttgtgaataacggtgcaatgaatgtgggtgtacagatgtctgtcagagtccctgttttaaattagtttggtccctcttttaaattagtttggttatacccagaagtcgaattgataaatcatatggtaattctatttttaatttgggagtggggggggaattgctatagtgtttccattgtggctgcactatgttacattccccccaacagtgcacaaggattccagttgctccacatcctctctaatacttgttattttctggtttttggtaataaccattctattgaatgtgaagtgatgtttcattgtggttttgatttggttcgttttttaatgattagtgatgttgagcctcttttcatgtgcttattggtcatttatatttcttctttggagaaatgtctaatttgattcctttgcccatttacaaaatttctttttctttttagttattacattctaggaagttctttatgtattctgatatggattccttatcagatatttgattctcaaatattttctcca

SEQ ID NO: 695225 - DNA, 101 bp, Homo sapiens
cgtatcttccagaagttcctaaaagccacatgaaattagttgagcatttctacgatcagcttttgctaacgccccataccaccaaaccattaagaactttt

SEQ ID NO: 695226 - DNA, 170 bp, Homo sapiens
ctaaatgtgatctcctgtggatttccacatgcattaaaaaattttttaagctgggcctagtggctcacacctgctatcccaacactttgggaggccaagagaggaagattgcttgagcccaggagtttgagaccaatctaggcaatgtagtgagaccctgtctctaattt

SEQ ID NO: 695227 - DNA, 130 bp, Homo sapiens
  misc_feature (28)..(28): n is a, c, g, or t
  misc_feature (36)..(36): n is a, c, g, or t
  misc_feature (115)..(115): n is a, c, g, or t
tgattctgggcgtgtgcagtagtgttgntatgtagntgttatgattttttttttggctgtcagtgcctttggtgtctgtgatttcttccttggctttggatgtgatggttagtgnagggtatggtggttt

SEQ ID NO: 695228 - DNA, 402 bp, Homo sapiens
cttttgtcctttttttttttaaaaaaaccaatggggggattaatgtgggccaggtgccctttgtttaaaaaactaagtttaacccccttatttggttttggcccaggccccccctatataagggaaatgccccccccgtggtacccccccggcccccggccataccggccaatagccggggaaaaacccaagggaaagggttccaaaacccccgtggttggtaaccgggtttttaaaggttccccttgggcccccaaaaaggctgggggggggaaccaaggaaatctggttcccccccccccccccttaaaccaaagtgggggttctttgggcctttaaattggtcccctcccccctttttttttttttttttatccaaaaaaccaggggttttccccggga

SEQ ID NO: 695229 - DNA, 969 bp, Homo sapiens
gagaacctagctaagttgtcaaaaacggctttttacgaaggcagtactattacggcctaggtacgaggctgggtggcgagagagagagagagagagagagagagagagagagagagagagagagaggcggcacagggtgtgggtctgggccgttcggcggcgcccccgggctgaggcggcccggcaaatctggcgctgcggggaagaagtgctgacaccgaggatatggatctgtacgatctggcgcaggcggcgggcggcgctatcgaccccgatgtgttcaatatcctggtggacctgctgaatctgaatgtgccccccctcgcctgtcttacagtatgctcaatgttctgtgtgtgccgggcagaggctagcgagcgagccccaagactctgcggtctgtgtctctgcccactgtcgagccgtgcccgagacccgagggagaaacaaaggcagcgctgccctcgggggagcattggccctggcggaacgcagcaggcgagaaggatccagcagaggatgcacgccagcccagcgctaacaggctgcccaaggggggcggctctgggaagagccctacgcggggcagcatctaggatggggcagagacttgttgtatcttttgtccccagcaaaggctacgtgttccctccttcgagtgataataccctctttgtgagatgcaagagggtccagtgtcaaaaaaaaacttacagacaacctcatctaagaacacaaaacacccgcgggcgacactttatgcggggcgcgagcaaaaccgcgtcttacaacggcgccacggggtcacattattggattcaaaggccccacctttttctcaaagggtagtactcatcggggcgaccccaaaatagagggagtcttacactcaacacaccgagcgtcacgcctggcttttaacaagcggaacgcggctcactaccaccaagcaggcgggctacccatgaa

SEQ ID NO: 695230 - DNA, 382 bp, Homo sapiens
  misc_feature (370)..(371): n is a, c, g, or t
gctgcactcccacacctacatcctgaggcgtggccacctgctgtccatcacccccaacaccccagatccccggatccttctgatggcgacggctctgccggtctgttctggctcatgtgctgtgtgccctggcccgctggcactcagcttacatttgaacctcgtctttagagttaaggtcccacctgtgctgtggaccggacgtgggcctcccagtgagtggggggcatctgataggtgaggctgcttaggaagcctggcacaccctgtccctcagcagggtgggcctgggtaagtctgcccgccgcatgggagggagtgtggagagatgaagagatgagggagcccgagaaccgcatgcctcactggnnatgagggacac

SEQ ID NO: 695231 - DNA, 357 bp, Homo sapiens
ctccacggctggctaaaggaaaccaaatacttaaagaaaatcagattctctcaataagattaacaggagttttctcaggagaaaacatggaggttaagaaaccagccctgggcagatagacggatggactgactgaccaattttttttttttttttttggagacggagtctaattttgttgcccaagctggggggagcaaaaaaccgaagccttttttttttggaaaagacaaacaaaaaacctaagtggcctttgtggtttgttatgggaaaaacatataaaaagatgggaagccggggagtgctggggtgtgaaaagattgtctggaagatcataattgtcttggagcagagttt

SEQ ID NO: 695232 - DNA, 951 bp, Homo sapiens
ctgagatatgtacctcgcgggtgtgtaagcagaagtaaatcctttttctcgcggaaccaggtgtagtagtatctcgtatgatccctcgcacacgtgtggaaaaaatgttgggtgtaattagagcatctcctctcaaggaacatcaattcttgctgccgggtatacgccccatgttgtcctctaagtcccgggtgttccgcctggtgcttttccagaaagggaagctcttgtggggttatatataaaagggttgtttcgtgctggcctctatattgtgcagttcggaccgactcttcttattagggggcttgcccccaccccgctgcatgtgcttcttgcggctccccgtcgtcatcgcccacagaacacttgtgtgaatttcaaaggagcaaataattccccccccgttggagtgtataaaaacatggttgtgcggggacgctccgcctcccccatgtataactactctcgcggtggttctattaagcgtctttcttcggcccccgcgtgctttttcaggcagtcactatctcttgcgttggcatacactcacataaatcgggcgtgctatgtgcaccgatctgggtcgtttcggtaacaaaaaagtcgataactaaagaaacaaaacaagcaagttgggggcggtgacctcggggaacatgtccctccggttatctgcggcaccttttgcacgttcttcaaacccgaagagcccaggaagaaacactgagattatctagaattttccccgagattacacggataaggaaacagaatgggtgctcactcacctgatgaccccatgctaaaaaatccgcttataaggatctgctcagcgtaatacttttattatgtttatctttctgtgcggaacaaatcaatcccgccgttgccccccctgggaaaaaaaatagatcttggaaaaaaaaaacctttaaaccccacaaaaca

SEQ ID NO: 695233 - DNA, 265 bp, Homo sapiens
aacaccatggtgttctaatggtatacccaaacttaggggcatcatgactttttttttttggagacgggagtcttgccttggtctgcccaggctgggagttcaatgggcgcaatctccaacttactggcaacctctggcttccctgggttcacagcgattctccttggcctcagccttcccaaggtagctggggattcacaagcacccaaccaccaacgccctgtgctaatttttggtatttcccaatcagactatggggttttgg

SEQ ID NO: 695234 - DNA, 1238 bp, Homo sapiens
cggttttttttgtgggacccacctggtgctgcagcggtgttctgcgggtgctcttgtgggcaccaaacggtgttgtgccccctcgcggtgaggtgtccccccccttcttttgcacccgtctttgttgtgcgccgcatttctacccgcgtttgtttgcgccccgtggtggcccccccctgtggtcgtcgcgcgcgcaaatgtcccttgggcttgttggggtagcatacgcttgtactagtagcacccgctggctattccgtgggcgggcctcttacaaaccgcggggggtgtcttgtgcccctctgattgattatcacgggtcggccaaggaaatcttgtgcgcacaccctcgggtgagaaggcctctgtgggggaacattacttagagacccctttcagaaaaaggggaggaaatatctttaagagtgctgttatggccgccggggagtgatttttgggaacacaccgtttacatggtgtccccactggactttgtgcccggctggtggggtgtgcccacacactgcatactgaatggagtaggatgtggccctctttacaccgccgggttttatactgacgcgcgggtgtccgcgagtataattcacgctctcttgtggggctttctcgtggccctggtgatccccccgtttatcttcactgggcaccacatgaatttatctcgcacgagactggccacagaaaatatgtgtgagaaaaccacacacgcacccgagaggaggcgccacatgtcgtgaagatgtgtcacagagagggagatattcccacgtggggaacccttgggggattatccccgtgccttaacaccaggtgagaaccaaaggtgataggccccaagggcgacccccgtttagaaatgtcccaggaaccacaacgggtgtgccttaaagggctttggagcgccacatggggcacctttatttggatgtcaaagagaaacctctttttgcggtgtgacaacaccgaggtttgcctcttcggagctcacgggaggcttaacctttacgcgaacgctgttttgaagcggtctcattcattaaggggggaagcgctggggcaaaatcgccacaccttggcctttcctttaggccctggtgcgccccacataaccccaacttcgaggggggccacccctggggagaaacgggaagcgctcggtcccttttccccaataagggtttttttgcctggattcccgcagaaattattaaaaggga

SEQ ID NO: 695235 - DNA, 289 bp, Homo sapiens
atgggaaaggtacgctgaacaagggcggccagcgccagcgctggggtgccactgtacacggtgatggggaggcccttctatctggagagggcggcatgatcctagtgggccaacgtcaaccgcctgggtcaaacgggacacaacccactctcatgaagacatccctaacacacatccagggactatgtttcttaaccttaaaattggaaacacttcttgctaccaaggatagtgggtggggctcagcgtttggggaacctgactgagagtcttttgctgaacagacttt

SEQ ID NO: 695236 - DNA, 224 bp, Homo sapiens
cgatgcttatatacagccgctataccaagtaccactctagtacttcccagtatcgggatacatctatctcagctgcattatatagactaatacagatgcttgaagcaagccttgtacacataaggtatttaatagcacttagggactaattagatgtcccatattcgctatactcttccaatactctaatctcttctcaacccagtgtaacggacatcgctaca

SEQ ID NO: 695237 - DNA, 344 bp, Homo sapiens
tctagaggatccctgcagaggcgttagccttcatttcaactttggtgaatctgacagttatgtgtcttggagttgctctatcttggggagtatctttgtggtgtctctgtatttcctggaatcttgaatgttggcctgccttgctaagatttgggcgaagttcctccctgggataatatcctgcagagtgtttttccaacttggttcccgttctccccatcactttcaggtacaccagggcagacattagatttggtcttttcacatagtccccataatttcctttgggagggggtttttggtaccatttcttcttatatctttttctctaaaacgcctctgca

SEQ ID NO: 695238 - DNA, 882 bp, Homo sapiens
acccacgcgtccgctgaagtctttctccagcccctccctctgcagctctgggaacatgaggccgaccaagagtaggctgcgagacctcttttgcatgggggctgcagttcccgggccccagagaactgacagtcacaggactgaagtctttctccagaccctccctctgcagcttgaacactatgctatcagtgaacctcgtcgctctagccatcatgcctcgagtcacagggcaaacttggcctcctctgtgagaagttgcggcatctcggagaccaggcctggaagcctccatcagggctattccccacacagccctactccactgggaaaagagagtgccgtaagactaggctggttggctcaaggtgagatacagtcatatgtcccgtgtgtgcctactttgatgcgtgctcacgcagccggcgccagggaggctctgcgatagaatgaagatactatgagacagtcattcaacccctctatccacggtatatgatgcccaccgagaggttccaggtgtcccactctatattacacgtacaatggctggtacatgaacctgctcttgccccacccgtatggtagcgctcactggaatgagtctagtgatgccatttctaccagttctatatggctcggtcgttgtgtcctccacaagtgtatgccattttgcagtgaccgtattggaaccaaaattgcctagtgtggatgggggtccagcagtaagccctaggatgctaccaccctttaagccctgttgacctttagagccaattttacttacccttcttcccttcattaatgccgtggttttactcaacaacttttaatagtctgtatactagtgtttgccactggtctgattgtgtggtttcccct

SEQ ID NO: 695239 - DNA, 411 bp, Homo sapiens
  misc_feature (87)..(87): n is a, c, g, or t
  misc_feature (149)..(149): n is a, c, g, or t
ttggcccccttccccctcaaggagcctagtcctagtagggggtccagaaataccagatgggccctgaaccataatgatggtttgacntcccagtttttcaactttaggattgtgcaaaagcctatacacattcggtagaaacagtaccntcaagtatcccatacaatcagtacagtattcaataaattacatgagacattcaacactttattataaaataggctttgtgttagatgagtttgcccaactgtaagctaatgtaagtgatctgagtaggtttaaggtagcctaggtgtattaaatgcatttttcacttaacggtattttcaacttttgttgggtttattgggatgtagccccattataagctgaaaagcatctgtagtataataaatgtggggagtgctgtga

SEQ ID NO: 695240 - DNA, 318 bp, Homo sapiens
catgtgggcatcactggtctccaactctgactcaagtgatccacccacttgggcctcccaaagtgctgggattacaggtgtgaagcactgggccaggccgggtgatacatttaaagatattcttataatgtagcaaaaccttaaaagacgggaatatttggacaaaggaatgactgggttattttatggaaacagggtctcactttgtggcccaagctggaatgcatgggcacgatctgggctcattgcaaccttggcctctcaggttcaagcaattctcgtgccgcagcctcccgagtagctgggattataggcatg

SEQ ID NO: 695241 - DNA, 195 bp, Homo sapiens
tcgaccttcagccttcgtttgcaagaagagttccagttgatgtggtgtttggttccatggaggggtgaggatgggtgcaggatgcacagtgacaagggacatggggtgcgggcccacagcacaggctgaagttagctgacgcatgcctttggcttttatccacgggcgggtagtggcggaccctggctgtggctg

SEQ ID NO: 695242 - DNA, 756 bp, Homo sapiens
cggctggttgcaggtttctctcgccctggtccctgctgcggcccgccgaggcggcgaccaaggtgggtgctggggccccgtggccgggcccagtgacaccgcggggactctcgggagccgtgggccaggcggcttagcctggcacctcgggccctgtccaggcccaggcgttccattggctgctctgcgggcctggtgtgagagggactctcggtgagtgcccctgtgtggtgctgcctgcacccactccttcccacttgggagactccctgcggggctgccctgggtctcctgttcctacttggccagctgtggtgcctcccagggccccctctgcggtctctccagaagcaggagccccaccttgggcctgccctctcacacctgcctgtgtggtcttggtacggcgcctctgtgtccggactccggtgcccgccctgcgtgggaggaagccaggactcccgggctgacctgggccattcctggtgggtaatgtgtcagttccacagcatgcactgtgtgtgcacttaaacaaacgtcatgcaaaaatggtcaagccctggggcaactccttgacaagtgtccacttggacctctcccatgtggcacgggcgacaggtttggtgcaaaaccttgtgcggccaagaacccggcgtgcatgtctcactgagcaaagtgcccaatcgaccaactgttgaccgggcggcccaaaaatgcaaatgcgcagagaactgaaggagagcttagagtgacaca

SEQ ID NO: 695243 - DNA, 639 bp, Homo sapiens
tataaaaatggattttcgccatggttgcccagggtggtcttgaaactcctgagcttcagtgatccgcccgccttcggcctttccgaagttgccgatcacagggtgttgagttcacgtgcgcccgcggtctccagcgtgctttcataatttccagggagatgcgactctgttatagagcctaatcgtgggtgactctaactccttatgaccagaatgtgcagggatttctgacgtgctctcacacagcgtgttggcacatgtgttacacagcctttataccctgtgggccccagaaaaggtcttttattctcattctcgctgtgtgttctttctccgtaaaacgcagcccaaacttctcagcgaaccctgtgactgtggacctcccggcgtgagaagagaaattagaaacgccccatgtcgcctcctatagggggacctcttcttttaaacaacaaaataacgtgtgagcatgtattaagaattttgaaagtgagaaggggcttgtgcacgctgggagaaaagcactcctctgttgaagcgctaaagacacaaattctcctcggtgtatacagagagacagatcataagaacggcccaaaaaaggtgggagaaaagcgggaaaagacaaactccatattt

SEQ ID NO: 695244 - DNA, 1076 bp, Homo sapiens
  misc_feature (585)..(585): n is a, c, g, or t
ctgaccctaaggtactatgagtcctcagtgcgtcgagttcaagaaatggcccagcacagacctaaacaccacatcgctcacaaagtggatggcacacaacgacaagaactctccggtgcgggacctccgactctattcccacccttgagtggagcccgcttactggcgggtgggggtccttgcgagttccagcgacatcgcgtaggccaggccaggacgtccttgctccctgcgaccctcactgttctgtgcagttgattctactctacataaacacgacgtcattccacctcaaaaaaagaagaagaagaagtatacataacataatgggatgctgcattgcagacaacgtactgtcgtccactgcacaaggaggcgcgccaattcttcttcctctgagtagccatgcacagtctattggtgtgtgacgcaacagaggaggcgcccgcgtataaccgagagagagtgcaactattcacatagcgtggcagagcgtaccccgagtgccggacaagtgattctcacaaaagaggggagctggaggcattcgggggaagagaccagattgggggggtagagcacatnggggagggcattcgctttcgggaggaaaataaggcgctagcctgtattaaaaacttggtttgagtgggtagagaagggccggtgggaccagacaaatagacgtcgtgtgggtgggacgcatagaggatcatataacctgttaagaacacaggaagggataattgtttaattagcacggtcctaataagaaaggcggggccacaggatatgtggagcaaacaaggtctgtgttgaatgaccgaagtgtggtgtgatgtcagaatagaagtagcgtagtgaacgatagaaactagacggagttgaatgaacttaacgtagagtgttgaggaggcggaaatggagggactgaatagatatggcaggggatgaactcacggagggagagaaaatgaagaaagaagatatatatagtagaagagaaagcaatttttggtgataacatcgcctaaggaagaattggcaatagtgtggagataaataaaaggagtgga

SEQ ID NO: 695245 - DNA, 388 bp, Homo sapiens
tcgtatttaaattctatgtgtaatagtgtttctatggaaaaagaaacttttttatttttgttttttgagatagagtctcactctgttgcccaggctggagtgcagtggtgacatcttggctcgctacatcccctgtctcatgggctaaagtgattctcctgcctcagtctccggaatagctgggatcacaggcatttgccaccatgcccagataattgttctatttttagtagaggcggagtttcaccgtgttggccaggctggcttttctcataggttttcatttaagccctgattgtccctatgaagtcatttctgcattatgggtgacctggttctgatatatgatcctcttctttattggttgtcatgtgttcttatctctatg

SEQ ID NO: 695246 - DNA, 272 bp, Homo sapiens
actccgaggatccccgctgtgcggaccatcctcaacttttcttagtatttttagtagagaccgggtttcaccattttggccaggccgctgcttcttatttttaataggctttttaaaagagcagttttagatttacagaaaaatcgagaagatggcatagagtttctacttgccctgcgcccaactgtccacatctcaccctcgcacggttcctttgttgtcactgatgaacccaacactgatccatcctcattcaccgtgcacccgcacag

SEQ ID NO: 695247 - DNA, 893 bp, Homo sapiens
tactcgcgaagaatggcggacctactgggctccatccgtgagctccatggcgaagaccacccagcctcggtgaccaggaggactcgggcagaggcccggtgtgacatggccagcccgccctgcatagaaactacaaagaagccattgagacgacaccaacgatgacaagttggccgctttccggtaacgaggatgtgatgccatgccggcgctctatgatttccatttcaagccagagtgggtgaatagactcaaggaaaccacaggtttcctacgccaaaggcactgcacgagtccgtgcaggcagcctacatgctatgattgtgctgggaaagttgtgcatgggcgggaagactgttccttcttctctttctcgtggagcacaagacttgactggactgtgtgtgcatattggtccatgcagtccttcacaaagaggtaggttagggctcgcctccagcatggctgatactatgattcgtaaacctgtcaagtgcgcaacgcgacgcttggggactcccacgagaaaggtctgcatgagatgcagcctggaaggacgggctcgccacggcttggccctacaatggcttgtaccggatgaccgggcaagccccccgcgagagaggcctgtggtgggtgcgacttgccactttgctggcgatctaatcgagtggcaacgtcgcctgcaacttcaatctgagcaagtgcatcgcagctcaatgcacgacagcctaaatgctacaggggcaaataagaacctgcccgatgcgttggccaggacccagacaggcgcgaactacggggcacattgagacagcgctcaattggtgatgagcgactgacacgctaagggcaatgtgcccaagtagccgcgagactacacgcgccccacg

SEQ ID NO: 695248 - DNA, 805 bp, Homo sapiens
ggatgatatatgtgaaagttcttagtaggtacagaaattatactagaaaagacaaatacaaatctgacatgctatgatgcagtagtggacatatcattcggtcgagcttactgtgtcaaaggtggtcttgaaactgctcttggtattggtaaatgttggagtagactagaagtcgagagagtacggaatccgacgcttatgtgctctcagagcttaggtttacaactgagctcaagtgtagggattgtgtctgatgattcctggaatcctttacaatttgtaagaattgctgatgcaattcgtgcaagctctggaaaatgtgacctccgaggtgtatgtcttcgtcagatgcaactattagaccatttgatcacgagttgatacatatactatgtaacaatattattattctttccagagacggagtctcgctctttcgcccaggcatggagtgcagtggtgtgatctccggtcgcgttgcaaacctccgactacatggctatcgagcgcattctccatgccttagcctcccgagatggctgggatttgcaggcgcctgtaaagcatgctgggcgtggtatagtgatccaatagagaatggggtatcagcagagataggtcagggcaggtctcggaacattctggatcctcagcgcgaatccgtacggcctcggcctccccaagggggctggggattgcagggcggtgaacctacaatgctaggggcctatcacattatatcctaccgaaagccaatcatccaaaaccttgaagtcaagccccaaaagagcggcccttgataccg

SEQ ID NO: 695249 - DNA, 228 bp, Homo sapiens
  misc_feature (52)..(52): n is a, c, g, or t
  misc_feature (86)..(86): n is a, c, g, or t
  misc_feature (178)..(178): n is a, c, g, or t
aaccgctgcaacatgggtgttcaagcggttcgttgagaggttggccggttgnctattgctctcttttgagctctcatcccggaaanttgtcgcgagtatagagattattattatcatcagcacaggtcttttcgctgtagctcttagctactcatggtgaggcgacacatcatgcttntcaagatgcatgtcgctcactgttatctacagtatgtttccgatactcca

SEQ ID NO: 695250 - DNA, 940 bp, Homo sapiens
gatgatgaccccgtctgtgtctgtctctgcatcgtcctctgaatacataatcactgctgaagagatatgtcaatggatatcctgcgaaatgaggaggatcttgttgcatccgtatcgtgttacttcctaaactatgtattcatagatttactgcacataactcatgcaattttatgcaactaagtgatattgagttttcactcctacaaatgttttcagtcccagcttcgctgttatgctcgaatggttcgtcaattgatagcttttacgaattagttcctatcaaaaaatcgatggagggatccacccatttatgatggaagtactttacttatgcttaaatgtttgtgattacaagatacttcttgctgagatgaaccagatgtcttatagagtccaagcccaatataattggaaaggcataagaattattttatggtaacatttagaacgacgaatcatgagaaaatgaagtatcgagtcagattgtagaagaaagatagttaatagagaccttagtgataaagtggtctgtgtatctttgacattcgttgatgtggttaattcactcttctcaaaagaataaggataaaattcttttttgtgactacagaaatcaaaggaattctggggtaacaagaactatttcccaaggattcattactgtgtgtccatgaaccatagcaaaaatagtcttcgaggttatccgggtacctaaatgttaccaccaatatagcatgggtccgtgaagcgaagattattcgcccgtccttactggggaatgataattccggcttacggaatcattgacctgaaggttataaacgtttgggttggcggttaatcgggaacacgtgattccctttggggggttccgcccccattaccccagttttccggaagcggttcttgagattcccgcgcaattttaagaccagga

SEQ ID NO: 695251 - DNA, 321 bp, Homo sapiens
  misc_feature (159)..(159): n is a, c, g, or t
gaattccggaggtgcaaatataagccaggggaagtgtgtaccagacttgggaggagtagggagcgttcacagtgacaggtgatgatcttagtctgagatttgaaggggccggggagcatgtgagtcagagccgatgaagtagacaaagaagatggttcntgcacagatggaacagcaggatgcaatggctggtgtggagagctacgaggcaatgtgccgcaccggtggacagtcccactagtgatagcagtgtgggggtacggaggaccattgggcttgcagcttgcgtgcggaccgtatgtagggccccagtgagctgag

SEQ ID NO: 695252 - DNA, 99 bp, Homo sapiens
  misc_feature (65)..(66): n is a, c, g, or t
gcggccgcctactactactactgctcgaattcaagcttctaacgatgtacggggacatgctcatnnggaaaggcatcaaaaaaaaaaaagttgtactgc

SEQ ID NO: 695253 - DNA, 104 bp, Homo sapiens
tcctggtccattttaagtggcaggatatggacccagaaaggactctgtcattcctctgataaaacccttatcatccatgttaaccccaagagccacgcaacgag

SEQ ID NO: 695254 - DNA, 581 bp, Homo sapiens
  misc_feature (1)..(1): n is a, c, g, or t
  misc_feature (11)..(11): n is a, c, g, or t
  misc_feature (23)..(23): n is a, c, g, or t
ncctgttgcancggcagatttanttctagaaccccatagacgtcccaaaagctccttgggtgataaaaaaactttaaggaagttcagaatccaaatcacattaaaaaatcttctagcattcctatctaccaacacagtcaagctgagagtcaaaccaggaacacaatcccattcacaattgccacaaaagaataaaatacctagcaatacagctaaccagggaggtgaaagatctttacaatgagaattgcaaaacactgttcaaagaaatcagaggtgacacaaacaaatggaaaactattccatgctcatggaaaggaagaatcagtatcattacaatggccatactgccaaagcaatttacagattcaatgttattcctaccaaactaccaacgacattcttcacaaaactagaaatcaggatcctagaaactaggatcagaacaaataactattgggtaccaggcttagtacctgggtgacaaaatatctgtataacaaacctctgtgacacaagtttacatatataacaaacttgcatttgcaccctgtaacctaaaataaaagtttaaaaaaatt

SEQ ID NO: 695255 - DNA, 271 bp, Homo sapiens
ctgatacaatcgagctcgtaccctcataagggcaagtgatcttcccattagcctcctgagtagctgagactatagacaggtaccccatacccagctaattgtttttttagggtggggggcgtattttttgtgtagacgagttctcaccatgttccccaggctggtctccaactcctgggctcaagccatcctcctgactcggcctcccaaagtgttgagattacaggcgtgagccaccatacccatctacattttttttggccttatcgag

SEQ ID NO: 695256 - DNA, 178 bp, Homo sapiens
acggttttgatgatgatggctcagaatttcatggacatatatttctaggagtaacacctggagagcttttcaaaacaaggaccatcttcgccccttcatggagctggtgacttgtggtctttgcaaaaacccatatcttagagttaaacagaacggtcgaacacatcagagtggcctt

SEQ ID NO: 695257 - DNA, 124 bp, Homo sapiens
gtagcggctaccaatttccccccggcgcggtttacgaccgtggtgcggggggcgggggcgacccctttcccccggcggcgtgttcgcccgagtctcgggcgtcggggggccgccctccacgccg

SEQ ID NO: 695258 - DNA, 243 bp, Homo sapiens
tctagaggatcccatcgtgcgacgatacctcagaatgataccaggagacaaaaaaaaaaagggttctacttttttctgattccctaggatcaggagatgagttgcctttgtccctctctgccagtatgggctatggggcctttcacaaggaaaagaagagccttagcacatttctgtttcccagttgggagagggaatggacctttgacccttgtgcttttaaatcagggaagctttaagttg

SEQ ID NO: 695259 - DNA, 381 bp, Homo sapiens
gctcgacgtctctctctattgcctaggctggagtgcagaggagtgatcacggctcactgcagccttgactgcccgggctcaaccgatcctcccacttcagcctcccaagtaactgggaggtgcatgccacgatgcctggctaatttttttttttaatttgtagagacagggtctcaccatgttgaccaggcatgtctcaatctcctgggctcaagtaattctcccaccttggccacccaaagtgctgtgattataggtgtgaaccactgcacccggcctcttttttaaatagttattatagtgacattccaacttaacatttggaggcaaatttttcttaagaggattatcaagagccagtatctacaagtgtttgataag

SEQ ID NO: 695260 - DNA, 584 bp, Homo sapiens
tcaatggcaacacagatttatggggagaaagacctggcggagaggggttaccagctagtgccagagcccccttcccgctatacaggctggaccagttacagtcccgtggcaggagaggtctgggattgttggtgaaaatgtgggtggtggtagcggtgtgtagtggctggctgcataatgacatggaattatagttgcagccaggggttaggcctgggacctgcctgacaggatgtttctcacagctcagtgccctgtgtggaatttcccactctgaccagttggtaaaatggtagggtgtctgcaaaatacgtgcagttgtgggctaacattcttatttcttacttctagtataaaaagggaaaaagtggcgtcgttggatcatctggctgcttcctgctggatacgcgggcgttgcgtggattagggcctgggttctggagctcccgcaatgggtttccttcgtagcgctcgcggtattcagactgtgggcactcggttgcacttatcttatccacatggttgttggcatgcttgcctggataaaacacttcagccttggggaccttgagctgggctacctg

SEQ ID NO: 695261 - DNA, 963 bp, Homo sapiens
ttccgccgggtgtgttatcgtgtaacttgtaacccgtaatgtccctccggggtatgagaagtgttctctttaaggcgcacgttgtgccccgctatgaccgttgaatccctcaaaaggctgcttccatttggaagagatatcgtacttacgcatgtttgcgaactatgttcaatagtacagcgtcccctgcgatatttgggacaggcgtacgacattcccggcgggttacacatgggaaaatccaatggttgcatttctcctcgcgcaggaggggtcgtaacaacgggggaatgcccccccccattctttgtcgctaatcatgaagtaccgcgtgtatctgtgtagaatgactttggggttaccacccccgaattagtgggagcttcgctttcaaacatccctctggtgcaaaaagggggatccactctatgggtaaaaaattatatcttggcggggtgaaaaaataaggtgcggtttttgaccagcaattaaaaacgtggctccctgtttaataatgtttttggtgaacaagcccccgtacgaaatatatcctcgttgggaagaatcccgcgtgcttttgatattactgcgcgaaagaaataatggttagctggtggttaagtcataaggagccccctgtgtgtgtgccggctgtacacacagcccctcgtctgttgcctcgagggtcgtatataagattattccgccaacatccttttccaagggtggcgctcccgcgaatacttttcccctggccgcgaatgcaggagcgtgcataatcatgtccgccactcactcggggccctcctatcttataatcgtttggtctgctgctgaaggcagaaatacagccagcgttgttagaacagcccggctaggtactaaagacgtatgtctacactacgagggggctccttcccagcaaaaaaccccaaattggggcccccaactcaaacaaaaaca

SEQ ID NO: 695262 - DNA, 115 bp, Homo sapiens
cgtctacggcgttacccgaaaatcgttacatcattaaataagcctcttatgatatccactacagctcctattgcatggcgtcctagtgtaactctgctacataccgtttttacgt

SEQ ID NO: 695263 - DNA, 291 bp, Homo sapiens
gcccaaagtccagtggggttgagccccttgcccccgactgacccccacgtggtcccttttttcatcagtcccaataggaagccaagcccggttcctgttacgccccatggaggctccgagaccatttgcccagcctccttgaggctcaggacccggcccccccaagtgcagccctcgtcctgggtttgccccgggcagctttcccctccctttcctccccctgcccccctgctttttaaaaaaatgggggagaaaacttccaaatgtttataaaaaaagtttgtcccccca

SEQ ID NO: 695264 - DNA, 411 bp, Homo sapiens
acggcttaaagtattaggggttaagactccaacatatcttttttggagggacagaatttaatccataaatgtttaaaagtagtagaatacacaaaatgtgataccattagcataaagtttaaggatacgtacatacataaccgtctaatgaaaaaggaagggaatgataaaggctaggtttggaatgtgactcctctcgggttgagggagggaaaggtgactggggcttcccatgcctgggcattcgtctagttcttttttttttttccccaagacagggtctcactctgtcgcccaggctggagtgcagtggtgcgatctcagctcactgcaagcaccgcctcccgggttcacgccattcttctgcctcagcctcccgggtagctgggactacaggcgcctgccaccacg

SEQ ID NO: 695265 - DNA, 129 bp, Homo sapiens
aaaaagaaaaaaagaaaagaaaaaatagagcctaacattcctcttattaaagttggtacaccttcaagaagaggaatgtgacagaactggccatgtgtgacttctgaggctacatggtaaaaaaaaaaa

SEQ ID NO: 695266 - DNA, 386 bp, Homo sapiens
atacagcgatatatatctgtgaactccacacttgcatagtagtggtctactccagttgagcatttagatagctacaggcgaatcaccttaatgcgttcctaactagactccccatttccaggggaaacttgtgtttcctacaggttctatttcggggaactgcaattcccttttttcagataccaagataaaagaccttggagtccgcaatttcacacatttctttctcttacaccaaaacttattctaacatacacataacttataaatatatagctaaaaatatgtgtccctatatttcatccggcctgtccacgcccttatcatctctcatttagaggcttgttatagctgtcactggactgtcacgttatcaccttgtttta

SEQ ID NO: 695267 - DNA, 730 bp, Homo sapiens
tatgggcttgggtaagggaggtagggggaaattggggttaaatattttaaatggggtggatgaggaatagtggtaaggagtatggagggggtaattatggtggggcaggattagcaaggtcagcctcaggaggctaaaacctttgaccttgctgaagtcttcttaaattgtcaaaagaaacaccaggtgtttccagaggcaagaagcactgggggcttcagacaacaaaatctgtgtgcaaacaagggcttggtacgggcgcctgcgcgtgggtctatgggctatccgccgtgtgggctggctttggcaaattagaccgctggtccggtgttgtgacgctatggccaaacgcggggaaaaccacaagggggcggggcggcaagaacgggctcgtataagcgccaccgcttagtggcccaagtttacaaccgcaagcgcgggttgagcaactgggcaagtgtacgcaaaacagcaatggcaatggggcagcacccacgggagagaaaagaaggcacgcccatgtgacaggggccccacggcggggggcgcgcgacacaaaatgtttgggagaccacggggagacgccatgggagccccaaggggcggtgtgggcacaacggcgcgacgagcaggacggccccctgcaatacggtcccttacatcagcgggcgccaccgtgggggtaacaaaacacattgcccccttagacaccacaaaaaaaacacaattg

SEQ ID NO: 695268 - DNA, 762 bp, Homo sapiens
  misc_feature (392)..(392): n is a, c, g, or t
tggcgaaacaaagcccttaattaaaaaatttttcaaagaccccaccccccctgacccgaggcccaaaaaaggcgagctatcccagctataggcaaaaaatgcccagggagagggtgtctcctcttcaccaaacaatcttccccgggaaccctataaatatagaaataaatatatattccacagagagtgtcccgaggaaaaaagcccagataccactctctttctctccctagtggaagagagggaagtggtgtctgtgtggtgtcccagccctcgtgctccctacctcgatgaggggcgagggacactctctcttagagaaactcgctccacatataaaatctcgagtgatacatctcgagaggggatctcacggggctcattataagccncctataacgaggagagacacccctatagagagagaagaggggcaccccctctcagaggtctctatcaccgggagaacgccccagagctctcacacaggctccaagagacagaggtgagagggagaagagagcgcccccctataaccccccccttacaagcacgacggcggcacacccaaagagagtattcagagagtccccccctctcaaaaatatcccctctctgtgagagacacccccgtgtgagagggacacgcagtgagagagcgggtgggggcgcagaaaaaataagaaaacccccccgagtgaaaactccgcgggggttcacaagtggatataaagcggggtcacgaccacgggggcagagtgg

SEQ ID NO: 695269 - DNA, 964 bp, Homo sapiens
  misc_feature (95)..(95): n is a, c, g, or t
  misc_feature (274)..(274): n is a, c, g, or t
  misc_feature (300)..(300): n is a, c, g, or t
  misc_feature (314)..(314): n is a, c, g, or t
  misc_feature (317)..(317): n is a, c, g, or t
  misc_feature (322)..(322): n is a, c, g, or t
  misc_feature (352)..(352): n is a, c, g, or t
  misc_feature (359)..(359): n is a, c, g, or t
  misc_feature (389)..(389): n is a, c, g, or t
aatcaaacttaaatcattagaatacaagtttatgtattctaatgcatgttagaaaattgaataatataggaaacacaaggctgcatgatgaaaantgcattgttactgtgcagttaaattttggcttctggctttctttagtttgaacaaacgttcttgtctaccccagtagtcacagatgccatctttgcaacagaaagagtggtggtggcaaaatttctagaatgttaaaaaaaaaaaaaaatccacacccatgtgccttctcaaaaccaantgaacttctataaagcatctcgggtnctttcaaagttggngtngtaanggagcaatgtagatgatgctataatacttnatatttngggttataatgacaaccaccagttcttttncacttaagttaggttgagaaattttatttaatgggccactgaagggccattttcaatgggaaaactttatttacatctctggggtaaacttctatttggatgaacaagtggcctagtattttaccaccagatgagaaaaagatgagcagcatttaaaacattacatgtcctttcacaaatacaagtccagagaaagacatgtctataattatcaggcttggttgaatggaatcttttcccccaattcttaatgtaacagatctggtggctataaccttttaaagccatacaaataagagtgctaacctgtggcccttaaacagtagggtgtcgtaacactcatttcttaactcagttatttacctgtgcaaaatacaagtttataagcaaagcctatagaccaatatgcctatttttttttaccactggttcacctatggcggaggtcttttaccatttttttaacgtacacctttcacaattttgacccacacataccaacacaccgaacaaatcaacagcaacacatacaaagtaacaacaacatcacaaacaacacacacaacatagcactg

SEQ ID NO: 695270 - DNA, 400 bp, Homo sapiens
  misc_feature (19)..(19): n is a, c, g, or t
  misc_feature (38)..(39): n is a, c, g, or t
  misc_feature (76)..(76): n is a, c, g, or t
  misc_feature (153)..(153): n is a, c, g, or t
  misc_feature (317)..(317): n is a, c, g, or t
  misc_feature (324)..(324): n is a, c, g, or t
  misc_feature (331)..(331): n is a, c, g, or t
  misc_feature (346)..(346): n is a, c, g, or t
  misc_feature (370)..(370): n is a, c, g, or t
  misc_feature (392)..(392): n is a, c, g, or t
aaacggggagacctggtancaccgggcctgtttcccannacagcacatgcctggctcctgagcagaggtgtacacncagcagtgcaccctgctcccagttcccacccctggacgccacagcactccagtcctttatccttgactaggccccanatgcctttgagattgtggtgccccccaacccccaatctaggcagcaccctgacaggacgtgtgcatggccggaaaggggctggctttctggaggatgtgggtgcaacctctggggcctggatttagtcgccacctggcccggagtgggcattgggcctggtggncgttggnccgggtnactggagtggtgctnggggtgcagcccaagcccccacgncggtgaacccagccccttggtncctttggg

SEQ ID NO: 695271 - DNA, 994 bp, Homo sapiens
  misc_feature (95)..(95): n is a, c, g, or t
  misc_feature (304)..(304): n is a, c, g, or t
  misc_feature (330)..(330): n is a, c, g, or t
  misc_feature (344)..(344): n is a, c, g, or t
  misc_feature (347)..(347): n is a, c, g, or t
  misc_feature (352)..(352): n is a, c, g, or t
  misc_feature (382)..(382): n is a, c, g, or t
  misc_feature (389)..(389): n is a, c, g, or t
  misc_feature (419)..(419): n is a, c, g, or t
aatcaaacttaaatcattagaatacaagtttatgtattctaatgcatgttagaaaattgaataatataggaaacacaaggctgcatgatgaaaantgcacagtaacaatgcacttttcatcatgcagccttgttactgtgcagttaaattttggcttctggctttctttagtttgaacaaacgttcttgtctaccccagtagtcacagatgccatctttgcaacagaaagagtggtggtggcaaaatttctagaatgttaaaaaaaaaaaaaaatccacacccatgtgccttctcaaaaccaantgaacttctataaagcatctcgggtnctttcaaagttggngtngtaanggagcaatgtagatgatgctataatacttnatatttngggttataatgacaaccaccagttcttttncacttaagttaggttgagaaattttatttaatgggccactgaagggccattttcaatgggaaaactttatttacatctctggggtaaacttctatttggatgaacaagtggcctagtattttaccaccagatgagaaaaagatgagcagcatttaaaacattacatgtcctttcacaaatacaagtccagagaaagacatgtctataattatcaggcttggttgaatggaatcttttcccccaattcttaatgtaacagatctggtggctataaccttttaaagccatacaaataagagtgctaacctgtggcccttaaacagtagggtgtcgtaacactcatttcttaactcagttatttacctgtgcaaaatacaagtttataagcaaagcctatagaccaatatgcctatttttttttaccactggttcacctatggcggaggtcttttaccatttttttaacgtacacctttcacaattttgacccacacataccaacacaccgaacaaatcaacagcaacacatacaaagtaacaacaacatcacaaacaacacacacaacatagcactg

SEQ ID NO: 695272 - DNA, 102 bp, Homo sapiens
cattgactaacagaccgcaacctcaacaccaccttcttcgaccccgccggaggaggagacctcattctataccaatttccagtttgacacatcgttcataac

SEQ ID NO: 695273 - DNA, 137 bp, Homo sapiens
  misc_feature (14)..(14): n is a, c, g, or t
  misc_feature (19)..(19): n is a, c, g, or t
  misc_feature (133)..(133): n is a, c, g, or t
tttcgccatgttgnagtgnttggtcttgaactcccgacctcagatgatccacctgcctcggtctcccaaagtgctgggattacgggtgtgagccaccatgcccagccgtgtgtctgtttcttaaagatattanacct

SEQ ID NO: 695274 - DNA, 843 bp, Homo sapiens
agcggagtccgaagaaggaggctgggagagaccacggtatccttccacgctgaatcaacagtctgccacaaagcagactatccagccggctacaattggagtcagagtccccccagacctgggcttgtctagagtgctgtgcaagcatgtctggctagcgggcccccttttgcttccctggtgtccacctggattgtgttccttctggggtggcgactgtactgtggctgtggacatgtaagcccctcactggcacagaaagagcgtaacttgagaccgtattactccaatcaacgtaccaagacgtatggagtatctcatcagatgctgatccatgcgcttccaggtatgtcatctatggaacttgcctctttcttcttcctttatgggtgccctccatgctggctgagggcgttctacgctcaccggcgcaagtccaggcgagatcatttgtgcgacgtacccagaccaccgatcgtgctggcatagggcccttgagcgtcaaccgagttaacagaggcgagccatgacatagggcagggggctacccaggacggcccagaccagtcaagggctcactttctttctcgctacgactgggttggtgttcacttagcttttggagtaagacatgtccttagggaccactcctccgacacagtatctcgtcgtgcgcatcacccttatgccccttgtagcgccgttggtggttgtgcctcccttggggtgcttttggcccgtgcctctttgcctgttgccgctgtgttaccagtgtaagctctcaaactacccttgggacccaccctgaccaggatcctattggccctccccgcagctaggacc

SEQ ID NO: 695275 - DNA, 429 bp, Homo sapiens
ggctgctgttctcctcctcgctggcagctgcgtgtggtggtctcggtggtggtagctcagacacccgtgccgctggacgtttgcgtgcggtggtctctgtggtggtgattgacgccgtgacgctgggaggactgtgtgacctggtttcagtggtggtgatggcagaagtcaagctgggatccctgtgggctgtgctttcagaggtggtgctcggtagcacagtgaagctgggcagtaatgtagtagcgggtgtctccagtggtggccatagcagaagtgtagctgggagatactgcgtgaaatgatctacggtggtggtgatcgacgaagtgatgctggcagtaagtgtgtgcggtggtcctcagtggtggtgattgaaaaaatgacactggtagtactctgtgagctggtctcggtgtagacaatcac

SEQ ID NO: 695276 - DNA, 291 bp, Homo sapiens
tatgtgaaaagccttcccaagaaagatagctacaaataatcccagacagtgaagactacaataaatactcaccttttctctcgctaaattttattttttaaacttctcatatggtgctgcatgcccaagattttaatgtccagacactgaagaacatctactagcatcaacaccatccaggaaaacatgacctcaccaagtgaactaaatatttcactggggacaaatcctggagaaaaagagatatgtgatgtttctgacagagaatttaaaatagctgtatttaaaaaa

SEQ ID NO: 695277 - DNA, 472 bp, Homo sapiens
  misc_feature (196)..(197): n is a, c, g, or t
  misc_feature (314)..(314): n is a, c, g, or t
  misc_feature (350)..(350): n is a, c, g, or t
  misc_feature (419)..(419): n is a, c, g, or t
cacaacctgacatcacagccttaaataactcctgtaatttccatctgtctcttgctttcatgtgtgttagaaaaacagccaatctctttataaaacagccctataatcatacgtactcttcatcttctaagtgtccatgcagcttgaatcattgcacacagtcttctagagttatgaaaataaataaaaccccctnntttccccattttatggttgtgaaactgacacagataacacaaaagggtagattagggaaagccatatcccctctgccacccacctccaatactgatccagctttcctggatcaggcnagtagggcgttgaggcttcttactagaaattattgntaaggccgagggtggtgctcatgcctgtaatcccagtgcttttggaggtcaagatgggaggactacttnaggccaggagttcaagaccagcctgagcaatgtgacaagaccccatctctaca

SEQ ID NO: 695278 - DNA, 587 bp, Homo sapiens
  misc_feature (47)..(47): n is a, c, g, or t
  misc_feature (99)..(99): n is a, c, g, or t
  misc_feature (216)..(216): n is a, c, g, or t
ggtgatctagaggatccttgtggagaggggttcaggtaaaaggcagntgaggtgggggtgatggaaagcctgagggttgcatcagtgtggttgtggttnaggaggggggcattccaaaggcaggtgataaggctggggatggctgaagggaccagagaggccagcgataggcaggcaatccatgggaatgcacaggtcaccagtgtagggtgcagngtacccaggcttcgccttcaaggaggaggggagaataacatatctcaaactgaggtccctggacctcttgcatctgaatctgtcggggggagggggaacttgtggaaatgcagacccctgggcccaacccagccttttggggagaaagtaagcacagtatgggagaactgagcctcaaggagcaagagtgtctatgggatgggggagcatccagcccctccaaggtcaagggagggatgggcatggtggcatctatccaggctagaggtggaccatgggatattcaaagaagagataggctgggcgcggtggctcatgcctgtaatcccagcactttgggagaatgaggcaggctgatcacttgaggtcaa

SEQ ID NO: 695279 - DNA, 613 bp, Homo sapiens
  misc_feature (593)..(593): n is a, c, g, or t
gtggcatcatttacatggggtgatcgaccagtctacccggatagcaggttgatcatagtggaactcttccaccatggaaaaggagagaggttgtcctcattggaacaggcacttactcaggatatgggtttgcctacctgcatgcaatgcttccgacaagactaccatttatggactcaaggaatgccttatccactatcacggtattccacacagcattacctttgaccaagcactcactttacaggtaaagaagtgaggcagtgggctcatgctcacggaattcactggtcttaccatattccccatcttcctgaagcagctggattgatagaatggtgggacggccttttgaggtcgcgattacaacatcaactaggttgcaatactttgccgggccggggcaccatactccagaagaccgtgtgtgctctgaatcagcgcccaacgtatggtattgtttctcccatagccaggattcacagatccaggattcacggggtggatgtgaaagtggcaccactcactatgatgcactagcaaaatgtttgctttctgttcccacgacattaggttctgctttactagtcatncttactccagagggaagaac

SEQ ID NO: 695280 - DNA, 1114 bp, Homo sapiens
  misc_feature (13)..(13): n is a, c, g, or t
  misc_feature (44)..(44): n is a, c, g, or t
  misc_feature (88)..(88): n is a, c, g, or t
  misc_feature (381)..(381): n is a, c, g, or t
taggccgcccaantgcgaagccgccggagcggacttcacggtcnaccttacgagttgagtgtccaaacgagcaagctggacagacatnagaacgagacgcccgacgcggacacccaagaaagctggtgaggaccaacacgaccgcggtgaacgagaggatcaccgtggggcagacacgacacacagcaggcgctgtctgggagcacacacgctaaagtaatacagggggggccccacctctccgcgcgatcagggggcgccccccgctgggcaactggagatcgcaaaacgtcaatagaccgacgaggcggtgcacaaagacgacgacagtgctcggctggcgggaccgtggaccgcccggatacagggaccgcgggcgcncccttttacgggcgaaggatagcgagacgctctgaagactggcaccatcgaataggggaatacgacaacaagcagcggggcgctcagcgtaacaggggccgacccaccgcaagagatgctggcgtatgtaaaggacactgcttaaacagtggtctcctctattctatttcacgggcctccatggccccacgaatgtatgcctaatttcttggagcttgctccaataagagaagtgtcaaaagtccgtacggcttgatagagccccgcccaaattcccggtgcagtaagaggcccacaagattgatatgtgaatccccccccagagatatattcgtggaagttaattcttaacagggattcaatgatacctagtactaatcgcgggggagggtcaccgtgcgacgatcccaccctgcatcgtctgccagaccatgctcacaagaagcgtggcacagacactgacaatttcacccatcgcccatggttgaggcgaaaacatacccgctcttacgaacgccgcatcagggttcaatctattgtcatagtgactggtacgatcgtcattgttctagtgagtttaacccgcgagatcacaaactttgtttccctaatgcaatactcagagccgcccggggggtgaaaaaaaaccccggtatactccttatgtggactgcgaagataatatttggccccatcccggccaatccaaaaatggggggcgccccacaaataa

SEQ ID NO: 695281 - DNA, 368 bp, Homo sapiens
  misc_feature (109)..(109): n is a, c, g, or t
  misc_feature (299)..(299): n is a, c, g, or t
  misc_feature (364)..(364): n is a, c, g, or t
  misc_feature (368)..(368): n is a, c, g, or t
tgtagcctatggaattatccttaggaactcaaagcttcctaaaactatcccatgtagtcaaatcctaggggaaaaagcaaataaaaatagtaaaatttggccgggcacnagtctcacgcctgtaatcccaacactttgggaggccgaggcgggccgatcacgaggtcaggagatcaaggccatcctggctaacacggtgaaaccctgtctctactaaaaatacaaaaattagctggccctgatggcatgtgcctgtaatcccagctacttgggaggtggaggcaggggaatggcttgancctggaaggcagaggttgcagattgtgccactgcattccaccctgggtgacagagactctatctnaccn

SEQ ID NO: 695282 - DNA, 478 bp, Homo sapiens
taagcaggaagagaagccacagcgcttcagaaaagagtgggacagggccaagcctatttaagaggctgaacatgaatccacagatcagaaacccgatgaaggcaatgttttcaggcacattttacttccaatttacctatgggaagccaacgatcggaacgaaacttggctgtgcttcaccggggaaagtataaagcgcccctcaattgtctcctggaagacgggcgtcttccgaaaccaggtggattctgagacccattgtcatgcataccaggtcacctggtacacattttggagcccttgcccaaactgtgcaagggaggtggcccgatttctggccacggacaagaacgtgaattttaccattcttaaccgcccgcctttactactttccagtttccatgttaccaggaggggcttcgcagcctgagtcaagaaagggtccctgtggagatcatgggctattggatttttttgt

SEQ ID NO: 695283 - DNA, 273 bp, Homo sapiens
agagaagagtcggagacaacctgaaattgaagatgttggttctgatgaggagagaaagaaggatggtgacaagaagaagaagaagaagattaaggaaaagtacatcgatcaagaggagctcaacaaaacaaagcccatctggaccagaaatcccgacgatattactaattgaggagtacggagaattctataagagcttcaccactgactgggagacactctgcagtgaagcaattttcagttgaagggcagttggattcagagccctctatt

SEQ ID NO: 695284 - DNA, 368 bp, Homo sapiens
ctaccatgttggcaggctggctcaaactgctgactgcaacggatcacctggctcccaaactgctggaaccaccggcgtgagccaccgtgccgaaccttttattgttccttagaacggagtcttgctctagtcacccggcctgggagtgcagtggtgcaaacacagctcaccgtagcctcaaaatcctgcacgtaaagggctggtcctgcctcagacctcccgagcagctgggactacaggtggtgccaccatattcagctaatattttcttttttttaaaggggagggcatcttagatgttgcccaggcttgtttgaccaccagtgatcctcctgccttgggctcccaaagtgctaggattacaggcc

SEQ ID NO: 695285 - DNA, 475 bp, Homo sapiens
  misc_feature (453)..(453): n is a, c, g, or t
tttttcattagagatcataatgctgtcatgcattgtagaaagagagcaaagagcactcacaattgtgatgggggaggagagacagattgataacattccttttaaagcttagctagcataaagaaaacagtatttactaaatgaaatagattttcaaggttggaaaagtcgtactcaagaatgaatttttggatacaaaaattcagttacacaatcaggagcattcaaaattagctatgagtatttatacaagtacagagagggattcatgttttaacaacgtattgtataagctcagacattttaaaacagggacaatattctaaaggcatatgcattcaccatgggcttttgaatgtcctcacttctcactttacatataaaatctacagaagcggcgcacgatcagagtttagagggctatattttctttcactttactttacttagggntgcacacacattgacagagggc

SEQ ID NO: 695286 - DNA, 315 bp, Homo sapiens
accacttccagagtggaaggtaggggtagctgagatggttgaggaccagaggatagcggggagtagtctggatagacttttctgtctctaaagtcctgttaactccactctcctattgcttttgcatgggtccctccccagctatcaacatcctgaggcctcctctctcggccagagtattgcaagagttgtacaaaccttcctggcgaataccaggtcagcggtcctttgggtgagagaggaggcctcaggatgctgatagctggggagggacccatggaggatccataggagagtggctgtaagaggcctagc

SEQ ID NO: 695287 - DNA, 137 bp, Homo sapiens
  misc_feature (98)..(98): n is a, c, g, or t
tccacacagactagggactggggatagggggagttgttgaatgcatacaaagtttcagttggacgccgggtgtggtggctcacgcctgtatatcccangcactttgggaaaggccgaggcgggtggatcatgacggt

SEQ ID NO: 695288 - DNA, 133 bp, Homo sapiens
cctgctcagaagaggcaggagtcgagaccagcctggtaaaacacgagcagacctcatctctactaaaaatgtaaaaattagctgggcacagtggtatgcacctgtggtcccagctactccagaggctgaggca

SEQ ID NO: 695289 - DNA, 107 bp, Homo sapiens
ttacaaccccacgatcacagaggacagaacgaaacactagtattgtggttgtgttcgaacttcaaatacgaggggtaccgcagcgtcgacattcgctaagtcgatgg

SEQ ID NO: 695290 - DNA, 102 bp, Homo sapiens
ccctgcaagcatgtttttcacaaatcctgcgttggatctctggcttagtgaacattgtaccagtcctatgtgcaaacttaatatattgatggctctgggaat

SEQ ID NO: 695291 - DNA, 164 bp, Homo sapiens
ttagactcatgaaagacagcccaggaaccgcggacggaccattggtcattgagagactcagcagcatggcctacgggcagatttcgcaatgatccaggctctcggtggcttcttctcttcactttgtgatcctgtgcagaaaatggcttcttgccctggcaacc

SEQ ID NO: 695292 - DNA, 231 bp, Homo sapiens
gcgacgacttctgcagcagctcattgatctttgaaaagtgtctacatcctaagaaccctctatacactgacacaggggagggatgagccgtctgtagtacatcgtgccgctccctatcaatggcactgcccttcttctgaacgcaccagagccccccctagccatgagtacaatggcctattcgagttctgattttagcccgagacacaactagcatcaatttaactcgct

SEQ ID NO: 695293 - DNA, 372 bp, Homo sapiens
  misc_feature (16)..(16): n is a, c, g, or t
  misc_feature (78)..(78): n is a, c, g, or t
  misc_feature (360)..(360): n is a, c, g, or t
  misc_feature (365)..(365): n is a, c, g, or t
catatgtaagttatgnttgtaccctaatgtgaaaattgtaatacagtcatcccctcaaatatgtttagggaattggtnccccaggaccccccatgggtacccaaaatctgtgaatgctcagctctctgatatgtagaatggtgtagtatttgcatgtaacctatgcacatcctcctgtatactttaaataatctctagatttcttataatacttaatacaatgtaaatagttgttttattgggccaggcacggtggctcacacctgtaatcccagcactttgggaaatcaaggcaggaggattgcttaaacccaggagttagagaccagactggacaatatagcgagacctcatttctantggtncaaaaaa

SEQ ID NO: 695294 - DNA, 516 bp, Homo sapiens
  misc_feature (36)..(36): n is a, c, g, or t
  misc_feature (109)..(109): n is a, c, g, or t
  misc_feature (111)..(111): n is a, c, g, or t
  misc_feature (114)..(114): n is a, c, g, or t
  misc_feature (117)..(117): n is a, c, g, or t
  misc_feature (165)..(167): n is a, c, g, or t
  misc_feature (176)..(176): n is a, c, g, or t
gctcgacgggatcccagcagggtttctgctctgggnctggcaggttgcctggtattatgcccaaggccgctctgcctgggggaaagggcagccaggcagaggcccagtntnttntangctgctgaatttcctggaaggggtgattggatggaaagaggccagaannnttttggggngagactgctgtgcaccccacagtctgactgcacagagccgcctctgttggcaggaggcactgaggctccccttcctgtgtattgagaagcagtgtttgccaatatattttgctttcaattccaagaggagctctgggaaaacctgtggataaaaccaaatgccaaatgttttcccagagctccccttcctgtgtattgagaagcagtgtttgccaatatattttgcttcaattccaagaggagctctgggaaaacctgtggataaaaccaaatgccaaatgttggacgttgtttcctttcctttctctctctgattgttttaattgttctgtggtgttta

SEQ ID NO: 695295 - DNA, 118 bp, Homo sapiens
atcagaccagtgtggagaccaaaaaggaagtattatacgcacgttactttccaccagcaatgcatatgtaactaacttgcacaatgtgcacatttaccctaaaacttagagtataatt

SEQ ID NO: 695296 - DNA, 178 bp, Homo sapiens
tcgatcggtaagatagctagacgggtcaggcactggtggctcatgccgtaatcccagcacttggggaggccaagatgggcagatcacttgaggccaggagttcaagacgagccgggccaacatgatgaaaccctatctctactaaaaatacaaaaatgggcccagctcacgccggtaa

SEQ ID NO: 695297 - DNA, 522 bp, Homo sapiens
  misc_feature (27)..(27): n is a, c, g, or t
aaaaacccaaagaaaacgtacatccantgctgtggataagacactgtgtacaatgtcccgcgcgagaccgccttgcctgccacagcctgtctctggtgttatagaggaaggcgtggcgcgtgtgccagttacaaaagactgtcttgaatcccaggtagtgcctattcactgggtggtctcagaagacttcccccaaagcgcggctgacaagggtgacagcgcctggcccgcgggaactgtccgcggagctggtgctgaatagggcgtgtgcggcgggcgcttcaaggaaactggaatgcgggaccggaggccgcccctcgggcgtgcgaggaggatttggaagaagagcggggaggggaacggcccggaatctcgtgccgcgacacgcggcgccccaacccataaacccatctcttgctcagagagaagcgaaggagaggcccagcgagtaaaagccgaggcccttgaaggctccttcgcgcgcgccttctgcttgaggctcaccttgctgtgccgtttctt

SEQ ID NO: 695298 - DNA, 919 bp, Homo sapiens
cccctggggattgcactctgctgttttaaggccaggtatattgccccgatcgcccactgggccgcccggagagagtcccagaagagaagtgtgtaatgacgccgggaccaataattgtgggtgggccaataacacatagaagggtgtgtccaaaagaggccgcccaatgggagccgtcgtccagaaaggggtaaatttgtggccacaaatgtgtatattgcctgttgcttgggggtgacactaattcggtgaaaatgggtctccccgccccgtccgcaatgatccactggtgtatttaattatggccgtccttttccccccgggtggtgttcccccattttgtccggccaagtgtttcctaaaccccttgttgtttgaaagttgtggccaaaggaacaaatagtccaacataatggccgtacctctctggagtaataatttaccgcccttccgtcgaccaatccttaaacttatggaatggaggtgtgctcccaatagaggggacaaatctctttgggtaacaccccgttttttaaaagaagtttttctttcgtataggagacgccctcccaccacagttgtgttttgttgaaaggtgtggagatgtgtaaaaatctgtcgctgtgagaatatttggcaactctcccccataatgtgcctttaaaagtgccaccttattgcccaacccggggttataatcacacggacatccggacacacaaattttttgtacatctgtgtctctgtacaccaagaacaaatttctcttttaattgtgtacacttgcctcttttaataacacgttggttatacgccacctaaaatccttcattattgcgaacccaattgtccctctccaaaacccctcccaatgtaaaatttttttcccaaaaaaaaaatccatttttccccaaaaaaa

SEQ ID NO: 695299 - DNA, 154 bp, Homo sapiens
catgttccgccaccgtgctagcctggctttgcaatttgctggcttaaaaaatgactcttaagggaaactacacttcttactcaaatatttcttctttcctctggcaaattattaattaaaatgagtatttttagagggccagaaccagtgtaat

SEQ ID NO: 695300 - DNA, 215 bp, Homo sapiens
ctcgacaagtgtcacacattgtcggctaatatgtatttttagtatagacatgtgcttcagccataccggccaggctcgttcttgaacattctgacctcaggtgatcccaccttggctcccatagtgctggaattgtaggtataagccaccacagctggttttgaatgttcactatcaataggccctttgcagaagtacttatcgaagactttccc

SEQ ID NO: 695301 - DNA, 1051 bp, Homo sapiens
gaaatgaactatggcgcctgcgctgagtccgtatcgattcatgttccgttttccaccgtactgttactgatgttgtgctctgtcctcggcaccctgcgatcaggttagagatcgaggtagcgagtacttcgctgaggatagataactagctcaaagctgtgctccgaataagccagagaccggaaatgggctactcgactagtgaggactttaggaacacatggtttgcgccacgaaatgctcaggggatattgcatttttacctcccgtggagggctggaccgtacgcaatccaagctatgtcatttgtaccatctgccggtagagtcgtacagcattctctgtcctagcaagaagatttacatcgggttcgaactgcgcgtgataggcaccgatggtggacctcgcgactacgccgcagtctattatgcacaaccatatgagtcatccttagtccatcgtgtttggcctcggtacgataacgtcctgggccggctcgttccatgttaactcaaggtatactcgcattcaatgtgggaagacctagcgaagaaggggctggaaataatccctagtagtggaaagacttgctttgcataagggcgttgaaaaactgtactgtaatagattgcccggcgaaccgcaactggacatcttctgaaggggcagtttcctgtaattatctagaagaaaagttcgacgagtatcgaagcccgcagagagtagcctgaggcacgaaccggataatctccagggagattcgtcttaggcccatcggaactgagcgacatcaacggtgtgcgtctgcacaagccggacaccggagttgaggaaagtgtgaggcttcacccaggctggaatgatggcggtagcaccaggaacgcaatgaagctaattcaggcccaggtgataactgcggcggcgccccgcaccagcaagggcgggggtcggggtccacctgacgcaaggcataacccccgcgtggatttcaatggcaggtgtcctttccgaactcttggggacggcaatatagccgctctctatattcccg

SEQ ID NO: 695302 - DNA, 244 bp, Homo sapiens
ctttacggtctgaatgcgggcatgccgtacgcacccgtactgcagcgagaattgtccgtggatggtctccaccgcccccacggcctcggtgaagacgtccacgccggggcgcacttcactgtcttcatcttgtgcgggcagcatccgtcatctgcttgctgcacgcagttgtagcactccaggtcctgtgctcctccgagaagcagcagcagcagcagccagcctgtagttcagaccggcggct

SEQ ID NO: 695303 - DNA, 647 bp, Homo sapiens
tgggctctagaagggggtaaagggggtgctatagggtaaatacgggccctatttccaaagattttaaggggaattaattctaggacgatgggcattgaaacgtggtggtttggcgctccacagaattttcagaagcatttgacgcgtagtttataccccgcggttcgtgtgttaggcggtgaaagtgtggtttgtggtttataaacgtctccgggaaattgtgcattcgtgtttttataacgcctaatgtggtgggcgacacgctcatggtaagtgtgcaagaagcgttcttgggtgagtgtaatttatttatctagcgaaatgtcgggggcctctcaactcggggagttacataccttcgaagtgtgctcaacgccgtctcagagggagtctcgcaggtctcgcccggtgggtctcatagcgaaatataaggtgggggaaagttattgtctgaggagttttagaaaatttagtctccgcgcgtataatctcgggtgatacctcggataggttctcagtataccattgtgggtggccccaatttgtgacttgggaggggataaggggaggggatctcgttgtgaccttcggtcgtggttagttttaaaggattgcgataggggattgggagggcaaatgaggaccta

SEQ ID NO: 695304 - DNA, 444 bp, Homo sapiens
tagcgggtatcgtggtctcgctaactatcaggtcctaagctgccgaccttcacagttattgttacagctcagtagatgtagcagggacccccaacagtgagcagcagccatatttattgtgcatcagcgaaaaaacaaagtttccacatccgtggcaatcggcaccatgtacgtgggttgcgacaggtggactctggtggacagcttctattctcttatttaggacccgacccacatcctgctcattggtccacttcaacagagcgctggtaggtccattttacacaatgctgattcgtccgtctttagcacagcgctgattggtgcatttacaatcctttaactacacacataagtgctgatgggtgctatctaacagagcgcccatcgttgcgtatacgacccttcacctggacacagagcgcagatagctgtgtgcatcaa

SEQ ID NO: 695305 - DNA, 120 bp, Homo sapiens
  misc_feature (62)..(62): n is a, c, g, or t
gagcgcgacattcaagagaagcaatgtgccccggagaagagaagctcgccattccagactgncgaaccagcttatcagtgaagatagcagggccatgaactgtagctcgactccaaacat

SEQ ID NO: 695306 - DNA, 128 bp, Homo sapiens
taagaggaaaacccggtaatgatgtcggggttgagggataggaggagaatgggggataggtgtctctacctggggggggctaagccagaagaaactatggcggaggtccataatggtcctgacatgga

SEQ ID NO: 695307 - DNA, 1588 bp, Homo sapiens
  misc_feature (271)..(271): n is a, c, g, or t
  misc_feature (557)..(557): n is a, c, g, or t
ttctgtctccagggaggccacctacaacccaccacacgtgtgggcgcggagagcatttattgtttttaataaaggaagatatctcttcttcccaggaacgacacctcggctgcttttcactttagtaaaaggaaggggggcgccatacatcttgatataccacccccggcgggggtcgttatctgctcacactgatacctctctcgaaataataatatggccgcccccgcgcctcgttaggtggttgccccctacgagcccaacagaaatnaggtggtctgaaaaaataaacgcccttgcgacatgcatcacacaaacaggatgaagtgtgtgtgtggggtgtgtgccgacacacccacaccaccactggttgttggtgaagacagtctgtgtgtttttccgctctgggagaggtggtgccccctcccctcgtggatgttggccgccctctgtgtgtacaggacgatggtctttttctcggacaacgagaaagaggtttggcttcacatcaggccaccgcatgcacttgtctttctccacgagggcatctattgatngagcagccacccctctcaatgctatgtggggggggggaaaaatacttataaattatggctccgcatgaaaccacgcgtgctttttcacacaacactgtgggggtagacacggcagacactattctctctttggagaagagatttgttttgctctccacgaccacccacgcgccgcgactggtctcgccacaacatcactcgcggtgctgtccaacgacgagagctcgtttgtcacacgaggaggggctgtgtctgcgcaaaatagagggccgctcgccacacatgtgaacacacacgcgggcggcgcggacaaaatatacttgtagatgaatagtgggtgcgccgcacaacaaccctcgtggcgagagatagtgggcgccagagcctataacaactcgacgagggggggcctttctcccgcgcgagaattatatatgaataatagccagctctctattgtgtagacctctctgtgatgacaacactcttcttctcgagacagaacacgcaaggatcttgtctgttgcgatgacagaatccacacgaaggtggacacccccccctcttcgtcccccgaggatacccctgtgtgcactcccccgagagagttttcagacaccgtcgagacacctgtgcggtgtctttttttacaccgaccccaagtttgcgcgcgttgccacacatgtggacacccgtggggggagaataacattccacccgccggcccacactgtgagtgttcccccatcccaccgaggggggcgccccctatccagattgttccaggagtggcacccaaaagagggtctcacagagcgcaccatcagccttttctccgtggatttacatgagcatgtcacacaaaatatttgggcgataaaatcaaaaaagagcgcgcccattccagcaacgttaagaaagagaatctcaacacctatttctattcacgggagagtccccgggggaagggttttcccggggaaacacctcccccgcttttttttttggagaaaaatattttttttgcccca

SEQ ID NO: 695308 - DNA, 1057 bp, Homo sapiens
gaaactttataaaccccccggagcccgagcagtgtgaagaagatggctgatgaactgaccccctgtgacctgaccaaatgccctgcgcgcctgttgcatcccgctgtccagcactctactgtccctgcttgcctgtctgcctgcctgtcactcatgcccatatgatgaaatggcttgaagtgggatgctaaggtgagatcaacgcaaaggtgaaggacgaaccacagagaagatccgcgaggttgtctgctaaacctgctcctccaaagccagagcccaagcctaataaaggcccctgtcctagaagggagagcaaggtacccaaaggcgcaaacacgggaaaagctgatgctggcaaggacggggcaataaccctgcacgaacatggcagcatgccaaacacagaccaggcacagaaacgctgaacggtgctggacgatgccaacgtgaagtgtgtgcatttcttgcatcactgtgtacttctggtgactgtacagtttgacatacctatctcttaatcacgttctcatcacccctgccgacactctcgctctcacctctcccttcccctccaaacgctactgcttcgttcgcctcacctacacacttcctcgctcgtcctgtggtcggccacgggcccctttgctcctcgcctcgccgtgtctccccatctctgctcttgccttgtgcgccaccacccccctttcgctttcttctctctgtcacgccttcctcctctggctccccccgtcgtctcgtgactctcctctgcctttcgtccccctttgccccccctttggtcccgctcgccttcgcggcctctcgccaccctcaacctcattggccatacagttggcaccttttttcatccccctattcccccattcttattcagctaattagaggatttatcttcccttttattacgcctatcgaaaattttttttcataatcgttgacccctatatctttttggtaccacccatgttatccgacatcattgatcatctaaataagtgcaccatcgcaattcgcacggtcaatcacacacgtcatc

SEQ ID NO: 695309 - DNA, 1918 bp, Homo sapiens
  misc_feature (845)..(845): n is a, c, g, or t
  misc_feature (1914)..(1914): n is a, c, g, or t
  misc_feature (1917)..(1917): n is a, c, g, or t
gcagtggttgtctcgaccgagataggtgtcagaagacagtgatatcatgcatgactatgttgtatgccgtgtgctgaaggcacacaccacatacgatagaatcacgcctacgctagcacttgaccgcacatcctttgccccagtcgaggagctacttctcatgcggcgacacacgacgagacgagagatctcagtagactgccgttctaaatgatgctaattcccttctcaactacactaattgactagaaccttctgggaaaagtgagaccagagaatcattttacgtaaaccaaaaatgcgaattatgtgctatttcagtgtgattgtgagattgcagatacgtggggattgactgaagacaaaataaaaagatgcttatgggcaagttagggcgctgcggtatatttatcgtctacatggatgctcgcgcaggaagttctttaaatttacaaaggatcagtcggcttacatgaattatcctcagggggcactcgtatgtcagtatcaatcaacacattcggaagaggtagagatctgtaagcaccgctcatggtgcttgctgaatcttatcatgcacgcgaacatacgtcgtgccacaccttcgtacgtataaaaacggatttacatgcgggtgtacatcacgtacaaatctcgtccatacttaagtacatggacatcccaggaatcttatgtacgcaaaggggcgtaaggtgtaggaaggtgatggacggagtcttagagaatccaaagtgagactccttaagtatttaaccggcaagaaacatatccttggtggaaggacaagtgaaacgtaccgcgtgcgtatatattaaagtgcccanaacgaatatatgccgtattggcagattcgaatggggggcaaagtgtgttcattacaacaggctaattgagattcctcgtgagaaatggtaaaagaagcaagtttgggtattatagattggcaaaagaggtaacttgtttgactaaattttcactacgtcgtggaaatccaaaaggttagggtccagaaagttgagcctaaatcggaaagggtggagtaggggttatatgggctttgggggatttagcaacagctgagaattgagagacccgttaattgtaacattagttggtccgagacaatccgtagaaagagattagaaggacatgagggcaatttgagacgtttaataggaaacggctgggtgaaattaatctcagggttcaccgatggtgcggtgtaaccttcgtttccaacgttaataaggagagagagcttgagatggctccggaaagtaaatgtcgggaacattggaaaagtgtggcggaaaggtggggtgcaccatttatttccgaagagaaagtttgtggggaagaggaaaattatggtaggagttttatagagtaacgagattaagttagttgaaccttctcagtgtaccccatgtggtgttaaaacgtcgttaaagtgggaaatagtgaagaggcaaaaattttcaggtggggcgcattcacacacagggactaaaccaccccccaggagatataaggacagggcacacctaaacaacgaaacgaggcgggagagacgcaccgacgaagacaacacacacccataagtgacggcagaagaaagggagaccaacacaagcgaacgcgaacacagagtacagcgctaaatacaggagcacacaaagcagagaacaaccggaggggtagaatcaccacgaagacacagcgacaaagcaaacagaggcaaatacgacagacgacggccgccaacacagagagagaaccaaagcacatccagcagaagaaccaaacaacacacgactggagctatagcaccccgatcagagactatattatcatcgtacggagacgacctaaagacagcagaacagacggagnagna

SEQ ID NO: 695310 - DNA, 428 bp, Homo sapiens
ggaacgtaccaagggttctggccattgatgactacaatcccaattctcccagccctccagcttcagaaatggtgtcacaaggcgtggagctgatggacaatgctacccaagccagaaagcaggtcagtgtgagtgtatctgggagcggaactccagtttgtccacggccgaaacctctgaaagaaggctcttcttcatatccaggactatagagtcgtgaagatttatcaggtggtgaaatcattcagactagagcattcccagagttaacgccattttgacgcatggatcatcagatattcatacccacatagattaacctcgcccacagattctccaccagagatccacagcacggatgtaaccctggaatccgggggaccgcaatcttcgttgtcatgtagtcaaagaatcctaatgatactgtg

SEQ ID NO: 695311 - DNA, 1289 bp, Homo sapiens
cagccctgcagcttacttggtgggaagcgcagctcgaaaagcgatgcctgattctggtttcctgggtgctgctgtgcccacttcgtgtgtgacccagctgctgagtgctgtgctgtgctgtgctgatgtgcccaatgaaataatgaagcgtgggactggctgtgctgtgcattgcatcatgtgacgcctgctgtgtgtgcttgtgatggtatgaccatgttccttggacagactgtgctggctacatgtgatgctgcacggacgctgtgtggctctgtttgtctttatgtgccctcaacattgaaaccactccttctatctgttgtgaacactatgtgctcccagagtgcacacacacagtgtgccttgcacgcacaatgcaatggcagcacagccgagaaatgtccccaggaagagccaagtgcttccaacgttgccgtttacctcccagatgccagagcacccccgcgtatactagggtggttatttggacgcccgttaccacgttacctcagttccggaacctggaacaatgcagagcatcttcccgccacagcgactgcgttacgcgacatctggcatccccgccgcccgagacgacggcactgctgcattccagctcttccgggtacggcccccagccgccaaggtgtatacagcctccccgacaagagccctgcgacccccccacacgcggacgcactcgcgccctttcccagttactctcgggccctcggcctgtaatccacccgcgcttgggtgctgcgcccaacgtcggccgctctaacattctacggtgaggatcaaacgtgagcacaccgcagcgcccttcttgggtgatgctccccaaccaagtcctgtgcgctacacaatctgctgtgggctgcgtactatgcaatcatgctccttatggggccgcacccgcaccgcccgtggatgcggcggccaacaacaggtctgcgcattctagggctcgacgcccacacatcgattgtaggctcctcgccccacccacaaatgcgagctgtcgcccatccctacctctatggctccgacactatttcaccctccagtattcaacgacagatagatgcactgccacccatcctacatacatatcatacccacacactatctcggggccgacagaagatggccgccacacacacttggtctcgctatggtcccctccactatcatcaccgactacagctacggctcccacttctggctgtgtggagcttcacccccacgacactggattggcaactccacgtgcgccccgttgg

SEQ ID NO: 695312 - DNA, 809 bp, Homo sapiens
gtcgactggcatatacattgtttacatgtgttgcactattaatcttctagtgggcctttaaaaacatgtatgttctacatagtgtgtccaattagtcttctcaggataaatgtcctgcaagtagattcaagtgggtgagaggtatacacattgttaatatcgtacttagtaaattaatcctaaccaaaggagatttgaattatgactctctcatgtatagtacagagttgggaatcgtgttttaaaggctttcccacaaagtttggctaaataaattgaagtttattatatatggatcaacatcgttgttattttttgttaatgtcagaagtttgggaagatagtctgtaatagtggtaatataaagttaagctagaattctcgtctctcgcctttcgttcatggatattgtatgggtcctctattcgtgcctcgcatataacactcatagatgatttatacaggggaatgtgtaggtttcaccgaagaatgcttgttttgaaaagaaataccactattcttgatgtctccaagaaaagagacaattggacattgtaatcgtagtgggctgtgatcattttgcacataggttactcatagagtcttatcttttgtgaacagtattctcagacgctcataacgccgattttattatgtacataaccctctgtaaagttgggataacctataggctactttgttatataggaatcggatttagtgaacttaaattattggcttaaagtcaaactattaagtgtgggcactgtcatggtcttgggaattgggtaccaagaatgcatgtgtgc

SEQ ID NO: 695313 - DNA, 1332 bp, Homo sapiens
agctgatagcaggaacaggatcaagtcttccataccagggcaccaggccaaaaccagactgccactgcccctacttgggccccactgctccccagaaagcagcctgctgtgactcactgggcaatatctttgcgaaaccttctcaagagcctgcattggcgaagaacggagcactgcgcatccctgcactgcgctgggccctggactgccgccagcgcaacagaccaccactccctactacagagcctgcaaacctgggccgcgcacgactcgatcaacccacccactccccctacccatctggcgcttcacatgctgtgagaccaggctgcgcaccctactacacgcaaccactccacgccctcttacaagactgctgcggcactgctcgcgcgctggcgcccccaaagcggcacccacacgcaactctcggcacccccccatctctgcgcacgaaccacgcgtaacccttccccagcaaacaaccccacagcggctctgcactcactctcctgctgcgcccccgcaccaggcccacacctgaaactccgcgcgcacgcccgcgcacgctcacaccccttgcacggcggcccccgaggcgcaacacggcacgcccttgccacctcggcaccgaacacgtgccccttgccgccccgcgccactctggcaccccgcaaacggcccttcccccggaggcgcaacacttgcaccccattggccctctcaacccattacccgccccttcatggccattaccctctactcatgagcccgcatcacaacacccccaacaagaacaccccacggctggccaaccttcctttggtagcccacccatataaaacacttgtgacccctaccaaccttgcaagaaaactcgcagcccattggacgccggttggcgcaaggcgcaaactttaccgaaccgccgatcgccaaccgccaccacagtcgcccccgtgggcagaccggcacccccccgctttctgcccccccgacaccactttcacaccccccaccccaccatatactatcacgcgcgcacatctcccacaacagccacacgaggcacaccccaacacaacccccgacatggtgcgccacattaaaacccaaagcatcaccacccccacaacccgacggcgcccccccccaaaaacccacccccattcgcggcacttcgcccccccaacaacccccacaagaccacccccgacgacccaccggcacaacccctgccggcgtgcaccccctttggcgctccgacccacgcccaatcacacctccgggcacccccactcgccgccacccacccctggcaccgccccccta

SEQ ID NO: 695314 - DNA, 657 bp, Homo sapiens
gctctgatcactttcactttacaagcttatgtatccgtctgcttatcacctctgcattactttaaattacttttgaatctatatgaaataatttgttgcagactatcgtggtgcagctgttaagtgtaaaccctgagagtaataacagctactcgatgtatctagcctggacatacctttgtctgccatgaaaatattatcatttcgtacagcatgaaactcgtatttaatcaggctttctatcctaagccatcttgcagacgctatctatcagttagaattgtctaatcactgctatattaatccaggtgttctagcctctacaacctacttcagttccaattgtctaattacagcaatagtttaatacaaaaaaacagctgcaacttgtcaaggatggaaaatgtgtgactcttgtgtagaactaattgtttaccaacttgacattttcctacagataaatgtgaaattttgagtaagaagtctacgcaatgatcaagtatggtacatcaaattttattaagaatagttgagtataaagtactttaattctaaagttataagagaaatatacatttgcacttattaatatagaaattcatattgtgtatattaacatagctttaaactatacggctagtactaatatgtctgtcg

SEQ ID NO: 695315 - DNA, 899 bp, Homo sapiens
cttctgaagaggcccacggcccttagtgcctgccatctgaggccgctctgtcctatggagtgtcgccctacaccagtgacgggccaacacaagtatctatgtgctggaatacaatgattgcatccttgattagattcgaccagaagaattgtcctgcttgcgaacttcagcaaatgtcttctaggctcggtagatgcacattaatggtagcacgaccagtctaatagcaagtgcggcgatacagttatgtaggtgattcagcgaggacgccagcctcgagtcgagcgagcagccactctcccagcaatgacatgaagaccgctgatgagctttcatcaccatatgatcaccagcttacctgagacccggttcacacgtggaccagcttctggactacttctatagcggcaaggtggtgatctccgatgcaaacactgtgagaggacgcctgcttcgtgtgggctccatgtaatttcgaacctactagccacgccttcgagttcactgtacacgatcttccttattaatgtccatctgccgtgccaactgcttgcgctacctcttcttggctagagctgttatgagcctcaaagaggtatcacgacgtagcttactctggcattcgggacaacttccactactgggccagtcctgagggctccatgcacttcatgcgctgtccacctgttatctttggccgcatgatccgtgatgaaaaccttcacgtgctcaatgaagaccaggcgctacagcggcactcatcacttgggtggtacttccggacggcgcgatcggccagcacgtattcaggacagttcttccaatacatcaatctcaatgctgtctcaataagacgctggtgtttgcccagcaacaactggtgggcatggagaacacct

SEQ ID NO: 695316 - DNA, 112 bp, Homo sapiens
aaccggctcctttgatctcacagcactttctctattccttgtatgtctctctttcccacgtgtgtctatcagacattcccgtgtctctcctctttgtccttgagttcctgac

SEQ ID NO: 695317 - DNA, 288 bp, Homo sapiens
  misc_feature (8)..(8): n is a, c, g, or t
  misc_feature (36)..(36): n is a, c, g, or t
  misc_feature (45)..(45): n is a, c, g, or t
  misc_feature (66)..(66): n is a, c, g, or t
  misc_feature (80)..(80): n is a, c, g, or t
  misc_feature (110)..(110): n is a, c, g, or t
  misc_feature (115)..(115): n is a, c, g, or t
  misc_feature (208)..(208): n is a, c, g, or t
  misc_feature (268)..(268): n is a, c, g, or t
  misc_feature (279)..(279): n is a, c, g, or t
aaaccccnacttccttgcccaaggtggcgctggggnactttgtanaaatccttgtaaataccccanaccctcccctctgnaaaggtctcttgatggagtgccgctgatcnctacnggtttttaagttattacaccccgaccctcctcctgtcagccccctcacctgcagcctgttgcccaataaatttaggagagtccccccctcccnaatgctgaccctaggattttccttcctttgccctcacctgcaaatgagttaaagaagagncgtgggaatcnaaaaaaaaa

SEQ ID NO: 695318 - DNA, 189 bp, Homo sapiens
ccccactggaggggcccagggtgcagggggtcctcccccagtccccctgttttctgggcatttgtgaaccccttccccccccccccgtttcctgtttccctcggtgggttatcttttaacccccctgtgtgggtcctttttaaccccccggccctgctccgtttttttttataaaaggatttttgggga

SEQ ID NO: 695319 - DNA, 101 bp, Homo sapiens
cgctcgatcgtcgcttcgaaatcctagcggctgatttccagtgtcgtggcctgcaccttgattcgccaccaccagcacctggctgtgcggcgcgttggact

SEQ ID NO: 695320 - DNA, 264 bp, Homo sapiens
aggcggacgacagacgtcacaaggtagacacgatttacctcgtttgcgttcaaggccgaggccgaggccggttatcgagctgccctcggagaaggagtgatccgggtattcgggcgaggacgccgacaatttagttagctagctcggtaaggatgcgttccagcacaacagcgtgattgacctcgcgatcaccagcaccatagagcaaaatcacctcatcgcgcccggcacattcctccaggaatgtcttcgcggcaccggact

SEQ ID NO: 695321 - DNA, 117 bp, Homo sapiens
gatcgatcgagctggtacctactttccacagtgtgtctaatatggtttccaaaactttttacaaatgtcaaactcaccgtcaacctgaaaccacctggaaaaaaaaaataactgaca

SEQ ID NO: 695322 - DNA, 256 bp, Homo sapiens
  misc_feature (24)..(24): n is a, c, g, or t
caaggaggaagaggaggaggcagngagcagcgaacctgcagttggcatcacaaggcatcgcacagggggccaggcacagcggctcacgcctgcactcccagctactcaggaggctgacgcaggaggatacctggagcccagcagttcgagatgagcttgggcaatatggcaagactggctctacaaaaagttttaaaaaatagctgggtgcagtggcatgtgcctatagtcccagttattcaggaggctgaggtgg

SEQ ID NO: 695323 - DNA, 126 bp, Homo sapiens
cacgaggctggccgcactctgcgccaggcacaaggtggacctcgtcagcgtcggcaacggcactggcagccgcgagaccgacaagctcgttgccgagctgatcgccaagaggccgcagctcacgct

SEQ ID NO: 695324 - DNA, 239 bp, Homo sapiens
gtacggtaggcggcgatggacagggcagaaaccttccaggtgtaggcgcctgtgtgtgggggaacagttcatacatcagctcgatggagtggtcgaggatttgcgcatactagttgggtcaggcccatgacgccggagtttgagggtcatcatgtcatcgtcggccacgccccatgttcagcaggcgctggcgaaggggggtgtagagggatgcttacgtgattgtcgccgaacttggt

SEQ ID NO: 695325 - DNA, 529 bp, Homo sapiens
tagtgactagcgttacagaaggatggagactgcaagcctatgcctggcaggcgtaagctatgagataggagctgaggacgaccagccccatcacgggagtcctcttatccctgagcggtggcctgtctcgttccatctcgtcttgacccaggagaacggcatactgaccattctcaaacctgagcgctggccagatattacttcaaagccatgatgaaggagttccggtgcgagccatcctcacagatgatcgaggtgcaggaaggccagaacctgaagaacaccatcacggggtaccgaaccgcttacagttgctatgggacagtgtctaccttaaacggcgagcccgaacaaggggttgccatggaagcggtgggcctgaacgactgcaggatatccggagaagagaccgtgacagacgaagagggcacgttccgatcacgtagatagcggccgggatgtgtgtaccaggtacagctcaaggcagacggcactgcccacattgagcgggtgctccctcagcataggg

SEQ ID NO: 695326 - DNA, 425 bp, Homo sapiens
  misc_feature (319)..(319): n is a, c, g, or t
gaagagaaggcaaagaaaggcctcatgttgcctccacccccagcacttgaggatgacatggagttccaactggacgggtccctcatctcacggcgggcagtttatgtgttacctggacacaaacaaaaacaaaaccagggccggcccttccgcccccgacctgaacacgccggcctaaggtttcaaactggttggacttgtttgtttggacgacactggaatggaacactgcctccccctttttttggacttggaaggaggtggaacagcacactggacttcttcccgtctctaggggtgcatggggaacccggggaanttaataatggggatccaaaaaggacccccgcccccaaaaaattggttttgggtccaacctttccctgggcccgtgacactcaggagttaataaaagccttggagga

SEQ ID NO: 695327 - DNA, 1088 bp, Homo sapiens
  misc_feature (180)..(180): n is a, c, g, or t
  misc_feature (187)..(187): n is a, c, g, or t
  misc_feature (315)..(315): n is a, c, g, or t
  misc_feature (389)..(389): n is a, c, g, or t
  misc_feature (394)..(394): n is a, c, g, or t
  misc_feature (405)..(405): n is a, c, g, or t
  misc_feature (409)..(410): n is a, c, g, or t
  misc_feature (419)..(419): n is a, c, g, or t
  misc_feature (421)..(421): n is a, c, g, or t
  misc_feature (423)..(423): n is a, c, g, or t
  misc_feature (432)..(432): n is a, c, g, or t
  misc_feature (450)..(450): n is a, c, g, or t
  misc_feature (452)..(453): n is a, c, g, or t
  misc_feature (459)..(459): n is a, c, g, or t
  misc_feature (484)..(484): n is a, c, g, or t
  misc_feature (491)..(491): n is a, c, g, or t
  misc_feature (523)..(523): n is a, c, g, or t
agtccaagcaggagcacaaggatgtgatgtgaggcaggacccacctggtggcctctgccgcgtctcatgaggggcccgagcagaagcaggatagtgctccgcctctgctggcacatttccccagacctgagctccccaccagcccaggtgctcccctccctcctctgtccctaggtcagnttgctgncctaggctccgtcagtatcaggcctgccagacggcgacccacccagcagccagcaactccaagtaacaagaaagctcacccccaaggggcagtctggaggggcatggccagcagcttgcgttacgaantgaggaggacggagagaaggggaggagggcgggggggcacctactacatcgccctccacatccctgattcctgntgtantggaaactgtngccnnagactggangntnctctcggantatctgggaactgtgccntnngagttncctcaggctgctggaggaaaactgngactcanacaggaaagggaaggcccaaagacaaggtagncctggccagaggctggtaaagtcttaaggtctatatgagagtgggatatccctatgctgcctagtgcttgacctttgaactcctgggctcaagcagactaccccaacatcagaactacatggagtaagctggagatacatagaatcggaagcaaccaagcccaggacagacggggacgacccactagaataggacctggaccaagactaagaagagagagagagacatactggccaaccgggaccagaacacctgagcaaaaccagacacgacactccagacccgctggacaccagcggtatcagaccacctggagctgcaagacagcgactgcaccagaggcagaagcgtggggccccatggccccaatacccacccacagggcgaacacgacggacaccacacggcaaaaaaacccactcgcacaacccaccagtaccccgacctgcacaacagacaccaaacaaagcgcaccacaacaacaactacaacaagacccgaacaacgacgagacagcaccaagagagaaagcaacacaccgcctcccaaaccacccgcagcaagc

SEQ ID NO: 695328 - DNA, 221 bp, Homo sapiens
tcacaggatcttatgtcgacttctgctctcagctcttacttaatctgcttcagaggatgctctggcgtctccccttggctcagccatggtatccacgaagagcatgcaacaacgatacaattccctccaaccccggggaaagagagcagcagtacctgtgcagggaggagacacttcagaagctgcttcagccctccagaaatcagagcagaaggtcgacg

SEQ ID NO: 695329 - DNA, 896 bp, Homo sapiens
gttctacaccattcgtaaggtgcgcgtacccagtagcgtaagtgaacctggtcatagctgtatccttaggaaatcctggtcttgactatagcttggctactcacgcattaaaaaatgcccggtggtaatcgagtcgtcttgaacaactccagatggagtcccgacggtcactaactgtggtctatcatagaggagtctcaagctgatgctcgactagtcaaattacgcgtggaccctagacctgataggtctcaatctccgataacatatggcctagactacgtacataacctaaacctactccaatgctagaactaatcgtcccaacaattatattactaccatgacatgatttccaaaaaacacataattggaatcaacacaaccacccacagcctaattattagcatcatccccctactatttttgtaaccaaatcaacaacaacctatttagctgtgccccaatctttcctccgacccctaacaacccctcctaatactaatactgactcctacccgtcacaatcatggcagccacgcattatccagtgaaccactatccgaaaaaatctactctctatactaatctccctagaatttcctaattatacatacgagcatgaataatgatattttatatcttcctcgaacaattatcccactgggataataccggtggggagcagaagaagctgggcagcatatgctattaaagctaatagactccctacactcgtaatagagacaagctaggtataaagtctatctcttatggcagaatttactgagaactaatatccaaacttctagaaccctcgctctctcaaggaccagagaatgcctgaaagggacggttctccgactatatcaatcaaatacctcatacacccacat

SEQ ID NO: 695330 - DNA, 894 bp, Homo sapiens
ggggggttgattccaggaccccctcaggtaccaaaatccccaggtgctgaagtctcctgtgataaaatggcatagtatttgcagtataacctacatatgtcttcccatatatttgaatatgatctcttgattacttgtagtaactaatacagtgtaaatagttgttatactgtattgtttaggaggacataatgagcggagaaaaaaatacagtgtgtacatattcagtgacacgacacagttcattgcattttatttatctccgtgtaattatctttcgaacccaccaaatggagaaacccatggactacgcagtgctgactgatgtatgaacgtattctagatccaagggtttaacgaggaatgtgaaagtcactgatatacggcggaaacaaaataaaacagtatatttgtgctttagtgaagaattatcagttatatgcagaatagaattgaggatgattataacaatgataggagtgactataggaaagataggagtaaggtatattgggctgcgtgtgggttgaggactgaggaagaattgagtggacaggtctccaggctttcggtgcttggacgagagtagatgcgactgtttattaatccatattagagatagcttggaggtattgaaaaacagtgattagctggtaaagatacaaagattctcagaaatcatgtatcccccggattctattactgaaatcgaacgtaatgttgtgctccagaaaaacaccatcttcctcacagtgggtaatgctgacttggcacaacaaattaaagtacacagagttctactttaaaccattcctcttcggaaacttaattcctgtgtcacccagctttatggaagtcgtatttggtgggcccaaccgtaagcttactccgaac

SEQ ID NO: 695331 - DNA, 298 bp, Homo sapiens
gtggtgtacaaacccaacatttctaggaactcatgggaatgattttatgcaactttcgtatactacacaagacgagacaacacatattagggacaaaccttacataggtaatgcgtgtggcaaagccttcagagtgtcttcaagtcttattaatcgtcagctgctacataatacagagaaaccttacagatgcaatgagtctggtaaagcctttcatcggggctcactactacatttttatcagatagtccatacaagagggacaccataccactgtgatgcatgtggcaggatctta

SEQ ID NO: 695332 - DNA, 956 bp, Homo sapiens
  misc_feature (298)..(298): n is a, c, g, or t
  misc_feature (343)..(343): n is a, c, g, or t
cggcacgctgtgggtcgcccacgcgctcggttcagcctgcacgtggcctgagtgataggagtcgaggctgtgttggctggatccgtcctactgggcaagatggcgccccacttggagggctgtggtctgttacaggggtgtgcaggagcgcaagagaatgaagggaccatggggacttgggccacgtcatgttgcgaggattggggcctgcgctgttcaataagccaaggaccgtccctttccttgttgcttcaatatggtccgaaagctgttcacgtctgtgctcaagtccactctnagttttcaaagttcgaaagtgtaaaaagtccgccatagagatgtncacatggaaatacaaaagagataaactacaagaatagaaaacaaaactaaatagtacaacagagagatagaataaaagaaagagaacacagacagagaataacaaagagaaaaaaatagaactgggggtcgtcacggtacaagaatccatcaattgtctcgcacataccgcgcggtaaagcgcaagtatggacacatataaacagtagccacgaactacgagtggcaatgtctatccaacatgagttcgaaagatgtccaggattaacgtggcgcgcggttcgccaagattacccaaacagcaccagcacacggacttcgtccagcgcccgaagttgtacaacagaaatcaatcaaatacgaaacggagaattccttatggaaagatccgaaacacgcaaccaaaaatgggggggaacgacacagttgtccagaccgtgcagtaacactaaagctaaccgtgccacttaaccacccttccagcacgtcgtcgtgcgttccaggctaaaaccacggaaggaagcaacaataatacccattgaaacagcagccgacgcaacactaccgacaaggtatctcccgcccaatagtgggacatacatttgacacctgct

SEQ ID NO: 695333 - DNA, 1040 bp, Homo sapiens
  misc_feature (328)..(328): n is a, c, g, or t
  misc_feature (699)..(699): n is a, c, g, or t
  misc_feature (782)..(782): n is a, c, g, or t
cgaagagtgacatcagacgatgaacatatagaatataagtactacatataaacaagataaaaactttatgagaagagtcaagagctcaatgagagaagatatagagggtcgttgggatgttactatgacagaagagcacatcgcagctccatcgttgtaacatagaaacaagacgtgaagtacgcaagtattgacaattaggtcgaaagagataatacatgaaagatttcgttagacgattatatgagcttacaggaagttaataatagacaggtagtagcgtatacgagacatgaggagaggaaaatgagcagtaggtgagagtcanatcgttagtaggcgaacatgccgtcccacctgtagtacaggtgacatctaagaggcaagaacacgattagatatttatatcaagtgaatgcaactctaaataagtgttcagtgtagtaaagcctcaagccgcaggatcatcagcttcctgcaaatcatcatcagctggccagtggtcatgctgtatccagcacttgagatccaggcgaggcagatcacttgaggtcaggagttcgagactagattgccaacgatgcagaagcaccatctatactaaaactactaatattagccgagtgtggtggagcacacctgataatcccctctacttgagaggctgagccagaagaatcacttaacgccgggaggtgnaggttgcactggaccgagatagtgccactgtactccagcctgggtgacaggtatgttttgagacggagtcttgctctgtcgcncaggctggcacaatctcagctgactacaacctctgcctccaggttcaaacaattctgcctcagcctcccaagtagaggggattacaggcatgcaccaccacgcccggctaatttttgtatttttagtagacacagggtttcaccatgttgcccagtctggtgtcgaactcctgacctcaaatgatccacaaagtgctgggattacaggtatgagccatcacgactagtcctcgtgccgaatcctgcagcccggaggat

SEQ ID NO: 695334 - DNA, 221 bp, Homo sapiens
tagtttcacaggactgcccgcacaatactgtcctaaagacgatgctgcctgtacagtgccagcaccagagctcacacacactgtcaagggtgcctaaagcactagcccaccctactcaccatatgccaatgcacaagtacacttgccaatgcccatgtacattgccaatgcccaatgtggactgatgaacccaccacattgtctccgtgtcaccatagctc

SEQ ID NO: 695335 - DNA, 224 bp, Homo sapiens
ggtggataaaactttccccccgtgtccccctagcaaagggggggggcccgttcatttgttgttgtttttttttcctttgcccccccccgttttatttttgggcaaccagtttggattcaagtttttggatttgtttgttttgggccctggggattgtgagggttccctcccagccagcccgccccccaaaaaaaggggtcccccaataaacccgtcccctgcta

SEQ ID NO: 695336 - DNA, 347 bp, Homo sapiens
aagggtacaagaggactagaaatgaagctacccaggctgactgtcttcaggtaaagattaaaggagcttagacactaccataagtcatttaaataattgcacaagaagtaattattaaatacattttatttgattaataaatatgtacagatatataaaattggtgcatgcttaattcttcaaaccagtcttttagactatgcattaatgggatgctcatagctagtctttaagaataaagccggtagaatccatggtcataatcctgtctggtctgccaaagacctgggtaaccccagtaacactgacaacacagccagggaagaagtggactgacacttgcctac

SEQ ID NO: 695337 - DNA, 265 bp, Homo sapiens
taacatccggtgctgacattataccgctgacgggacagaaacaatcgagggatgctacagtgctcagagagcgtgccgccggcgcgctacactacagacgtcaacgcaccgtaacatgtcgcgtggcgtttcctatcccttcagtcaaaaccactatttcctatagttctatcaaagtacgtaagtgaggcatacaatagaatcaggaactcggggctaaatcatcccaacctggagccaaggctctaactagaaactgtctctg

SEQ ID NO: 695338 - DNA, 85 bp, Homo sapiens
gagcacagcggcagcactgccttgcaccctccagccctcagaagttgcgtaggagacacagcgcctccactgaggcacctctctg

SEQ ID NO: 695339 - DNA, 162 bp, Homo sapiens
ggatcccctaggtggtaagaatgactagcgagtgtgtatagggacctcttgtgtcatgtgtgtgggagtgagtctgcagtaataatgagcatggtcatgatgttcagtttgcatgacaacagagtcatgtctgctgccgtgctgggtgtccctactggggtg

SEQ ID NO: 695340 - DNA, 162 bp, Homo sapiens
ccgtgacagtagatggaagaggtatgtatagacataaagatgaacagaactgattaagaggtgaaaaaattttaaacatttacaatttagaaagacttacaattaaacaaaattattaacgtaaaaggggaaacggtgttgctagaagtcagtctccagggt

SEQ ID NO: 695341 - DNA, 1369 bp, Homo sapiens
cgtattttcgtccgatggcttttgtgatgaatatcttctagctttggaatgtttctccaaaggtgccgtgtcgctttctctttccaggttcgttctaactgtcacacttgaagatgttgggttccgttagcggtctttgaagtaatcttttgccctgttgggaataggccatgaatatcctgtgggagtgtatcccaggggaaaacttcactaactcttcttattcaaacaggtagtatattttgaaagttatcaccgtttttttatgcccttgccaataagtcgtgagacccccctatgccccatatggttcttttgttaagatgcaaaatgggccgtgttttaatagttgccgtggtaaaaaggaataggaaacatctgtgggaaggcatgcctatgttgtggtagccccaaatttaatgttcaaattcgttgtgtcctaacttccacataaccacaaaacctggggggaagtggttttgcttttttccaaaattttatatcctttcgtatacaaacgttgcggcgtgctcaatccaacgctcatagggtatgttggttcttataggttatagtcgtgtgcgtggccaacaaaggaagggaatcttctatgcgcagtcgtccttttgccttttactgggttttttgggggaacccacgtagagtaggaccaaacgttgttcatccttcgtgtcttgtagtgtataaactttgggccgggtggggagatcccccaatattgggggactatgtagtacctctgtcctaaagaaatagatttttcaagggggcttccatccactctccaagcgttcgcttttcgctcccgagagagaatattactctctctctcgtagttcgttcctgcgcctcacgctggcgcagagagcccctgtgggtgagcgtgcgcgcaagccttttggccgtggatgctccagtgaggacggttaggtatgagcgcggactggactcgtgagggagattggtggacgttgtgcctacgcgatacgagcagcaacggcagcaactggaccactgggcgccaaagttccaccttcgctggacattggtcccttccacttccacacgcctgctccatcagggctgagagatgctggttatgcataacccgcagcactgttgaatgtattgtatggtataggagtcgagtattgctcatatagtgtgttgttgtggtgtttctcattttaatctgtatatggtgttgcgtgcactctcttgaggtagagaacagaaatctcttttgttagagatagggaccacatcgggctcgcggcttcttagtcttggttgatataataatagcacaggcccactcctcataggagtattagcatgcaggggatta

SEQ ID NO: 695342 - DNA, 120 bp, Homo sapiens
atagctaaaaggttttgtgatcctgctgtaaacatggagggaagccagcatggcggcacaagcacacagtaccacgcagcaaacagggctaagacaaaataatagaccccaccgcaagtc

SEQ ID NO: 695343 - DNA, 367 bp, Homo sapiens
gtgtgtgtgtgtgtatttcaatagctttttgggttcgagcgtttttttgtaacatggatgaattctatagtggtgaatcctgagattttagtgcatctgtaagctgagtagtgtacattatacccaatacgtagtttttttaccttcacgcccctcatatcaccttcttccatctgagtctccaaagtcttttataccactctgtatgtctttgcatcctcatagcttagctcccacttataagtgagaacatatggaaatcaaaagggaaggaaagctgatggaattttgttatcagcttctcccctgggggaagggtggtccctgagaagcttcagggaggtgacagccggagaggcaggaagct

SEQ ID NO: 695344 - DNA, 945 bp, Homo sapiens
ggcggaagcacggtccgcccggagcacgagagcctcgcctttgccgatccgccgcccgtccaacccgccgcagtcaccatggatgatgatatcgccgcgctcgtcgtcgacaaaggttccggcatgtgcaaggccggcttcggcgcgcagcacgaatgccccccgggccgtctagcccctccatcgtgggggcagacaccaggcaacacagggagttgatggcgtcgggcactggggtcacacacagatccctatgtggagccgacggaggccaagagacaagagaggacatcctccaccccactgaaagtacccccacatcgacgccaacggtgacaatccgttataaaccgaaaacggggggcacgcaccattgcgcagcaacaactccgtgggacaagcaaccaaccttaaccgtaacaaagtgagcgatggcagatgatggacatcccgaaggaagacaccaccgtggcatggaatgaaccaggagggacaacacccatgaaagcccccaaagggtccaacaccgagaagacagaactgaccaccaacaatacaaagtgatacatagaaagacccgtttaaacagcagaaccccaagccaattgtaacacggttagggcttactctcccaaagggctatgcttggactaatacccccgtttgagtacacggccaatcctgggagccccgaggaacccaaacttggagcacattctgatgcaataggacatcccaggatagagaagacgggatccacaccaagacagaagtggtatgcccacaagttacaaaccgaagggagagaaatcgaccacacccccacaatttgcacacaccacatagggcgtatagtgagaccgcctaagggatgagcagatggagacccatggaattagcatgataaactgcaatgtgaaaagacattccgaaacaagagaccgg

SEQ ID NO: 695345 - DNA, 210 bp, Homo sapiens
gatcatagaggacccgtgccccctgggaattggcagagagagaggtcttgaggacattcattaaactgtcctggttatccctggactgcggcatttggggtgatgtcacgtttatattacaaaagcaattagctacttttgaataaaggggggaaagggaacattgaagatgtacccaagttctgagtcagagatctgactttcaaatcc

SEQ ID NO: 695346 - DNA, 177 bp, Homo sapiens
gtcgactctagtagtatcccctgtgacagcatcgcatcagtgcagatacgatagaagaaaaatggtcccatattatgatatattcatgcccgtcactaaagcatatgttgagcttgcggttcagaaggaactcaagcttctgagaggaaaaactatcgagtgcattagccaaattgg

SEQ ID NO: 695347 - DNA, 449 bp, Homo sapiens
  misc_feature (148)..(148): n is a, c, g, or t
  misc_feature (249)..(249): n is a, c, g, or t
  misc_feature (262)..(262): n is a, c, g, or t
  misc_feature (264)..(265): n is a, c, g, or t
  misc_feature (273)..(273): n is a, c, g, or t
  misc_feature (309)..(309): n is a, c, g, or t
  misc_feature (312)..(312): n is a, c, g, or t
  misc_feature (320)..(320): n is a, c, g, or t
  misc_feature (348)..(348): n is a, c, g, or t
  misc_feature (350)..(350): n is a, c, g, or t
  misc_feature (352)..(352): n is a, c, g, or t
  misc_feature (355)..(355): n is a, c, g, or t
  misc_feature (359)..(359): n is a, c, g, or t
  misc_feature (372)..(372): n is a, c, g, or t
  misc_feature (374)..(374): n is a, c, g, or t
  misc_feature (376)..(376): n is a, c, g, or t
  misc_feature (381)..(381): n is a, c, g, or t
  misc_feature (383)..(383): n is a, c, g, or t
  misc_feature (417)..(417): n is a, c, g, or t
  misc_feature (420)..(420): n is a, c, g, or t
ggccccctttcattcacaaagtgccccctccatgtccctggacccttaaaatatccccttggcaccctggtcaaaaactttgtgtttgactcaggtggtccctgcaaagtgccctgggaaggaaaggagccctgatttgggggttttnagggtcaagtaggggttggtaacccctggaaaaaaggactctttcccttcgatccctggccaattatggaggattcggaggtaaaaaaggggaaggaaaanggtttttttttcntnncccccccnccctgtgaaagggaatgggggaagccttatgccccncanctgttccnatttagtatttttttttttttttaaaantncngtntttnttatgacgatggngncnccccngngcaaaggggggccaaattttgtgtgtttttttanccnctttgtaaataaatgcccagtgtaacata

SEQ ID NO: 695348 - DNA, 105 bp, Homo sapiens
  misc_feature (5)..(5): n is a, c, g, or t
agtanagatgcagattgagaacctcaaggaggagctggcctacctgacacgaagaaccatgaggcaggagatgaacgccctgtgaggccaggtgagtggtgagat

SEQ ID NO: 695349 - DNA, 304 bp, Homo sapiens
cctgaacgcagcctgctgaggtggaggccgcagtgagcccagattgtgccactgtgctccagcctgggtgatagagccaaacccgtctccaaagaaaaaaaaaaaaccccaccccccaaaacccggtcggccccggggcttcacccctgtaacccaaacatttggggggcccaggggggccagtttgtttgaccccgggatttcaagaccagccgggcagtgggatccattactgtctttaaaaaaaatccaaaaatttggttggccggggggacatgcccttggggccccagttctttgaagg

SEQ ID NO: 695350 - DNA, 572 bp, Homo sapiens
  misc_feature (72)..(72): n is a, c, g, or t
caaggagaagccttgcgggtgatggacatgctgcactctatgggccccgacaccgtggtcatcacaagctcngacctgccctccccgcagggcagcaactacctgattgtgttggggagtcaaaggaggaggaatcccgctggctccgtggtgatggaacgcatccggatggacattcgcaaagtggaccccgtctttgtgggcactggggacctgttttttcccatgctcctggggtggacacacaagcaccccaataacctcaaggtggcctgtgaaaagaccgtgtttaccttgccccacgttttgcaaaggaccatccagtgtgcaaaagcccaggccggggaaggagtgaggcccagccccatgcagctggagctgcggatggtgcaaagcaaaagggacatcgaggacccaaagattgttgtccaggccccggtgctgtgagggcccccccgctcgcccgtgacacccagggggttggtgtttccgtgtttgtccctgtgaaaacatgtaacgtttgccttaaagccatgcccgaaacttgatattttttttttaaaaaaaaaaaa

SEQ ID NO: 695351 - DNA, 533 bp, Homo sapiens
gggactagatttctgttggtgattgaaattttcagtagactccattcaaagtgatctctagtcccgtgtgtctcatccacgttcctggaggaccaccgacactacatgttttggatgtcttttatgtcactcttattacaggtctttcagtctctgctaataagatgatgatctgaatcaggtgtgtttggttaagaccacctccaggatcatagttgagaaacactgctctagtcaatattggcactgtatttggcactggacgctgtctttcattttatgactgcagtgttgatgtctttaaatgtaaaagatgagataataaaatgatatagtatgttttcaaacaagtctaaagcaaaaaaaaaaaagaccaaataagtttgcactatcaacattttcttttttagacaggaatacgttgtgtgcacattgttgatggactcctatcaatgttttcaaaagcaaaaagattaaagctttcaactttgtctacatatttctaataaactgcccattgcttaaaaaaaaaa

SEQ ID NO: 695352 - DNA, 164 bp, Homo sapiens
cgcaaatatccagtgacaccactatcacgaaaaaacactctacctctctatataaatctccctaaagatctctttattaatcacattcaccagccaacagaactcatcataattaatatatcttcgtgcgaacaccacatttatcccccagcttgggtatcatc

SEQ ID NO: 695353 - DNA, 309 bp, Homo sapiens
gtatctatgacaatagcaccaagaatgtcattgattcatgaaacaatggattatatacaaattgacgatacatctataaaagaagggtcagaccagagcatgccatacctcatccccttatatgccactatccaatattcatcttcttttgtatcataaatgaaactacagactggtaaacgacaatagaatctgcctcatcaccccacccaaaattacttcgattatttactgtctgtagtcatccttcaaagaaaagtcttgcccggggttctttcaatttcatttatttatggagtttattggcat

SEQ ID NO: 695354 - DNA, 362 bp, Homo sapiens
  misc_feature (193)..(193): n is a, c, g, or t
  misc_feature (211)..(211): n is a, c, g, or t
  misc_feature (219)..(219): n is a, c, g, or t
  misc_feature (257)..(257): n is a, c, g, or t
  misc_feature (285)..(285): n is a, c, g, or t
  misc_feature (303)..(303): n is a, c, g, or t
atagcatttaaaagaatatacatagtgggtagatcaatgggctacaggcaaggccttttgggaaaatagtaaacaggttccaagtgtttctatgtcctgccagtgccacccaccaagacaggagggcacacagggcacttggaacagacaaaagataacacctcgtgcatttcacttagtacatatctctcangcatcagcgcttctccangacttcanacttgcatagactgtgggaagaaacaccggcgactgangaagaaaaagggggcctccttatgccangaaagaggccatgcatcnctgaagccgctactgatttgtagccctggctttctgctatggaaacttctaaaactaag

SEQ ID NO: 695355 - DNA, 126 bp, Homo sapiens
atcggcccacctcagactactgaatcagaatctctgggggtaggcacagcattctgatttaccagaccctccaagtgatttggagtgtattctaattttagagaccatctctagaaaggaatgctg

SEQ ID NO: 695356 - DNA, 255 bp, Homo sapiens
ctgaatgcctacaaacgcggcacggcgcctgcacatcgctttgagggtttggacctgacccaggcgcgcaacaaccctgaattgctgggcatcgccatgacgcctgacaacctgcaaatcgacaaggaggtacttgagtacgcgcagcacgggtgttcgccgatcgacagtgcgcatggctttcacagccgttggctacgccggttcgccctgaaggggtatctgggcaacgcgatgaaccgacacacgctgaat

SEQ ID NO: 695357 - DNA, 690 bp, Homo sapiens
agcgggggccgggggctgcgcgctctgtgagctgggtgtccaggctgcgggcgctgctgggcctcgggctgctggtcgcgggctcgcgcggtgccgcggagtcacaaggccagaccagtcgccctggtcagcatcgcggacccacactaggtgggcgaccgcaggcggctgaatctcgggtggctctgctgggactcagagtgtcatggtggatgcactggtgtgtgaagttaccgtgatgcctaggcagagaggccctagggcgccgttggaaccagggaggcgtactttacacagatattagccacgtttcaagcgatgtgagccatacattattggaacttggtgccggcgcgtgagactagtgcttacaggcctagtcgccaacggtcgagtgtgcacaactctcgaccgtttgggagcagccagggcaggagtcaatgtcccagccccctggcctaggcacaaaggggtgggagagacagctgggccaatatggtctattaccgcctgaaaccccgacgaaccacccttgactctgccttcaggcaatatcccgcccacgtccatgtccaggggcccccctactgtcctggtcatctgtggcccggggaataatggaggagatggtctggtctgtgctcgacacctcaaaactctttggctacgagccaaccatctattacccca

SEQ ID NO: 695358 - DNA, 145 bp, Homo sapiens
cgaaggcagatgaagaaagcataggaaagtgctctacctgaatcccgtgcgtagaacatgaacatgctagacatggttccattgcctctaaaacagttgaccacatactgacaggcatatctcatcacagctcattgagtaccgt

SEQ ID NO: 695359 - DNA, 546 bp, Homo sapiens
  misc_feature (18)..(18): n is a, c, g, or t
  misc_feature (83)..(83): n is a, c, g, or t
  misc_feature (93)..(93): n is a, c, g, or t
  misc_feature (100)..(100): n is a, c, g, or t
  misc_feature (102)..(102): n is a, c, g, or t
  misc_feature (116)..(116): n is a, c, g, or t
  misc_feature (121)..(121): n is a, c, g, or t
  misc_feature (132)..(132): n is a, c, g, or t
  misc_feature (153)..(153): n is a, c, g, or t
  misc_feature (161)..(161): n is a, c, g, or t
  misc_feature (167)..(167): n is a, c, g, or t
  misc_feature (169)..(169): n is a, c, g, or t
  misc_feature (178)..(178): n is a, c, g, or t
  misc_feature (188)..(188): n is a, c, g, or t
  misc_feature (193)..(193): n is a, c, g, or t
  misc_feature (200)..(200): n is a, c, g, or t
  misc_feature (205)..(205): n is a, c, g, or t
  misc_feature (216)..(216): n is a, c, g, or t
  misc_feature (218)..(218): n is a, c, g, or t
  misc_feature (228)..(228): n is a, c, g, or t
  misc_feature (245)..(245): n is a, c, g, or t
  misc_feature (262)..(262): n is a, c, g, or t
  misc_feature (282)..(283): n is a, c, g, or t
  misc_feature (285)..(285): n is a, c, g, or t
  misc_feature (295)..(295): n is a, c, g, or t
  misc_feature (307)..(307): n is a, c, g, or t
  misc_feature (319)..(320): n is a, c, g, or t
  misc_feature (322)..(322): n is a, c, g, or t
  misc_feature (324)..(324): n is a, c, g, or t
  misc_feature (398)..(399): n is a, c, g, or t
  misc_feature (541)..(541): n is a, c, g, or t
tgggcaggaggccaactntgccactcatgacctccaggcatcgccctggggtcaaggcctcggagatcaggctaatgggcttnagacaaattncagatcntnccttaggcaggtcncttgngggccgaactntgggactggggtgccgagggnaggggttngctttntntttacactngaggcctctnggatngaaaatnttttnttttgcaaagntnaagcagggtncggacgcccacgagacnccagagttcgcccagtntggagacaaggatgcgcagnntntttagccagngacccaaagttngcagcatctctnntntnccgcccatttgtaccagcaccgtctgcacctggctctgcaggccggggtgctgccgctgctcctcctgcatgtnnatgaccagcagcgtgtagcagatggtgagcggtgtccagaaccgcatggcctccgaggtggtcaggaagtcctggttgatgagggccacagctgccaggtcacccacggcaaaggctatggccagggcacggcccagcagcnggggg

SEQ ID NO: 695360 - DNA, 973 bp, Homo sapiens
cgcctcttgggtcgtggtctcttacctctgtggctccctttgtcccgcccgccttgctttccccgcctgtctcgttcctgcttcttgttctgtcttctgttcttccctcggtccttgggacctgtggctcgatgcctctccgtttctcttcagtgctactgcgcggagcccctcatgggcaatggctgactggggccgggtctcgagtgctgtggcacctattgcacttctgcacgccactcttggggcttctgcctgcgccgagatccccttcgcttctggggctgcagacttgcacttcctgaatgcagttttggatgtccatcttgccaggagagagacggtctcgggtccaggggagttggagggctgtctgctccctgccgtgcatggtcttggccgaatggcgccttaccctgctgccctgggcttttggcctgaagcaaattcctgagtgggggcgctatctggggctctgcccgcactcctgtcctggtccactgcccacccccgtgtgctggctccctcacattctggctgcagtgggagtccgccagtctgacccttgtcaccgcacgctctgcccccaccccgttgccaagaggtcacaccatgtcacgcagcccttgcactgacctgcagccaggcccccaggcctctagtagttactggatgcttccgtgcggctccaacaggcatcgtcttcccttccgcaggtggaggggccgcttcccgcaggcatctgagctctgtcgccggggccgtggtccatgggaagatgttccacgctgcctcactccctcgagtggttcctcgggcaacactcttgaatgtctgagcgagggtcctgcttagctctttggcctgtgagatgcatcagtctatctagtagttttgtaagatgaagcaagatgtctgttcagcggtaattggccctcacattaaagcgtcggccggattaccagcgcgatga

SEQ ID NO: 695361 - DNA, 331 bp, Homo sapiens
  misc_feature (21)..(21): n is a, c, g, or t
  misc_feature (99)..(99): n is a, c, g, or t
  misc_feature (115)..(115): n is a, c, g, or t
  misc_feature (119)..(120): n is a, c, g, or t
  misc_feature (131)..(132): n is a, c, g, or t
  misc_feature (151)..(151): n is a, c, g, or t
  misc_feature (163)..(163): n is a, c, g, or t
  misc_feature (170)..(171): n is a, c, g, or t
  misc_feature (174)..(174): n is a, c, g, or t
  misc_feature (177)..(177): n is a, c, g, or t
  misc_feature (179)..(179): n is a, c, g, or t
  misc_feature (182)..(182): n is a, c, g, or t
  misc_feature (189)..(189): n is a, c, g, or t
  misc_feature (196)..(197): n is a, c, g, or t
  misc_feature (200)..(202): n is a, c, g, or t
  misc_feature (204)..(204): n is a, c, g, or t
  misc_feature (213)..(214): n is a, c, g, or t
  misc_feature (221)..(221): n is a, c, g, or t
  misc_feature (228)..(228): n is a, c, g, or t
  misc_feature (244)..(244): n is a, c, g, or t
  misc_feature (248)..(248): n is a, c, g, or t
  misc_feature (253)..(253): n is a, c, g, or t
  misc_feature (267)..(267): n is a, c, g, or t
  misc_feature (269)..(269): n is a, c, g, or t
  misc_feature (274)..(274): n is a, c, g, or t
  misc_feature (280)..(280): n is a, c, g, or t
  misc_feature (283)..(283): n is a, c, g, or t
  misc_feature (286)..(286): n is a, c, g, or t
  misc_feature (290)..(291): n is a, c, g, or t
  misc_feature (293)..(294): n is a, c, g, or t
  misc_feature (297)..(298): n is a, c, g, or t
  misc_feature (304)..(304): n is a, c, g, or t
  misc_feature (315)..(315): n is a, c, g, or t
  misc_feature (328)..(328): n is a, c, g, or t
caggggctgccggtgccaccngggatacagagtccactgtccccaggggtggggcagacggcgcaaaccgtggcccctgccctccccccaggcaggctnccaaatatctccttgncctnncacgtcacccnncccaatccccctggccccnctctcccccccnccccctnncgnccnanagnccccccnccccccnnccnnngnacacctccnngagccgnccacccnaccgtatcccgcggcnccangctgncctcacccatcccncnccccntccccnccncancccnncnnccnncccggngcgcgtagtcncaccagggccccnacc

SEQ ID NO: 695362 - DNA, 365 bp, Homo sapiens
caggccccagaaacctagcctggagttcaaggagtttgtagggttgccctgcaagaatcggccgccttttcccagggccggaggtaccaggggagcccaggagccctgctctgtttgggaaccccaaaaaggcattgtgatgggtttgccttccagtatgagtatgagcccccctgcacgtccctttgtggtcgggtccaagctgccaggcttcctccccaggtcatgggctgggccctgccctttttgatggatgcccagccagggtttgagccaactccgatgtgagacgtcccgcagggcagataccgctcccccccctgcttcctttgagttttttaataaaataatttcatgtggcagga

SEQ ID NO: 695363 - DNA, 300 bp, Homo sapiens
ggggggaccccgggttttaaaaagggggggggtccgggtcccggccccctccttttagggggggttggggtggggggtgcccacttttttcgggccccttagggccgggggggccctccttttgggcggggtttagggttttcccgggggggatttttttggccccccggggggggcccggttttacccccaggccccggggtaaggtgggggggaagggggggttcctttggttccctttttggggcccccccggggccgggggttccccccccctttaaaattttttttttttttgga

SEQ ID NO: 695364 - DNA, 525 bp, Homo sapiens
tggtaacgatccttctactctgtatctccatgaatttgattgttttaattttccacaaagaagtgagaacatgtgaagtttctctttctgtatttggtttatttcactttataacataatgatctccagttccatctatattgttgcaaatgagaggatctcattctttttatggccaaatagtgctccattgtgtgaatgtgtatatactttcttatccattggtctgatgttggacccttgggttgcttccaaatcttggctattgtgaacactgctgcaacaaacatgggagtgcagatacctctttgatatactgacttcctttcttttgggtatatacccagcagtgggactgttggataatatggtagctctctttttagttttttgaggaacctccaaactgttttccctagtggttaattggtggctaatttacattcccttggtaatggctttttagatatagcataataacaaagccatgatccatgaaacaataaattgacaagctggacttta

SEQ ID NO: 695365 - DNA, 547 bp, Homo sapiens
  misc_feature (429)..(429): n is a, c, g, or t
ttcccaaggacccaaggacccattttcctctctatctgcctaaaataatttcttaataactcctacaacattcccccctgtggagatgccacactaactgctgttagggagttttgggcgacgactccttctggctacttcttgttgcaaaagggcgtcgaatggggaagagcagctagggctcctcctggggtcaatctaagggtcctcagaagaatgatgtgtctatgtgtggttctgtttacagcaccatttggagtttgattgcttctagatgagaagaaacaatttgagttatagtattgtgtatacagggtccaaatatcaatacaagacacataagcaagagagggcttaataaaggggttaaccaattccataaagaagactggaatttattaaagaggcattgtagccactcggggatcnaataatttgatttgatttttaagtacttgtagattttcttttaactagaggcattaatccgaaagcagcatgtttcattgaaaactgcatcactaaacccaataaaaagtcctagcag

SEQ ID NO: 695366 - DNA, 852 bp, Homo sapiens
actgccggctatgatcttgagtgacgatgtccctatcagggtactatcgcatcgatgagagatgaacttcgtggtcagtcatggtgaccaccgaaggcaagggccggccagggtacctcagcacccccagaggcctcggccaggagctgctcccttggagtcctcctttagggtcctctccccgacgtgccccacaagcatcgtagcgcgttgtgcacgcgttcgcgccgcgggcgtgcgggctcggagctcgggagtggtggtcgtagggggatgtggaatttgtgcgcccctgtgatgtgggcccggggatctctgtctcagggcttggtcctcgcgctcttgcacgttggaacgcctggtgggggagaatagacgccgaccggggtccggtccaacccgaactctttagaccgtgggatcttaaaacgtagacgacgagcggaaatggtggagaacagagagagatccttgagtctccactagagaggctttatgggtgaccaaaagaaagacagagtgttgcgctctgtcccccattacatcgccattagcacaaatgtgtcacccaaacataagtctacacacgtgacgggaccgtgcggtacgggaagattgtgcctcgctatgtctgcagcgcccacggtttcacatttgccgtgggcgtgctgtgtgaaccctgtgaccgtgtgcgtggtggacatgggaaggagcggcctcacgtgaccagaatattcttgggcgttgggcaaaaccatcttgtaatcgcgtggggaaatatataaccctcacctgcatcgttctgtgaacaggtgccacaggcccctccaggagttcacacaacaatgactg

SEQ ID NO: 695367 - DNA, 193 bp, Homo sapiens
  misc_feature (155)..(155): n is a, c, g, or t
  misc_feature (158)..(158): n is a, c, g, or t
catggtgctcgatgagccatcgtaaatctcagaggtgctatagtgcccatgttagcatcgacttaacacattacgtcaacggtatagaagttgattggagaacagttgcatgcaatatctaattgaaggcgttacctatgaccttccttagcaanaantacactaagctggaatccttgagtggaatcggccc

SEQ ID NO: 695368 - DNA, 502 bp, Homo sapiens
  misc_feature (42)..(42): n is a, c, g, or t
  misc_feature (269)..(269): n is a, c, g, or t
  misc_feature (291)..(291): n is a, c, g, or t
  misc_feature (331)..(331): n is a, c, g, or t
  misc_feature (353)..(353): n is a, c, g, or t
  misc_feature (359)..(359): n is a, c, g, or t
  misc_feature (395)..(395): n is a, c, g, or t
  misc_feature (432)..(432): n is a, c, g, or t
  misc_feature (482)..(482): n is a, c, g, or t
gatggatacctggaatggacattaagatgaagagagtaattnacatttactctagaacctttaacaagcactgaaaggaagaagcctgagatttgatccttgacaatttctggaaagcactggtcagtcacactgcctggacagagtccaagttacccactaaagcttgaggtggatgttggcttcactcctgcagcacaatgctggcctagaaagcgagcattttcattcttccatggcagctgattctttggtgccagttttcatgntttctccataggccttgtgcanaaagggttctcaatgcatccatctgtgagaataactgcanactggaagaaacatgcctgcanggtcangaactgggccactggtccagaaccgttgtgcctcanaaactattctctttagatgttgaccctgagagactanatgattttcaaagagttgctgcctttttggaacaaggaaacccataatcnagcatggggtacccgttggt

SEQ ID NO: 695369 - DNA, 735 bp, Homo sapiens
tcggtcacgaggcttcgcacatctgtggaagcttagttctttcgctctttgcaataaatcttgctactgctcactctttgggtccacgctgcttttagtgagctgtaacactcaccgcgaagatctgcagcttcactcctgagcccagcaagaccatgagcccactgggaggaacgaacaactccagacgtgctgccttaagagctgtaacactcaccacgaaggtctgcagcttcactccgtgagccagcgagaccacgaacccaccagaaggaagaaactccgaacacatcagaacatcagaagggacagactccagatgcgccaccttaagagctgtaacactcaccacgaaggtctgcagcttcactcctgagccagcaagaccacgaacccaccagaaggaagaaactccaaacacatctgaacatcagaagggacagactccagatgcgccaccttaagagctgtaacactcaccacgagggtttgcggcttcatccttgaagtcaagtgagaccaagaacccaccaattccggacacattttggcgaccacgaagggactttcgcatatcgccaagcggtgagacaatagccgagcggtgagacctttcccaatcgccaagcaaatcgaggacatcaagctacagatggtcttacaaatggaaccccaaaagagtcaataacaacttctacgaggacctggattaccatggattccctggctaaaagt

SEQ ID NO: 695370 - DNA, 264 bp, Homo sapiens
tagagcacgctgaaaccccaggagctgaacacagattgctggattaagccagatttacaaatgggaagcttgcctcaagctgttgatgctgccaggccgaaggccactctagtggaccgtgggtcagcagatgatgaactcactaatcttcaactggcttcatgaaatgcactaatcgttctaacaaacttcagcctctgaagtgagggtcccccaattgttagtccattgtatgacatagagcgagatgatgcgccatcctta

SEQ ID NO: 695371 - DNA, 162 bp, Homo sapiens
gcaacacagcgagaccttatttccactaaaaagaataaaaaaaatcagctatgcgtggtggcatgcacctgtacttccagcaactgggaaggctgcaacgggaagatcacttcagcccaggcaaattgggctgtacggatcccggatgaagactgcagtgag

SEQ ID NO: 695372 - DNA, 356 bp, Homo sapiens
tgattgcatttacacccctgacttgtgtgatccagaatgtgactgctggatgcatgatgatgatttggaccaatatatcatcaccccaaagaagagcacccggaaaggcaaagtgtaaaccaccacccattccacaaaggagatctgacccagacaatggcccttggataggaatccataagaaagctcctcctcttccgatctatgacgaggctctgagaattcttagagaagaaaacctaatacctcctgatgaccctgacctggtcacttggtctcctcatgaccatttcatacctaacagaatcacagtatgtcctgaacccatcccttgtttcatgtatacagtctcaatg

SEQ ID NO: 695373 - DNA, 315 bp, Homo sapiens
tggttaactctaatactccaatatggtactacctacgtggatcctctacttatatgttactcttccccactgaaaatgtaatactactatcttttttacatctttaaaattatatcatactgaaatgcggactgaagactgataaagttggacttctgaagatgtctattcttagaagagacctccacagtatatcagttctcatatcatcacaggtcctccattggagaaaatgagccacccctttgtgctgccccagccgtctggccgaacagaatcacagaacaatgtgtcctgtccccgcattagggtacg

SEQ ID NO: 695374 - DNA, 102 bp, Homo sapiens
ggaaaaactttgtgtttttaacttttgggtccccccatttttaaaaattgctatttggtaaacaattattatgggtcaattaaaactaaaataaaactttta

SEQ ID NO: 695375 - DNA, 460 bp, Homo sapiens
cttccgaagcaactcagtactaacgaaaaaacctacgccaggctacggaagagccgatggccagagtgtgtggacatcaacgtaacgcgaatggccgtgcgtgccactggctggtataaggaattaataggtcctcaggtaaaaggaaaaactctgtggagctctccactgcagcgataattgtaatggtttactaccctgtataaggtactaacctctccccattcccccacatttctttacatcgactttaatttacttcaatagcaaatacagagctgtgtaataattttatattttttaatatggggggttaattgtaaaaaaacaaaaggtttaacagggaccaaagcaattttctgagcaaaaatttctccacccaaaagcccttcatgagggccagccaaagttgtgatagatggaaggcacaaattcaaattcatcccgaccggggaaacac

SEQ ID NO: 695376 - DNA, 159 bp, Homo sapiens
  misc_feature (37)..(37): n is a, c, g, or t
  misc_feature (140)..(140): n is a, c, g, or t
acctgggccacaaggagattggagcccagaatcaggntaaaaagacagaaggggctcaggtcaaaaaggcagaaaggagtcccaggcaaggcaaaaaaaggagagggagctcccagtcgcaggtcaaaaacggcagattncggttgctacatcagggca

SEQ ID NO: 695377 - DNA, 125 bp, Homo sapiens
cacgaggaaaaatattcatcctctctctgtcttcatccacggaatagtttccatgtttttcagtacagtgactttcaccacttgcagcttcccctttagttcccaggattgattcctacacagta

SEQ ID NO: 695378 - DNA, 216 bp, Homo sapiens
gatgagccggccctattcacccccctaacactggcagctattgatctgtttatgtccctgtagtttgtttttctagaatgtcctataaatgggatcctataatatgtattcttttgcatctggcttctttcactgcttagcaaaatgcatttgagattcatccatgttgttgcataaatcattagttaatttctttttattgctgggtggtatcag

SEQ ID NO: 695379 - DNA, 510 bp, Homo sapiens
ttccccttatttcccacagggtttgatgtggggctgacagtttgaagaaagaaacctcctatctgttgcttttagattgtgatgggagctagaagagcctccgggagattattcagcagctttgaccagaacgaagaaaacaagggaggagaagacaagctaaaattgattcgggattttcggcaatggtttgagactgagctaaagttattctgtggtgacattctgaatgttctggacaaacaccttcatttccagcagctaacactggcgagttccaaggtttttctataataaaatgaaaggggactaccacaggttttctggcagaattttgccacagagaaacgacaggacaggaggctggcggagaacagcctagtgggcttataaagctgctagtgattttgcaatgacagaacttccaccaacgcttcctattcgcttaggtcttgctctcaattttcccgtattctactacgaaattcttaattcccctgtggacaagta

SEQ ID NO: 695380 - DNA, 716 bp, Homo sapiens
cggccggccattaatgtaggtaggcccctcattagcccctccgctttacactaaacctacggctagtagtgtttgcaatgtgacggaaatgatttcgcccggtttcaactatgcacctaatacgccagctgggactttcccccactaagggagaatagctggagtccccccggtggcgaccgccctagaactagtggataccccggtctgccggaattcggcgctagggacaaatgcatttcccctaaatgtaatcaccacgaatccaccctcgctgtgcacctttgtcctcaatccaccctcataccaatcgctggcaaccaatgatctattttctttccgtacagctgtgccttttctagaatgtcgtatcaatgactcaagcagtatgtagccttttcagtcttgcttcattcacccaacaaaatacattttaggccgggtgtggtggctcacgcctgtaatcccagcactttgggagacggaggtggtcagttcttctaaagtcaggaattcaataaccagtctggtcaccatggcaaaaccccatctctactaaaaatgcaaaaattatccggacatggtggcacacggcctataatcccatctgctcgggagactgaggcagtagaatcgcttgaacctgggacacggagccttcagtgagccaggatcgcgccattgccctacagcctgggtgacaagagtggaacttt

SEQ ID NO: 695381 - DNA, 195 bp, Homo sapiens
gtgggtgatctagaggatccacacgtacgccttcatgagggtgttatgtagacagaaacaatttcgaagaatacttgaagctagaaggggaagttggttacaaatcacatcaaaaagctactaaaaggactggtgtatttaaaaaaaactaaggcagaaggcttttgggaagagtagaagaattggaaggcgtta

SEQ ID NO: 695382 - DNA, 791 bp, Homo sapiens
tttggcgtcagaacacagagtgtcgtgaaaactacccctagaagccaagaagtggtgaagggaataagactcatatcaacattgtcgtcatcggacacgtagatccgggcaaagtccacctcactactgtgccatctgatctactaacaatgcaagatggcaatcgatgaacatgaaccattgagcaaactttgaggaacggagtgctgactgacgaactggagaaacgggctccttccaacgatactgcccatggggtcgtatgagactacaaactgcaacgctagacacgttggacacaggtagcgctaaatacaacacatatgtgactaaatcgtacgcctgtaggtagtggacacattccttaggacagaatcccaatggctagaggtacactacttgcttgagctgactcgattggactagtcacctcgacggaatcccacagtaggaacgttcataattcaaacaacacacattgaactaaactcgcgggactcagtaccttcatggactcgaccccttgtttggcctggtaccccattgaaagtgagtgttaacgcatagccgtagtgtagatctcgtgttcgaaactttcaagatagcacgctcggcattagtttcctcccgaaacacgcaccgttgtgggtcgagacacccactggaagaaagaccattagatcacctactacctatggggccttttacagaccactccttggtgcgagttgctatggaatatcgccaatcctttagctactaggtaccggagcgttgtttggcgacctcag

SEQ ID NO: 695383 - DNA, 292 bp, Homo sapiens
attgaacatcgcagccgctgttcgggcagagaaataggtcaggaactcgccggtaacggtctcgatatcggcgaaaaaacgcttgtagcggcggatcagccggccttcttcgaggggaggattaaagcgcatcagccttgccaactccgcaagccacgggcaatccgctcgacggcttcctgtaggcgatcaaggttttgcgtgtaggcaaaacgcacatggtgaccggcttgatagcgaccgaaatccaggcctggagtgaacgcaacatgctcggtttcgaggaagtgtc

SEQ ID NO: 695384 - DNA, 207 bp, Homo sapiens
ctgaagactaaggctgctattgaaacttctaaaactaggcctagttttagaagtttcaatagcacattgctgcctgggggttctagtgctattgaaacttctaaaactaggagctattgaaacttctaaaactaggtgctattgaaacttctaaaactagggaaacttctaaaactagtgctattgaacttctaaactagggtactc

SEQ ID NO: 695385 - DNA, 421 bp, Homo sapiens
cactgtacttcaagcagagatcccagcgaggtagataagcatagcaggtgaatagcaacctcggtatctttgtgggcacacccagggggcctctgggagaacacacgatatcaggggttcaacctggaaactacacctgctcctagtcagaatctcacaagaagaaccttgattttcagaagttaactaataatggattatttggactatcttgttcaaactctttgcccgggcaaaatgagaacactgctgaggtctgagagaaacagtgaactattatattgtggtatacagcgaagtcccttgttgtacggtgtgtgctaaactgggtttcagcaatatctgtctcgccatcttataccctgtgcaaaccgggtttacccttgggagagaaaatcatcttggtgtaggtcgataattt

SEQ ID NO: 695386 - DNA, 410 bp, Homo sapiens
agtcagtagcaaaatggggtggaaagtagagttctcatttactcccgccgactcatgtataaactctcccactatcagcatcctccaccagagtgtacgtttgttacaatcagtgaacttatattgacacctcattatcaccccaaatccacagtttatatcaagcttcactcttggtgtacattcaatgggtttgggcaaaagtataatgacatgtacccaccattacaatatcatacagaggagtttcactgctttaaaattcccctgtgctctgcctattcctccctctcttccccctaaccactgatctctgctattgaaacttctaaaactaggtgctattgaaacttctaaaactagggaaacttctaaaactagtgctattgaacttctaaactagggtactc

SEQ ID NO: 695387 - DNA, 301 bp, Homo sapiens
aaatttacgggtcatgcgggaagttaaagccgtagttcaaacgcaatacaacagcattctaacgaccacttttccggacagtgacctggataagctagagatgattgataaggagcaaatctataccgctgtggtttactatgacccagaattaaagccattgagcgccgatgatcttaggcaattgcaacagcagccaccggtagtctttactagtcagcaacaccaagccggtttaaattacctgttaggtaaaatggatttaaaggatattcaggatcatcgactgcatcgggtctta

SEQ ID NO: 695388 - DNA, 1590 bp, Homo sapiens
catgcgtatcgaagagagtgttattatctagttcggggcccatctatcctggacactggcatgatgttcgtccgcaacgacttgcaaggatgttcagacttttgcaaatctaaactgtcataaaaactttaaacaagaagcgcaatcctcgcaaatgttagtgtggaccaaagcattcctggaaacgcacgctggtaaacgacgcttacacgtggactaacttcactttgacacttttgaacacaaccgtacgacacacttgaaccctatacacaactaccacgcgagaagctaatggacatacaaacctactttgactgccgactgacaggaacgcacgtctgacacgacacagtcagacaccgacggaacggcggcccacagggcttacaaactgttactacactgacaaccacggacctttgacacggaaacgaacactacacacgacggacttacgcagaaaacacggttttcaccggacctacctcacccaccgacgaggctcaatcgtcccacaacaagcactcgcgacttctataatcacggacgacccccagtcatatggcaagggccaacacggggccaacacacaggattgcgaacacggacgcaaaacatgagttaccagcaatgtttaacacaggcaggccatggttgagaacatgtggcacgaattgactcctttttaaagacaacagtcgttcgtggttatacgccagtttcgtacctctaactacgtgataagcacttctgtgtaacacagagtgacccccatatatggggaaataacatctgggcaaacccttggcggtaacaactttagtatacaaatttatcatgctacgcgttccagcgggtccagcgtgttacaacgttgcaaacaaagacgcagtttgaagaaaggaaccacttcctatgtcaccgctggcacaattgtgccccaaattccttacgcgttaactctacttcgaggacatacttcagcgggggcatgtgtccaacgaaatctgggctcattcttcacagtgtgatagaacacatcatctattcaacttgggagctagacatgggtgaacctttaacaggtctaaaactgcgcactgccacccgcaagatcccatactattgtaatcaactctacttcgacaaggcgtcaaacttcgtggcgggccccgatcacacacaatgtgcaatgtcgaagccgcccaaccacggaaacgacaacttggccaccccacacgcacgccacacctccgcgaacatcgaaacctccacacctgcgggcccgaaacacaatcacgcgcgcacagaccgcacagcatctccgccatcaccacacgatctcagcgcggacaacgacaaacagcgactacccaacatagtcacactggcgaaaccaacacacccgagtcgaccaccagacaacagacacaccaacacctgtcagcacacggcacacaaacactgacaccaccaagcaaaagaacacagagcaagaacaagacaacaccagcacgacaccacaacgaatccgaataagaatccagacacagaaatactccaccaacccgcaaccgcaacacacgt

SEQ ID NO: 695389 - DNA, 249 bp, Homo sapiens
gcgtctgttcccagggcacactgtggaccttgtgctcccgtccgtgaaccttggcttcgtgtgtgagcactgcagcctccctgggcataccctccagacgccagcaccaccgcaacatatagacctggtgctattgaaacttctaaaactaggagctattgaaacttctaaaactaggtgctattgaaacttctaaaactagggaaacttctaaaactagtgctattgaacttctaaactagggtactc

SEQ ID NO: 695390 - DNA, 242 bp, Homo sapiens
caaaagaaaaagagcagagagagtagagcttaatcaagtccaaaaagcttaaattcaaatcttttaaaattcaaagtctctgtctttccagtgttacctcatgcttctctgttatctttcacatttacatagatgacatattttcatgctattgaaacttctaaaactaggtgctattgaaacttctaaaactagggaaacttctaaaactagtgctattgaacttctaaactagggtactc

SEQ ID NO: 695391 - DNA, 237 bp, Homo sapiens
gtcgagccggtacgcgtcatttatgtaagggactgagtatactggatttgggtatcgtggggttggggggacggtccaggaagcataccccagggataccaagggacaacgtacttatttacctttagtgtcatgcagagctgctattgaaacttctaaaactaggtgctattgaaacttctaaaactagggaaacttctaaaactagtgctattgaacttctaaactagggtactc

SEQ ID NO: 695392 - DNA, 677 bp, Homo sapiens
  misc_feature (72)..(72): n is a, c, g, or t
  misc_feature (174)..(174): n is a, c, g, or t
  misc_feature (241)..(241): n is a, c, g, or t
  misc_feature (393)..(393): n is a, c, g, or t
  misc_feature (427)..(427): n is a, c, g, or t
  misc_feature (451)..(451): n is a, c, g, or t
  misc_feature (592)..(592): n is a, c, g, or t
  misc_feature (603)..(603): n is a, c, g, or t
tcgtcaccgaattgaaatgtgttgtacatctccaaaaaaacaagactgcatcatttcactagcactcaggcnaatgaaaactgaagaaaaaggaactatttctcacacatgagattggcaaaatttcaacactgacaggtttcagtgacagattacagagactgggcagtctcntatattgctgtgggtgtgtgcatctgaaactaatctgacagtgtctattaaaattataggccgggcncagtggctcacgtctgtaatcccggcactttgggacgccgaggcaggcaggtcacgaggtcaagagttcaagaccagcctgaccaacatggagaaggcccgtctcgactgaaaatacaaaattagccgggtgtggtggcgcatgcctgtaancccagctactcgggaggctggaggcaggagaatngcctgagcctgggcggcagaggtngtggtgagccaagatcgcgccattccactccagcctgggcaacaagagtgaaactccgtcttaaaaaaaaaagtcctaatatggtcatattactgaaaacagtagagaatatgtactcaacatttactataagctggtatnaagattacttnccttatattaggtaatcctttacaagcaaagggaatagcattataatcgtaaatccttgccttgtgatagccag

SEQ ID NO: 695393 - DNA, 1902 bp, Homo sapiens
agctctgaccccgagagtcaagcagcgtgcttccggctgttggaaggacaattaatcagtgaagctgcctcttcctaagcaagacaacagttgcagtcagacaagccctcaaggtgagacccaggagtctcccacctcccacctgtgcctgccatggagctcctgaaggcgctgctgctcctttctggagtctttggggctcttgctgaattctgtgtaataccacggatagacagccagctggtagagaagttgggtcaacgtcttttaccttggatggatcggctttcctcagagcagttgaaccccagcgtcttcgttggcctgcgactttccagcatgcaggctgggaccaaagaggacctctaccttcacagcctcaagatccattaccagcagtgcctcctgcggtccacctccagcgatgataacagtagttgccagcccaaactttccgggggcagcctggcgctctacctgcttgctctcagggccaactgcgaattcttcgggagccgaaagggtgacaggttgatctcacagctcaagtggttcttggaggatgagaagaaggccattgggcacaatcatgaaggccaccccaacaccaactattaccagtatggcctcagcatcctggcactgtgtgtccaccagaagcggctccatgacagcgtggtgggcaagctcctgtatgctgttgaacatgactactttacctaccagggccacgtctctgtggacacagaagccatggccggcttggccctcacctgtttggagcgattcaatttcaactctgatctgagaccacgaatcaccatggctatcgagacagtgcgagagaaaatcctgaagtcccaggcccctgagggctactttgggaatatctatagcaccccactggcactacagatgctcatgacatctcctgcatccggggtagggctgggcacagcgtgcatcaaggcagggacatccctgctgctcagcctacaggatggggccttccaaaatcctctgatgatttcccagctgctacccatcctgaaccacaagacctacttggatcttatcttcccagactgccaggcatccagggtcatgttggtgccagctgttgaggaccctgtccacatctcagaagtcatcagcgtcacgctgaaggtcgccagtgccctgtcaccatacgaacagacattttttgtctttgctggatcttccttggaagatgtcctgaagttggcacaagatggcggaggattcacgtatgggacccaggcctccttgtcaggcccctacctgacatctgtactagggaaagatgctggggaccgagaatattggcagctcctccgagcccctgacacacccctgctgcaaggcattgctgactacaaaccccaggacggggaaaccattgagctgcggctagttagatggtagtcctacgatccctcctgatgtcttcacaccctgctgccacctcaagtgcacttggaacaatgccccccagatcacctcagctaccttcccaaagaggatttaagccactccccacctgggagcaggaagggaaaaaaaacctcccctagggaggctgctagtttgagtttggccctgcctgatcccacaggtctttcatgaagactgccccatagcctgaggaacaggctgctcttgacttcctctacataaagaagtctgctggctatgggtgttgtgagtaccactgctctgggaccagggtcccacaagaaggacctccatggcctgctgtggctctgacctgcacacccaacccctgctctctgttatgagagtggtggtcccagtggtcataaggcagcctttggtcatcggcagggccatccaacacaattaaagccttgatttacctga

SEQ ID NO: 695394 - DNA, 405 bp, Homo sapiens
tacagtgtatggtatgctatcattggtgaaaaatacaaataaggggaaagtgaatgtgtgtgtgtgtatgtgtaagtacttgcgaatgtatgacatatctctggaaggcacatagaaaaccaggttgcctatgggaagaagtaggcgatgggggacagtattggaaaggagatttttgactgtatagttttgtgaactatgtgaatatcatctctgaaacagaacaactcctcctactcagatagcctctgctccctcctcctccttcttaaaagtctctgcctgggtgcagtggttcacacctataatcctagcactctgggaggctgaggcaagaggattgcttgagcccaggggtttgagaccagcctgggcaacatagtgagaccccgtctctatttaaaa

SEQ ID NO: 695395 - DNA, 211 bp, Homo sapiens
aacacactcatctcccaggtgttcccatttctgtacttgagcacttatcagagatcggaaaacctggtgctgctcctcctttgctaacgcgggcccgggatacttcacagagccctctctgcttgttcaacatgttggcttgcctatttgaagtaggacaaaaaggccatgcgcggtggttcatgcctataatcccatcattttgagaggc

SEQ ID NO: 695396 - DNA, 100 bp, Homo sapiens
tagtggtcctgcgcagggtcgacacgcttggcgatgtgctgctcagccggcgggcggcaatcggctcaaactggcgggcggggcgacgccgccgttgcgg

SEQ ID NO: 695397 - DNA, 140 bp, Homo sapiens
tgccacgcagtcccacaaagctcataaataccgagagaccgaatttacatgcaggaggaacatctcacacccttgcataatgttacaataaactattacgtacacactctccatcacctaggagtaacgcgctcaaacat

SEQ ID NO: 695398 - DNA, 559 bp, Homo sapiens
gaaccgcacgatgcgcgtcggtcttttctagatctgggagtatctagaccagggctggtggtcattctgatgctagcaaggagtcccccttcaatgccgtccggaaccagttgtactggatttcttcaccactcaggttagtcataatgcccccctaaggctttaaagatggcataaccagcacatatatcccattttttgatgtatgtcacatggctgtataaatcagcttttcctgtgactcttatcaggcacatccaaaagtgctaaatcttaataaccatgaccaccagctggggataattgtagtctggttcccaaaagtctgaagagcgacctgtttgaccatccctgaatggaccgagacacaaacgatcctaggggtcttctcattgtaggaagagcgggctttcaaattggaaccaccatctaccatggcccaagctgtatatacggaaaatggttatgtataactcctagcatgggttcaccatttacagccacaccaccatagtagtgacgtactttcgaagatcctctgtatatacctgtgtagctc

SEQ ID NO: 695399 - DNA, 112 bp, Homo sapiens
gatagagactacctgctcagtgtctcccttgtccgggtacatctactatctgtaccaaacaagcccagccagcccctgctcgtcattcagggtcacatagttcagcgtctga

SEQ ID NO: 695400 - DNA, 316 bp, Homo sapiens
gtggtcgtctctacacggatcccctgtgtgttggtaggagggcctggctgtggctcgacggcccttattgtactgatactcttatggccacatgttcacctgcaatgtttgctgtcgcaggttatacatcgccaagcttcggcccttcatttctgcaacgcccaggactctgatactttgtgtgttgtagggtttattagaggtctagatagcccagatctgccgcagtggactatctccaaggatatgaggacaagctatagggatccagcagtccaatagcctcttacagcctggggagtgcgagagaaaccca

SEQ ID NO: 695401 - DNA, 1078 bp, Homo sapiens
gtcatctactctaccatctttgcaggcacactacatacacagcgctaagctcgcaactagatatttacacctgagtaggcctagaaataaacatgctagcttttatatccagtttctaaccaaaaaaataaaaccctacgtaccacagaagctgccatcaagtatatcctcacgcaagcaaccgcatccataatccttctactagctatcctctttcaacaatatactctccggacaatgaaccataaccaatactaccaatcaaatactcatcattaataatcataatggctatagcactaaacactaggaatagccccctttcacttctgactcccagaggtaacccaaggcagccctctgacatccggcctgctaacaactacacatgacacaaactagcccccatcttcaattcatataccaaatctctccctcactaaacgtaaggccttctcctcactctctcaatcttatccatcatagcaggcagtagaggtaggataacaccaaagccagctagcgcagaatactaagcatactcctcagttaccagcataggatgaataatcgccggtacaacggtacagacctaagataagcatcgtaaataaactatccgaaataatgccaaacaacgaccgacttcctaactactcacctatcaactccagcacacgagcccaccaaatatctgcacccataacacagccatacattactaccaccgttaatccaatagacatatttacatagagcttaaccgaaccgatattgccacaagtgcacaacacgacatccaacagctaaatatgctctatgataaccgcaataatatgtcggatgccacttaacctctatcacagcgagatagatgaccgcagacatatcatgagtcaaggagaacgacggtgaggcaagccgctctacagtcgtcaaccgacaactcataatcatgagaaaaaacagctgccgaatcaagtgtgccggatacaattatcccaggagctcgtacaatatcaatatccatgacatcaatactatccagagagcattcggacgcagtaacacgatcgcg

SEQ ID NO: 695402 - DNA, 220 bp, Homo sapiens
accacaagggctacagccccaagaaggtgcactatgtgcttattccaccgaataatttcgccctgggaattttacttgcccggtgtttagccataaaatcaccgcgattgattgcagtgcgacatatcgtcactgcatcgttactttttcgagctcagagacctttgctctctgttaaggatttccagcatgaccgacgcgacaggactcatggcccaca

SEQ ID NO: 695403 - DNA, 1091 bp, Homo sapiens
ctttttttttttgtggggtcttaatgtgcttaaataacgcggaattataattagccacacaaataaggagagttttatttttttttccgggctcactccaaatcagccggtaagggtatattctccttctacagcctttctccgtgaattttggcatgtggtccctcaattctcccaagagtatagttcataccttatagtttatacacctcaagaggatagcacgtggtgtggaacctatacatgtgacagaaaacgggggcgtgcaagagggtggacagaggggaagcatagtgttccctctcgtggtctctgtggaataaaactctcgagtgtgccacacaaaacacagagaaaacccaacatattgttctgtgagagaaacagtattataatctttctcagtatttatatagagaagccgcggttgtggggaaatctcccgaatcactatgaagagagaagtcttcaatactccgcagcagttgttctccccacaattttgctccgccttcttcctcttcaacttgtgttgttgcgcgaggttgtttatgcaagcaacggatgatcaaagaagaaaggaggttcttcctggtaggaccttagatggttgagcgcaccaacccgccacccagaaaagcttggttgggtgcgcccacgacagcacgctagttggtggggagaaagcaaaggaacaaagcttcgggacgcaaaggtgggacgagacatataaacaaacgaaacgcgaagagaggggcactcggttgggcgccaggattgagaccgtatcccaaacccacacttctctccctggttgggaccaaacttcgggtggcgcgcccacacaacccttcttccttccggggtgggcgcacctcattgtatggaccctcggataggttggatgggtaggatcgctccccccctggttagtgggcggaagagaaggaaacaaacgaaagtccttccctgggtagggggagggccccccctggtggtaggatgggaacaaccaagcaaggagggaaggaagggcagtaagggggggacgacactaagtctggtgttacaacacactcccctcgttagaa

SEQ ID NO: 695404 - DNA, 442 bp, Homo sapiens
gcgcagctggaacctccggctgtcagttgcgcttacagttcctaaccccgagccctgcgcgcagcccgcactatgggaggccccgccgcagctaagggctctggtcgtagtcggtcaacgcactgctgcgcaagcgaccgactaccacgcggacgttggccgtgtcttaagggacttccggaacggggctgtctattggagccaacatatccgggccccgtcatcgcgctggtcatgacgcttgactctgtccgagatagtggcagcctgccatggcagaagctgttgggccagtactagctgggccatcgatatatcgcactccttggaaccgtggtcacggttcgtgttcagcctacaagaggtctccgttgccctgctagtcctgagatacaaggtcgaagacactaccgcagcgacacgcaattcctggcggccttac

SEQ ID NO: 695405 - DNA, 870 bp, Homo sapiens
ggcataccaaatctaatctggatcaggaaatcatagtaagatatactaggtgtgatcaaataccataactagtgaaaacagcatgagtatacaaaaaaaatttgtactcgacatagtcatccttaaacaagtcttacataatgattccttagctgataacttgtaattgactatgtaacgactgtcttgtcctgaaatccagaggtatagtcctattcttgcattcccgggatcttaacttctcgttggaatcttgccactgtctgataaacacaatgttggattcagacgtaaggaaaagcttggtgtacatacacgactggtatcccagaccctattgttatccagtcttaatcgtaattcatctttgttaaatactgtgatcagatcagctactctatagatgtactatgtccggcgagatctatacaatttacttctcactatattgaagcagtagatgcctcgaatcaacattcatctcgtcctctgtttcgttgcaaaactatgtcttccccagtttcctctgtcatggggttattcaactttagacaagattaatggtagtatgtccgtatccagtgtcctgcaaaggcccatccgcaattcacagttgattaactgagaaatgatactacaattcaagaaatacgtcaggtcgagcgtgactatttgctcatctgaacatttttatcactctctttatagactccttggcaccctccatattgaaaccaccataagtttccagttacatggaacacaagggtgcacacggacttgaactgttggcatctcaacggaactaacgacgtgcggtccaacatttcaaacacccacagaggccgtgcgacacttatcattccaggc

SEQ ID NO: 695406 - DNA, 131 bp, Homo sapiens
cgtcccggtgtacagtagtatcggaaatggggctgttcacatccgttgagtgtatcaggaatctggtcacgcgcacgtcggtactcttctctccagatgctgtgctaggtaggatactggtcgagcagcca

SEQ ID NO: 695407 - DNA, 196 bp, Homo sapiens
tagaggatccctgcagtcttctcccatcagagttattgtaggctcggggacggtggctcacgcctgtaatcccagcactttgggaggccgaggcaggccgatcacctgaggtaaggggttcaagaccagcctgaccaacatggtgaaaccccgtctctactaaaaatacaaaaatttgctgatgggagcaagatgg

SEQ ID NO: 695408 - DNA, 928 bp, Homo sapiens
tcaaggggcgtagcccctaaccaagttgttccccgcggtggccgaaaagaagccctgagggccccctttcgggagctcccctcgggagctgggatccaggcgcgtagcggaaatcccaggatccggggtgctgttgggccaggtctcccaaccagtgaccatccctcgggggctggggacccgggcttcccgggggtgcatgcatgcacgatgctgtggtgtgccccgcggtgggggctctcgagcctccgaagctgggcccagggggctgagcacccgggtgaaccggagaaagaagctgcgtggggtgacacaggtgtggtggccacgtatgtgacacacgggggggtggataccgtgggggttagaacgcgtggcgacgtcgagaggggaggtgtctatcaaacatttaagcagcgtgtgtgcgcgggacactgggtgggccttggggaaagataggtcagattgcctgaagggggggggtttaatatgtgtggggcgtcgaaaagcgagtgtgtggcgggagagggaacagaaaagggggtcgcgaggtgtgttttaagcaggaagagtgtacaatggtggggggaaaaaattagggttgttgagcgggggaggaggggaaatatgtgatctccacctgcaggaggtgggggagagaggagatagacattgacagaaggggtaggactttctggggagacgaggggagaagggggcactcaaaagatggaagggtttggtattgagacagaaagatgtttcgggctccgcaaggaattgtttgagtcaagtccctaggcaatatgtaatatgtatctactgtgggaaggaggaaagactttctgtttgtttgggaccccgagaatgttgtgggaggcgtgtgagatggagaaggaaattatactctcttggaaggggtgagggc

SEQ ID NO: 695409 - DNA, 1304 bp, Homo sapiens
  misc_feature (973)..(973): n is a, c, g, or t
  misc_feature (1304)..(1304): n is a, c, g, or t
gctctcgccaggcgtcctcgtggaagtgacatcgtctttaaaccctgcgtggcaatccctgacgcaccgacgtgatgcccaggtaagacagggcgacctggcagtccaactacttccttacgatcatccaactatgggcctgatctatccgaaatgtctcattgctgggacgcagacacatgtgggctcccaagcagatgcagccagactccgcattgtcccttcgccgcccacgcgcctgtggctgctgatgggcaacgaacaccatgactgcgcacaggccatccgacgggcacctggacaccccaacccagctctggcagaaaacctgctgcctccatatccgcgcgcgcgcaatcgttgcgcctcccgctcgtcacaccaccgcagcgcaccctccactgagcacccagcggacccactgctacgccgcgcccaatacacactgctgcccaaccctgccttgcccgtgtcttgcgctgcccccctcgcccccccactggctgccacgctccccctcgtcccccagccccacgaacccaccttggcgtccttcgcgcggccccgatccaagccacctccgtctttccccaggccctccccccgttattccccccctatcaccactctcccaagcgcgcggcaccccattcggcaccacgtccctcgacctctgactgcctgcactgcctgggctcaccggcactgccgcgctcccacacgtggggtaccccccgcggcactcccctctcccttgcctgtgatacctgctccaacgatgcttccccgcctccgccctctgcgcccgggcatcttcaacgcccctgccgcatccggaacacctcggccccaacgcactttcttcgaaccctccttgccaacgctgccctgcgaccaactacccccaacgggacgcccctccggcccatgtcctcgcgcctcgccaacatgacagacgatgaccaacgcccancgacttcccaccgatcactctccgccttacccaaaccttggcataaccccacacctatctttcccctcacaatccacagcaaacataattaaacaacacgtcgcgtcactcacgcacacacacttcacctctaaccctccacaccaacatgctttcatactcacacaaaccagtcacacgtcaaccagcctctctgcgactgtcacacatcacactatgttcgctccatcacccctacttctcctacctccacatcatcctctgatgtttgaatcacacattagtcataccacaacaactgcatgccacatcaaccccaccctcatcaaan

SEQ ID NO: 695410 - DNA, 648 bp, Homo sapiens
  misc_feature (25)..(25): n is a, c, g, or t
  misc_feature (65)..(65): n is a, c, g, or t
  misc_feature (91)..(91): n is a, c, g, or t
  misc_feature (97)..(97): n is a, c, g, or t
  misc_feature (103)..(103): n is a, c, g, or t
  misc_feature (108)..(109): n is a, c, g, or t
  misc_feature (113)..(113): n is a, c, g, or t
  misc_feature (195)..(195): n is a, c, g, or t
  misc_feature (239)..(239): n is a, c, g, or t
  misc_feature (308)..(308): n is a, c, g, or t
  misc_feature (314)..(314): n is a, c, g, or t
  misc_feature (323)..(323): n is a, c, g, or t
  misc_feature (335)..(335): n is a, c, g, or t
  misc_feature (360)..(360): n is a, c, g, or t
  misc_feature (378)..(378): n is a, c, g, or t
  misc_feature (396)..(396): n is a, c, g, or t
  misc_feature (414)..(415): n is a, c, g, or t
  misc_feature (427)..(427): n is a, c, g, or t
  misc_feature (475)..(475): n is a, c, g, or t
  misc_feature (498)..(498): n is a, c, g, or t
  misc_feature (500)..(500): n is a, c, g, or t
  misc_feature (536)..(536): n is a, c, g, or t
  misc_feature (553)..(553): n is a, c, g, or t
  misc_feature (565)..(565): n is a, c, g, or t
  misc_feature (636)..(636): n is a, c, g, or t
caggcaccgatttgcattttatgcnaaacttcaggttttactcaatttttacactggtggaagcngatgtcagtgacttaaaaggcaagcnaatacntttccnattcnnagcngaacaaaaaatacacacaatgtagcgtttttattgggcaagacttgccttttatatttcacgtgagaatgccatataacccntcacactgaacaaaatgaccagggtaccaataacacacatcacntgcaggagtgtttaataagcatattttatttaaataaatcctccagtaggaaatggagaattcattgcntttacntagaaggcnatgtaaatagcnatctgtcaaatttatatatgcagcncaccaatattcccatacnggaaacatcagtatttcnacatcacatcacagttcnnaaaacgactttnaagtctcaaaattccgtgtcaccattggcatgcatcacacatgattcnacccaggctttattaatggttcncntcatatcatcgtctccatcttcataaattttcattngaacattcatcaatccnacactaggatcngtttcagtgtcataggagggcatcacattttcattgcacaccatttcaaccagggtcaggtaatcccaccntgtgttttccac

SEQ ID NO: 695411 - DNA, 522 bp, Homo sapiens
  misc_feature (16)..(16): n is a, c, g, or t
  misc_feature (100)..(100): n is a, c, g, or t
  misc_feature (141)..(142): n is a, c, g, or t
  misc_feature (381)..(381): n is a, c, g, or t
  misc_feature (405)..(405): n is a, c, g, or t
caggaaggattctttnttgaggtcagggggcgcataacaactctctacatactacttcatcccttttaaacattccccacaactcaaataacgcacattnctatcacatatattctacctcattaaccaaataactatgtnnttcgggaacccttgaagagggaggcggaaaacttcttctccgttgagccacttttgacgcttcagaaaggtgtttgtatgttcctgcttattgaacatgttcacgtactaggcccatttcgcaagtgccccacccaaagagactgcattgatcgtccacgcgcatggcgattttaggatttttccgcccgaattcaccaaatcctctctcctattttcttgaattcgggggcgaatatnaacaggccgcctacgcgatagganacgcgacacccccgcgctcgcagccagcccgtccttgtcagtttcacggcaggttcttgccctccacccagcacctcccccgcctttgtccaggataaattctcctcttccccgatt

SEQ ID NO: 695412 - DNA, 258 bp, Homo sapiens
  misc_feature (37)..(37): n is a, c, g, or t
  misc_feature (57)..(57): n is a, c, g, or t
ctcagaactttcatctctttgtacgttatctgttggntcttgcatattgtttatttntccattagaacctttagcataattattttaaattcccaacctgataattccaacatccctgtcatatctgagcctgttctcatgcttgctctgtttcttcaaactgtgttttttgtcttttggtaagccttgtaatttttttgttggaaactagtcatgatgtacagggaacaaaagaacttggtacatagttcttgcaga

SEQ ID NO: 695413 - DNA, 199 bp, Homo sapiens
  misc_feature (99)..(99): n is a, c, g, or t
  misc_feature (181)..(181): n is a, c, g, or t
ctctagacggatcccgccgggtctgaacctgacggcgcggtctgaacctgaaactctgaaactgtaacgacacacgggacgacgacgaaacgacgaacngctgacacgaccctgacgaccacggacacggcccaactactgtttgtacgaacgatgacacgcgggacgacgcaacactggnggacgacacacggtacca

SEQ ID NO: 695414 - DNA, 440 bp, Homo sapiens
  misc_feature (19)..(19): n is a, c, g, or t
acagagatgggacagggancagatcctgaaaaccatcatacctggtgaggagtttgtgttgaggatgtaactgagaaggagctgcagaaatgttggccactaccagtgacatccacggtcatcacagctccgttgatgacagaacagaactcccaagcagtgtctgtctgccgtggtgtggatgtgccagcatgaatttacagtcagctgagtgacaggagaaggaccattttataatctcatagctttgaatggggtgtgatatggtttggctctgtgtccccaccaaatcgcatgttgaactgtaattcccaatgttgcgagagggagctggtgggagatgattagatcatgggtggatttcccttttgctgttcttgtgatagtgagttttcatgagatctggttgtttgaaagtgtgtagcacttctcccttcact

SEQ ID NO: 695415 - DNA, 87 bp, Homo sapiens
ggcctttccggggccctcagccctgggggggggccccccccccggtccccccagtaaaagcctcccctggcaaaggcggtccttcca

SEQ ID NO: 695416 - DNA, 862 bp, Homo sapiens
ggcacaaaactgctcttaagtcatgcagagttaccgtttcggttagccagccacgaagttctggcgagagtcgtctcctcgataccaagcgctgtgtctggcagagctggtgtgagacgagacaatcctgcccggcgcggggataactcaagagttttggccggaccttgtgagcatacaccgagagagtgaggagccagacgacaagcacaacactaatggcgctgaaaccggattaataagggaaccttaggtgattgtggcccgtgaccctccagcaccaatgttctgcaggttccagtgtggggggatgattactgtctcagtgtggcaaggccacaatttattgggacctaatgacaagcccatatcaggggcggtgtaattcctttttgacaacttcattttccctacagaattacccctttaaaaccacctaaggtttgcattttacaaccaaggaattttatcatccaaataattaacaagtaagttggcagcaatttgtctcgatatctaagatcacagtgtcgcctgctttaacaatttctaaaagtttcttttatcccattgtgtttccctgctatgttgattccaaacccaagatgaccccctagtgcagagattgcacgggttctatttaaaccaggacgagataagctcacacagaactatttcgggaatggctcaagaaagtttgccatgtggatgcctaccttaaagtcaggaataactggtaataacgggataaccttcaatagggcccttttggaatcttatccgggggtccctataagagctcatcttctaaattatttgtggtacccccccatataatgttcctggaaaacaagtttacact

SEQ ID NO: 695417 - DNA, 219 bp, Homo sapiens
aattggtaaatattcatgatgtgtgaaaattcatgatacattctgtacagtttcagtcccataaaattggatgttgtgcctcccccccggatctagaagaatatgtcaaactataatctgcttgggattgtgaatgactttgttctttgcttgtgtttttccatttcctataatgcccatgctaacttttaaaaaataaaggttttttttaaagcctga

SEQ ID NO: 695418 - DNA, 406 bp, Homo sapiens
attcgcggccgcgtcgactttttttttttgagacggaatctcacccttcttgcccaggctggagtgcagtggtacgatcccagctcactgcaacctctgcctcccgggttcaagcaattctcctgcctcagcctcctgagcaactgggattacaggcatgcaccatcacgcccggctaatttttgtatttttagtgcagacggggtttcatcatgttggctaggatggtcttgatctcctgacctcatgatccacccaccttggcctcccaaagtgctgggattacaggcgtgagccaccatttcataccgttaatagtgcaaggacatgatctttcaaaaggcagcaccctttgttatacttaggaccgtatcttcactctgtgtaggaggtgggaggtgaaaat

SEQ ID NO: 695419 - DNA, 1252 bp, Homo sapiens
  misc_feature (1)..(1): n is a, c, g, or t
ncaacaagagaaagggcggagagcagaacggcgggcgtggctaccgcagtgtcggtgagtctgtgctccttggtgctgtactcactgcagttgatatcgttacatcgttcgtcccgtcatatctgtggtgtcctctctttgtcttcactccgttgtctccaccctgggtgtgtgtggctctcgcaattatcacgtgtgttctccataccactagtgttctcttgaggggttgagaatttcttgtaggaaagtttctctccaccccgccgttgttgacacactcctcgtttttgtctcccctttttcttgttgggtctgtgtgttttaccccgctcgccgctgcccccgttcccccagtcgggagatcttcttgtgtccgaaataccccttgtgaccccgtttttttccgcccgccgggtgggtgtctttctctagaagttgttgccgttatttttgggcgccggccccacagctggtttcttgaaatgctagtgttgttatagcgccctcccccggttgtgttcgcgcgcccccccttgggtgaaatggccctccccgttgcgctctgttagggggctgaagaattttttatggcgcgcccttaggagtgcgcaacttttctaggggtgccacaggtactattggtcacacaaactgactttcgaggcactgggacatacctggacttagcattaatcttgttaccttatactcccttgaatccccggttccccttttaacccctaggtaccctatctgaaactcttgcaccttcccccaccccggccccaaatgaggtgggaaaaatttgacttaaatgaggggattcggggaaagattaaagaaatttttttttttttgagactccctttgtcaccccggctggagtgccatggccacaatctcaactccccgcaacctccgccctcccgggttccagcgatttctcctgcctcacgcctcccgaggtagttgggattacccggcgcctgcctccactgcctggctaattttgtatttttagtagagacccgggtttcttcactgttggtcacggctggtctccaaactcctaacctcgtgatccccctgcctcgacctccccaagtgctgggattaccaggccatgagcccccatgccccagcccaagatccatttttttatatagacttcagcccctttgtaaatattgtaactggggagtatagagtagaaaaaaagtataattaaaacctttgttctaccaattta

SEQ ID NO: 695420 - DNA, 128 bp, Homo sapiens
  misc_feature (8)..(8): n is a, c, g, or t
aagcagtnatacagactcatttcaaggagctcaaagcacatgtggttagtggctactaaactagacgctgtagatctaaacatccataagttgggctatgcagggatatataaacagttataacacac

SEQ ID NO: 695421 - DNA, 1317 bp, Homo sapiens
  misc_feature (1093)..(1093): n is a, c, g, or t
gactaccagatggcgaccaagatatatagcatcctcgatcccgtccggaaaccggggaccacatactatgcgatatagctatccggatgtatgccgggtcatgcgcgtggaagtcttgtagtctcaagtccatatcagggtgtcgtagagtaaatgtcacgcatagtgataagcgtttagctaactcgcggacggactacgacaccagtctcggcataagctcggggtagtggactgacgtctatgctgatcagagatgggatttcgcgcatgggttcaatgcagttgaaccaccaggcaagtactatctcagcgactagtgcagaaccaggttatacctagacgggacgctaggggagacctccgtttagcaacaagtgagtctgcggagtccccaactcggggatcaacaaacattaacgtgtgacatcgggtcacacttcctagcggaaccaacccttcttgctcatggatccttgactgctggctggccactacgaagacccttaatgattccaatcttgtccttcgcacaacgaccatccgtgggcaagaataggtcacaaggacattgatcggtcgatccttcacatgtattaacaagcatttagctacctgtcactcgtaaacccgtgtcgcgtacccctttgtaggccatccagatttcacaccttagtaatcccaaattggggtacacgaagagctgggcaaattaggcgcagaaacaatacgtcgaagcgggcgtttgccataacaacgttgacatgtatctcgcccatagtaccatcctattaggcataccacatggtcttaggaattcccaataaccgcagcacgacaatactaagtgccatgtgtgaacgacagccgacaacacgatacggagacggaacaggcactaacgcagaaaagatcacaacaaaaaggaggaaataccgaaggagacaacaaaacagagaaaatggacccgcggagaggaaacacgcgcgcggaaagcgaccccccgcgcagcctgcgcgagataagccaccgacgaagggcaacacgcgggtggcctcaatccgcatcacatgcggacgaggcgaccacacgntcaaggacacacgccgcaacacaacgccgcagaagaaaataatctaaagaagcgaagctacgccacacaagaacgcagcaaagcacacagcacacaagagcacacaagcgcaccgacgacgcacacagacgcgaacactgtcagcacaagaaacgagtgactccactcaaccaaaaacgagcatgggcgcacacacgcgcagaagtgagaaaacgacgacgcaa

SEQ ID NO: 695422 - DNA, 288 bp, Homo sapiens
attaatttaataattgcatattttgagctactctttatggaaagatgtatcatctataagaatgaactaaatgacaaactgaagagaacaaaattgtgaacataacacatagtactcctgatcctacatgtctccatgaccacaagacaacaaagatggcaagtattaaaatcgtccccactgtcaaaaaatgttacctgtgtattctccatgcaggtaatatatcgagatgcacgtcacttaatggcaataaatgatcacaaaaatattcaacacaaagacaaaacc

SEQ ID NO: 695423 - DNA, 335 bp, Homo sapiens
cactaaaaatacaaaaattagctgggcatggtggcacgtgcctgtaatctcagctacttgggaggctgaggcagcagaatcgcttgaacccgggaggaggagcttgcagtgagccgagatcacgccactgcactccagcctgggccacagagcgagatccgtctcaaacaaacaaacaaacaaacaaaaaacatcattagccgggtgtggtgcgcatgcctgtaatcccagctactcgggaggctgaggcaggggaatcgcttgaacccgggagacggaggttgcggtgacgagaacgtgcactccagtctgggaacaagagccaaatccgtctt

SEQ ID NO: 695424 - DNA, 267 bp, Homo sapiens
  misc_feature (191)..(191): n is a, c, g, or t
  misc_feature (198)..(198): n is a, c, g, or t
  misc_feature (236)..(237): n is a, c, g, or t
  misc_feature (239)..(239): n is a, c, g, or t
  misc_feature (253)..(254): n is a, c, g, or t
cttgagactccccaatttttggcctgttcaggagcctcagataagtatttgtacttgagaccccctcccccaatctgtatgggcccaaccctgatttcaaacctccttccctttgcctgaagctgtcgtccttcctatggcaggagggggggggggtcccaggacgtgcctcatacatgacttgagcttgncagtccnctgagtttccttttatgagatcaacgcgaggggcctgnntnttgaattaaagccnnctcgcttccttta

SEQ ID NO: 695425 - DNA, 830 bp, Homo sapiens
  misc_feature (401)..(402): n is a, c, g, or t
  misc_feature (428)..(428): n is a, c, g, or t
  misc_feature (523)..(523): n is a, c, g, or t
ctgggaggctgcagtgcaggacaatatatggatcacttataacagttctggaattgcgaagcatgtagcagcggcagattctgcattgagactttaccaggagaagtcaaatatataattacttaccaaaccagcaataaaaactcatagtatattcaaaagctttcttgccagatcaggctaaaatttaaaaatatgcatttttttcccacataaacgaaaattatacaggttttatacatggcctgttttaaacaacagcatttaatgctgttaataccttccacatccatgaacagttgtacctccctgttaatgagggatacataaattggaaactcagtacaactaacctgttgaaagacatctgcaacgcctctaatttctttcttgtgactgtnntatgcttataagcacccttgtacatnatgcatacatgtgtaaatcttatttcttttgaataaattcataaaagtagaattattaggtccaatcatagggaactgccaacgtttcaactgtnttttacttacggtaaagatggcagtcaacagggtcacccaacaaactggaggacgtgaacatactcaaggcttttggtatactggccaattcatgcattttgacaaatcatagtattttgtttttgttgagacagaatctcactcttatcgcccaggctggagtgcagtggcacaatctcggctcactgcaacctccacctcctgggttcaagccattctcttgcctcagcctcctgagtagctgggattacaggcacccaccatcatgcccagctaattgttttatttttacgtggagatggagtt

SEQ ID NO: 695426 - DNA, 488 bp, Homo sapiens
ctgtcgccgcgggagcagccgctatctctgtgtgtccgcagtgtgcgcccggtcccctggcctgcctggacctagtggagagctaccatcaagcctgaccagcagaagctgcagtgccttgtaaggacagcggccaacctgtctacgtatcaggctccatccatggctcactcactgctgcgcgggctctggccaacccacagtcatgctgcagcgcctgcgtgatgactcatggctgtcctctttttccacaccatgcgctacatggtcccaggaccccactggaatccgcacaatgaccgctttgtgctctccaagggcctatgcagctcccatccgtctacgcggtcatgggctgaaggctgtgtttcctgtgcctgaggcggagctgctgaacctgaggaagatcagctccgacttggacgggctcccggtcccgaagcaagctttcaccgacgtgtgccactggctccctgggccagggcctc

SEQ ID NO: 695427 - DNA, 211 bp, Homo sapiens
gccgttcctcaggctccctctccggcatatcggaaccctgcattccctgtctatccgtgttccccatggtcgcgtcccggggactagcatcgtaagttgatatggcagacgttcgacttggtcgtcgccgccacgagcgtcgtaaggccctaagctatacgttaccgatgctctcaatttcgtaactcgtggtcatatgctgtccccaggt

SEQ ID NO: 695428 - DNA, 775 bp, Homo sapiens
ctaggtcgggctggtggttaatcggccgagggttcggccgccgccatggccgcggtggacctggagaagctgcgggcgtcgggcgcgggcaaggccatcggcgtcctgaccagcggctggctgacgcgcaaggcatgaacgctgctgtcctgggctgtgacgcgcatgggcatttatgttggtgtgccaaagtcttcctcatctacgaggtgctatgagtgtgcctctgtggagtgtgagtgtgatgaacatcaatgcatgtgccaactgtgctgagctgtctccaacatacatccatgctgtgtgctggcactatcatttggcagcgctctgctgcaatggcctttaccaccagtggaggtggctgccgtggcagcgtgcctacaacctggtccaagcacggcatcaccaacctgtgcgtcatcggctggggatgtgcagccttacatgtgtgccaacatcttcctgcagcgatgtggggcagcctgctggagtgagctggtggctggaaggtaagatctcagagactacatgccctggacctactcgcacctgaacatctgctgggcctagtgggctccatcgataacgacttctgcggcaccgacatgacccatcgtgcacggactcggccctccaccgcatcatggaggtcatcgatgccatcacaccactgcccagagccaccagaggaccttcgtgctggaagtgatgggccggcctgcggtacctgcgctggatctgcctggctcatggcggtggtgtcatcccgagg

SEQ ID NO: 695429 - DNA, 225 bp, Homo sapiens
gaactccagtacccagggatagctggaactggcttacacagatgtgcgtgacaggaattccgcaacctgagtggattaaacacagcaattcgtatcgaaaaactacattatctgctgacaataaataaattatatcaaaaacaaaggtaaggaatcctccaaaataatcacttcctgattgttttactacattgtactgtcatgtatggactttcggcgtgtgca

SEQ ID NO: 695430 - DNA, 107 bp, Homo sapiens
  misc_feature (57)..(57): n is a, c, g, or t
ttcctagagtcgctgttgaagaaggcctgccaggtgacccagtcgcggaacgaaagnaccatgaccacatcccacctgaagcagtgcatcgagcttggagcagcagt

SEQ ID NO: 695431 - DNA, 148 bp, Homo sapiens
tcggacccgctcaggcgcgtcggagggcagcttgccgccacggagactcgcctgcggcgatgcgcgcgttcagtgtttggcagatggtggctacggtcgtcggtgcttcactcatacagcgggtgtcccgtttcagtgcgtttggcct

SEQ ID NO: 695432 - DNA, 128 bp, Homo sapiens
ccctaaaaaaaaaggttttttaattgtaggagcaggatggaaaaacttttctgcccgaactcggaacggagcagggtaggggccgtgtccagctttataacccttaataaaaagggagttttgcccga

SEQ ID NO: 695433 - DNA, 334 bp, Homo sapiens
tccgcgtgttcgctattcttgattcggcttctcgccatgtcttctcacaagactttccgaatcaagcgattcctggccaagaaacaaaagcaaaatcgccctattcctcagtggatccggatgaaaactggtaacaaaatcaggtacaactctaagagaagacactggaggagaacgaagctgggtctgtaaggattcacacaatggcaagactgaggatttatactgaattgtcatcaatcagtcctaccagatggatttcaacatttaaacctggagactcttcgtgtcttgaattaggatgtttgtccagtaataaaatatagaacctttc

SEQ ID NO: 695434 - DNA, 291 bp, Homo sapiens
ctcggtacccgggttcagagactggagcagtggactgtggctccataagtaggctggagggtgtgagggcagattcatgctatccccacgggctctggctctggtctggagccagctcccttctccctctctgccttccccgctcccattcctgagtgctgaacgtgttcgtggacccctgtgccctgacgtctctcacggaccaaatgtgggcacgcggaacacgctgtatgtgtgtgccccccctggtgctttggccacatggtctccctctctgatgtgtggttgtga

SEQ ID NO: 695435 - DNA, 691 bp, Homo sapiens
gggcggaagaaggccacccaggcctcccaggagtactaagaggtgcccgcgcgtgtccgtgccgcagtgctcccacatgccaccacaaaggccctttagagggccacgagcgtcctcatggaaagagctgagccgttcatacgtgcggggcaagcgggcggcgggtcccgttcgcggtcgcttcacgagtctgcctcgtatacgcgggccgggtccttgagatgtccctggccttgacgctcgatgtcgcgtcgcgggatccggccatgaccgccgtgggtccctcagtcgccgtgcgcttgtactgcacgctcctacacggtccggaagggggtccgggccctgccaggtagttcgcagctctgggccccgcttcttttcgtggcggccccctacccgggtggaacggacggaacacaacccacgggaatactttgacccggcggcgcccccaagcccacgacgccaggttcacagcagcaacctcgcgccacggggccgagcgggcgagttacgcgggcgaacacacacacacccggcccactatgaccccggaaggtccccgccaacacccggcgagtcacgcagcggacacggcgcaggcgaaagcacacggttctctggaaccaggacgctcgcgcccatcaccgcgccgcaaaacagagctggccccacaacgatgaggctcccg

SEQ ID NO: 695436 - DNA, 622 bp, Homo sapiens
tttgtatttttttaaataaaaccaaatgaacccccacaaaaacatctcactccactttttgctttgctcggcatctaaaagaattatgctccagccacttttctgtcacacatctgctgcctgtaaatggcagtgagcagcagtggatctttcattcgttaccgtggcctcctgaaagcatgggtgtgctgggcctttctgccacctgctttgtcgctgctgattttgacagtgctacgtagttgctaattttggtttcaggcttttgttaccacctccctcttctcccttctcatttttagctaaggaagctttggatagatattttctatgcatattactattaaagctaagactgtctagaatttctaaacaacaacaacaacaacaaaaatctaacttaaaatttactttttgcagtattgcaaaatgaatcctaaattattggcttaatcacctgtgttaaagaagtttcaatgcagaaactagacaaaacaactaacaaaatcaccatgtcctttattatttattcttgaaattagcaatctgtagaactgatcacattttgtccgagtagacatgactgggccaattgtatagccctgaaggaaccatcattttg

SEQ ID NO: 695437 - DNA, 636 bp, Homo sapiens
  misc_feature (2)..(2): n is a, c, g, or t
  misc_feature (268)..(268): n is a, c, g, or t
  misc_feature (325)..(325): n is a, c, g, or t
  misc_feature (341)..(341): n is a, c, g, or t
  misc_feature (349)..(349): n is a, c, g, or t
  misc_feature (438)..(438): n is a, c, g, or t
  misc_feature (462)..(462): n is a, c, g, or t
  misc_feature (466)..(466): n is a, c, g, or t
  misc_feature (473)..(473): n is a, c, g, or t
  misc_feature (502)..(503): n is a, c, g, or t
  misc_feature (520)..(520): n is a, c, g, or t
  misc_feature (585)..(585): n is a, c, g, or t
tngggcccacagcagcgtgaccggccgctcccaagccccgggcgcacaaccacagccaggagcagcccctgccaccactgggccaccgtccagggccccacaggaccagccgaagtgccccgggccgaggccagccgggtcaggtgtacccctagcctggggttgagtgaggagcggcacccccagtatcctgtgtaccccaagttgcccaggaggccgagggggccttgggctccatctgcactggccaccccgtgccaagcatcanagctgcgtgagcgggtttgtgtgtgagcgtgtggcggggcctggttgttccccttcnacaaggcttaatcgtntaaaagcnattccacttttcccgctcgggaaaaagccacagagcctggcgatgtcctcaaggggtcccggtggctccagtgcacccagcacactcancgcctctggctaggcaaaccagangaanaagtgtnagccgtgggcgaggtgcttggaggacgcnntggttgcgtggggagcncaggctttgatggtggcgtcgtcgctggccgtgagccgcagctcctgctcctggggactgaagancactgagttgaccacatcctcgtgccgcagcctggccagacagactgttgt

SEQ ID NO: 695438 - DNA, 310 bp, Homo sapiens
aggatcttgagctcatttcaggttcctttaaactggctttataagctcttccttaaaaagcttgatacaaaaggtgaagaaggccgggcgcggtggctcacacctgtaatcccagcactttgggaggccgagacgggcagatcatctgaggtcaagagttcaagaccagcctggccaacgtggtgaaacctcgtctctactaaaaatgcaaaaaataaaaacaaaaaaatttagctgggcgtggtggcatgcgcctgtagtcccagctacttggggagactgaggcaggagaatggtgtgaacctgggag

SEQ ID NO: 695439 - DNA, 473 bp, Homo sapiens
gggccttgctctgtgggtctgcccacggtcaggtgacagccacctccagggcaccgtcagggtggtgctggccacagaggctgcatgacctcccctcccggcgtccctcccccaacctccttccgcaactgggcttccagggccgtaggtgcctttctgcacacaggccgccaggactcgtggtgtctccaggctgtgtgactgcagggccacatgctgcctgcaaacagggcaagaccacggaggcacaggggtcctgctcctgatggggcctcaggaggggcggagaggggtggaagggagggagctgccccacctggacccccgctctccctgctgttgtctgagcagatggatggagtccaggcctgggggcttctgctgggccagcccggcctcccacacccacttggagggtgagactgcagtgggggttgtttttattaaaagcatcatggacacagcaaaaaaaa

SEQ ID NO: 695440 - DNA, 236 bp, Homo sapiens
  misc_feature (144)..(144): n is a, c, g, or t
  misc_feature (183)..(183): n is a, c, g, or t
cgcgtacagttgcggtcaggagcgcaggtctcattcagggtgagataatcttgcgtcgtaggcgaactgttcatacccgctgaggaagcgcctgttgggccccagctcgcagccatgattccactgcagggtgtgagacccggnctcgctctgattgtagtagccgcgcagtgtcggcaggtncactcgggaaaatctgtgcggtgcccctggggctccgtgtcctcgcgggtcca

SEQ ID NO: 695441 - DNA, 162 bp, Homo sapiens
tggtgacagcgcgagagctaaattgaggattcctgaatccagatcttgcctcctatgtgctgtccacctcctctgtgctgtccacctcctctgtgctgtccacccctcgtgctgtccacccctctgtgctgtccacctcctctgtgctgtccagctgtccaa

SEQ ID NO: 695442 - DNA, 480 bp, Homo sapiens
catgggtatatcccgccatctgtcatatagggtgttgggtccatccccacaaattgtcttttggaaccgttggacgcgaagagatgtgggtgatatccaactggttacgaagtttccttagactagcacaaaggggtgataataactggtctgagtttggagccaatttgctctagtaggctccagacttataggattctctttcaccaatagtatggggagtacactcttgtggaaggcaaagtcgctttttgctttgccattatgttccattggcgttcgagtgccaaagtgtggttatgtcgcacatctggtgataaagtcccgcgtgtgcactgaattggtttcaacgattgtgtttactaatctcctctgtcccaaggcgcaacttatgcaggggcccatcgtaggtgcggccatggatggtcctgaaacggttttgtgtcatggacgtgtgccatcctgagaaggcccaagctt

SEQ ID NO: 695443 - DNA, 191 bp, Homo sapiens
ctggaggtccttagcttaatcacttcacaagtgctatacagtaaagataaccgactctagcaggaacgcgtgactcaatggatcgagtcagggggatggtattcatcctgtagtatctctaagaccagctcatccttagagggcatcctgtgctgtccttatcccatacctgccagacggtgtaagatgcc

SEQ ID NO: 695444 - DNA, 181 bp, Homo sapiens
ccccccttggggtctttgggagtttgttttggccccccccccccgggccttttcgaggtgttgggcgactccgcccccttttctcaaatggggggttggtgtgtcgcgtggggggttttttttaaccccgctccttttgtgtttcgtcccctcgcctggggcccccctcccccctgttttt

SEQ ID NO: 695445 - DNA, 223 bp, Homo sapiens
gtatctccaccgggtgatggcaagtgacccgtcttccaagcgccgggcaatgcaacttcagtgttcacgtggcaataataatttaaattgacgctgcctttatgtttctagttatgtgcttaagtgacatacacagcacatgggacgctgggtgaatgagaagttgctgtagacgacctcttggcccacgggcactgggttggcagtgctaggcaccccccag

SEQ ID NO: 695446 - DNA, 666 bp, Homo sapiens
acagaaaatcagtaagaatgtggaaggtttgaacaacactatcaaccaacttgacctagttgacattgacagatcactctctccaacaagagcagatcatacatcctttttaactgcacacagaatttttaccaagatagataatatgtaatgctataaaacaatgttccataaatttaaaatgagtcaggtcacagaaagtacttctttctgacaaaaatgagttaaattagaaattaacaacaaaaatatctgcaaaaatccacagatattggaaactaataacacacttctaaataaccaatgaccagagaagaaatcaaaagagaaattaaaaaatgtttgaactaaatgaaatgaaagcacagcatatcagaatttctggggtaccactaaatggtactttgatagaaattatagcactaaatccccatattagacagtaagaatggtatcaaatcaatgatctcagctcccactttaaggattagaacaagaaaaaaataaactcaaaataagcagatgacagaaaagaattatcaaagcagaaaccaaagaaatagaaaacagaaacattcactgaaactaaaagtggttactcagagaaaatcaataaaattaataaacctctgcctagctgggtgcagtggtcacacctataatccc

SEQ ID NO: 695447 - DNA, 128 bp, Homo sapiens
cccccccccccccccaaaggggggggggggccattttttacccttttttttggggggggtttggaacggttttttttaaagtttttaccgggaacggtttggcctttaaaatttaaggggggccttta

SEQ ID NO: 695448 - DNA, 764 bp, Homo sapiens
gactgggtagttcagggtgaaatgtaatttcctccagtggatgagaatcatcaattgttcatgaaaaggcaatttcacccaaccctgagtcggtattgccaagggttctactccccaagtgggcttcccatcacaagggatctgaggtccaggtgggtgtggtgaggcccagcctgtcatgtatgccttccttccccagtctcaaatgtgagagacggactctgctccgtggacatgagcagccccttgaagggtggtctcattctctaacagtaacagcactgccagaaacaccccctgaatgccacacgatcatctcactttgggtcaggccagcagggcctcacgatcatttcttgaacttgaattttcagtgttattgaatctttaaacatttaaatccccaagcaaaaatctcattacagtgaataaaaaggaatccaatcaaacaagccaccacttccctaatggatggactacctacaactatagtgttttgttatttcaataacaattctatgcacagccaattctccataccaaagtactaaaaaaatgtttaacaagcatttttgaagaaaacaaagagaacttcattatggttaaacttgcttttcatctcagtgttgctttttttaacctgttaataacattgattcttaaaaagtcctaatcaaacttctttatttggatgggccctaaatattcattttcagatttctcttcaaaagtttgaacatcatcattaaaaaaaaaatagcatt

SEQ ID NO: 695449 - DNA, 385 bp, Homo sapiens
tactaggcacttccaaaattatgatacagtaaaagcaaacttaagattcattaatgccagctgagacagtggagaatatatgaataaaaaataaaatttggggtctggcgcggtgctcatgcctataatcccagcactttggggggccgaggcgggtggatcacgacgtcaggagatcgagaccatcctggccaacacggtgaaaccccgtctctcctaaaaatacaaaaaaacagccgggcgtcgtggtgggtgccagtagtcccagctacttgggaggctgaggcaggaggatggcgtgaacccgggaggcggagcttaccgtgagccgagatcgcgccagtgcactccagcctgggcgacagagcgagactctgtctcaaaa

SEQ ID NO: 695450 - DNA, 624 bp, Homo sapiens
  misc_feature (21)..(21): n is a, c, g, or t
  misc_feature (26)..(26): n is a, c, g, or t
  misc_feature (42)..(43): n is a, c, g, or t
  misc_feature (46)..(46): n is a, c, g, or t
  misc_feature (48)..(48): n is a, c, g, or t
  misc_feature (51)..(51): n is a, c, g, or t
  misc_feature (54)..(54): n is a, c, g, or t
  misc_feature (56)..(56): n is a, c, g, or t
  misc_feature (59)..(60): n is a, c, g, or t
  misc_feature (62)..(62): n is a, c, g, or t
  misc_feature (65)..(65): n is a, c, g, or t
  misc_feature (68)..(69): n is a, c, g, or t
  misc_feature (73)..(73): n is a, c, g, or t
  misc_feature (101)..(101): n is a, c, g, or t
  misc_feature (109)..(110): n is a, c, g, or t
  misc_feature (141)..(141): n is a, c, g, or t
  misc_feature (154)..(154): n is a, c, g, or t
  misc_feature (158)..(158): n is a, c, g, or t
  misc_feature (177)..(177): n is a, c, g, or t
  misc_feature (184)..(184): n is a, c, g, or t
  misc_feature (186)..(186): n is a, c, g, or t
  misc_feature (199)..(199): n is a, c, g, or t
  misc_feature (201)..(201): n is a, c, g, or t
  misc_feature (210)..(210): n is a, c, g, or t
  misc_feature (216)..(216): n is a, c, g, or t
  misc_feature (224)..(224): n is a, c, g, or t
  misc_feature (319)..(319): n is a, c, g, or t
  misc_feature (333)..(333): n is a, c, g, or t
  misc_feature (358)..(358): n is a, c, g, or t
  misc_feature (364)..(365): n is a, c, g, or t
  misc_feature (368)..(368): n is a, c, g, or t
  misc_feature (428)..(428): n is a, c, g, or t
  misc_feature (435)..(435): n is a, c, g, or t
  misc_feature (455)..(455): n is a, c, g, or t
  misc_feature (491)..(491): n is a, c, g, or t
  misc_feature (493)..(493): n is a, c, g, or t
  misc_feature (539)..(539): n is a, c, g, or t
  misc_feature (551)..(551): n is a, c, g, or t
  misc_feature (563)..(563): n is a, c, g, or t
  misc_feature (575)..(577): n is a, c, g, or t
gggctcataatggagaaggtnaaagncagatccccgtggccnncgncnagnagntnctnnanagnatnncggncaagtgtttccggaagtgtatagggaancctggggnntccctggacaactccgagcaaaagtgcatcnccatgtgcatggnccgntacatggacgcctggaacnccgtgtntngcgcctacaactngnggttgcagngggaangagccaanatgtgaccggggagggggggccccccccccctgtttatttccataaaagtgttttaaaagggggggtccgcatgtacgtactgcctgcccggggnttaggagggtggcnccggtgttgggacaaaggggattgngtcctnnccnccccccgccctgccccctgccagccagtgcagtttggatttcgggggtggggggccctgncccttcntaaagtggtggcagcccagnggcccctccttcaggcctttggggtattcccctagngngcccaagtcaccctcatattttggggggacagcttgtttggacttnggagttgggggnggtcaaaccccncaggagctgtcnnntcctggggatgggcaaataaattggtggaggacggagagaaccctca

SEQ ID NO: 695451 - DNA, 368 bp, Homo sapiens
  misc_feature (130)..(130): n is a, c, g, or t
ggtcatggctcccaggaagaggcgcagcaggtcccccaggacacaaggaagggacagctgaagcactaagcagtcagacagtcacaggtggcaggattccggaggcggtctggcccccccaacaccaggncaagggaacaacggagcaaggccctgttgctaagacgtgaccaaagccagtgctcctggagtgagtggggacacaggtagagaggcccccttcagccaataggcatctcttacatttaggaagctgctgcattgtcctcagccatgagggctggggtcaagtctccatgcatgcgcctggtcctttgcccaagctccgttctttgcccaacattgcatttgcacccagggggggttac

SEQ ID NO: 695452 - DNA, 151 bp, Homo sapiens
cacaccaagcgaccccctcgcgtaccaataaccagtccggccctgagcgtaaaattaacagcccccgcgtatcacctgtcccaggacacttcgtaacagccctagaccctaactaccgtaccgaacaaacttaaaagtaaaatcccggcgt

SEQ ID NO: 695453 - DNA, 174 bp, Homo sapiens
cgatagctttaaaatggctcatcatcttccagcttcttaaacttagtgcctgttcccagactggagaccttgtggatgggtggagagtgtggagggtattgctgtggtcctgcctgtgcagggtgcactggcacctgtggatcttaaaacttgccagtgcctagttcctcctga

SEQ ID NO: 695454 - DNA, 575 bp, Homo sapiens
cctgccccactagctgtggcctgcgagcctcgtgtgagcctggccgtattcccgcgtctctgcttagtgggtgcacatgtgctgcatggcatctggccctgtgccactttccaatgcgctatctgtgttgctgctgtgtgctgctgttcttgtgtgattactgtgtgccctgtgtgagtgctgccgtgcccttcctgttcctgcgcctgtgtttgcctcttcatgtgaagcatgctgatacctggaggatgatgctgcctgtgagatgtttgggcttcagttgcgtgatgcttctgtgctgcctggggcccatgccctgtgctgcccccgcatggcctggcgccatggcctcctgggagtgtggcctgagttgcctgcatgcatggatgaccacctgccccgtgtgcctgcagtacttcgcagagcccatgatgctctgactgctggccataacatcttgttgcgcgtgcctcgcccgctgcttggggcactggcagagactaacgtgtcgttgcccgcagtgccgggagaccttcccgcagaggcacatgcgtgccaacctggcaccttggcca

SEQ ID NO: 695455 - DNA, 222 bp, Homo sapiens
ggaaaccagatgaagaagatgagattcggaggattgaaagaaaaggccaagatttaagatgagaaaaggatgaaggaaagaagaccccaaaggaatttctgaatttttgtaactgtttttaagaatgttgactttctcagtgatattggtcaaggacaaggtgaacctattcttaaggacctttaaagatatttaagtgaagtctcagatagctcggcccac

SEQ ID NO: 695456 - DNA, 872 bp, Homo sapiens
gaacgtgcggacattgtcagctgcgtttcctgcggtcgcggttgaggagctcaagcttgggaaaatggttgtgcacttcacttgatattcgtgctagttcgcacgattcctggctgctgggatctacaagagaaattgcctggtagaccatcatataatagccctcatggatttactccgtccttcggttagtgcagtcatatagggctgaacgaaagactaaatacacatgaatccgaagtgattacagaatcgaacaggtgaagagatcaaagctttacaggggtggcagagcgatgagatggagttagccaggcagaaagggagccagcagtagaatctgttgatgaaagagaaagacctagagataatttatcgcgtaagaggaccccatcgatttaaatgaatggcatcctggataatgatgcagagcatctctcctgtgtaactccgtcgtctgaccttgtttatctgagaccggaagttccaggataggagtcgtagatatttaggctgcatacgtaatctaggaagagtatagtgatatccgtactttagaaagtgtagttagttatatttaagtgagcctcattcctaagatgccttttttcgttaagtgtagctttcattgtctgttatcgctgtgcgaggtaactatgattcccctagaaggtcgtgccagtaggacatttatgttagctaaatcagcaactttaagatcttgtgggttctctaattcatatgaatttgcgtggtttggtctaatttctttggggctcttctaatttgagtgggagtacaatttttggtggtgaaacagtcaggtggagactggtgcggggaaatgaagggtcaatttgggaaggtaatag

SEQ ID NO: 695457 - DNA, 207 bp, Homo sapiens
accgtccttgcctggacggcagcagccctgtactgccttctccatcatccccagagcgctctgatgacgctgcagccgcagggagggaggggctggccgagggagaggcagcagggaacgtgggtcagggtggggcaccagtggcctcaggtgcggtgcctcagggaaatacatctttagtgaacgccaaaaaaaaccaaaacaaga

SEQ ID NO: 695458 - DNA, 546 bp, Homo sapiens
gttcactctccgtcagccgcattgcccgctcggcgtcggcccccgacccgcgctcgtcctgcccgcccgcgcgcgcgcccgcgcaaatgaacgccaggtgcgtggtacgtgctggctcctcgtgcgtgaccgcgctcatgccatcagcgacgaggaagcccgaacagcactgagctacacgatgcccatgcacgattcttcgcacagccatagatagccagcagccaaccgacaaagcatcatcaaaatatactcaacacaaacaaacctgtagccccttacagataaagtagccacggacagaaagacaccaaccaccaccgacaacatgctagtatgcaaatttgaacccccgggaaaagcctaaaaccgctgcgacatcccaaggcacgtaaccactgagcagcaaaacgcattataacaccacatgctacacacaccacaactaaacaccaaacagcatacgaccttccatcgaaatacgaaacgcactacgaacgaaacactaagaaacctcgccaagcagaatgaagacaggaaacacaa

SEQ ID NO: 695459 - DNA, 225 bp, Homo sapiens
  misc_feature (32)..(32): n is a, c, g, or t
ggcccccccccccccccccccccccccccttngggttcccccccccccccccccgggggtttttttttaaacccaattaaagccttttttaaaaaaccccctttttttttaaaaggggggggggggatcccccccccccccccgggttccttttcccccccccgggccccccccaaaacccaaaacctttttcccccttaaacaaaaaaaaaagttttttgggga

SEQ ID NO: 695460 - DNA, 131 bp, Homo sapiens
ggggggggggccggggtttttttttgggccccccccccgggggggaaattgggaaattttttttttttgggggaaggttgggggggggttttttaaacctttttaaaaaattttttttcccggggggggga

SEQ ID NO: 695461 - DNA, 1019 bp, Homo sapiens
atttgccccacgactcagtactgtttaaaaaaaaaaaatggagcatgtgtattatgtggccaatgtcttcactcttaccttggttttgagcagtaatataccattcctccactgcctctacacatgctgaaccaaatacatcgtgagggggagcgcgagatggatgctcgaattgtcaccactcagaaggatacagcataatgctaagacaagcatccaattcttgatgtaagccttccactgtccagcagtatttcgaggttaccatggatatgctattatgctcataacgtgaatgtgagcgtggtagaattgcgtattgaatggataggcagtcgagcagtacactagaaagatgttgatcgtcattttcatgcattgttaataacaggaatagaccgtgtctctggttcgtactagagaaatggacatatggcgaagtcaaatactaccgcgtagtattcctaagataggggtctcaaaccattttggtaattttgcatttagagttggttaagagaggctttgtgacgactatttagttgagatctaatcttaccagatagcgactggtataaatgattagcgacttgaagtaagtgattgcaaagttgtcaaagtggatagagtgatctaacttaatagctactgactacgtaatcgatgggattacttgcttcagctaacgttgcattaaaccactgagttagctgcctggattacatcagaatgggaacacaatctttcgtcccattgcaaagcatgtaatcgtatatactgtggggattagctccaagtgttggacatcaaattgatgatgttaacacgttcggaaagagcgaacttattcttggccaaggtccagggtaaaggctgcaacaggctgttcacagggttgacacccttggcctcttgacctgattcattgcagacatatatgggccaatatggatcaggggtagctataatggggccgccattactcctggggccctaaaacaataaagggatcggggacc

SEQ ID NO: 695462 - DNA, 380 bp, Homo sapiens
tcccctcctaccccagtccctaaaagaaatggggaaaaaagaaacccccagcaattcagaaaaaaaaaacaagagagagaaattcttattcttattattattataaaacaatattttttttaaaagactgctgcatctttaggaaggatcagaaaccatgctgcccttaaaattcacaacttgtgtgtgcgcgcaagtttagcaacaaacgtacccgtttggcaagccccccctttttttggcctttttgcacgccccttccattgaacaaagatttttcactttcgacccatcctttttcccagttgggaaggggacattcccactatttttcattcatttttgcttttttgaaaaataaaattgaaaaacctccttca

SEQ ID NO: 695463 - DNA, 314 bp, Homo sapiens
attcgcggccgcgtcgaccctcagcctcctgtgcagctgggattacaggcatgcaccaccacactttgctaatttttgtatttttagtagagatggggtttcaccatcttggccaggatggtcttgaactcctgacctcgtgatccacctgcctcggcctccctaagtgctgggattacaggcatgagtcactgcacccagcccactacttgggttttccgttttctttttttcttttttttttgagtgttgccagaactaccaataggtaaaatataatttctcaggtagtctatacaattttccctgccagt

SEQ ID NO: 695464 - DNA, 876 bp, Homo sapiens
gtagttgtgtttacaccgacaaaggaaatgtgctgtcacgggggtttttttagagattccccgcccttttgccggagataccctcggggtctttgcccacatgaaaggaatggtgccgccccgattcatttgaggcctaaatgggtcctcccagaattgcccctttagaacgtctgtgtccgcttcatatgtacacccccctccctcctctcctgatgtttctcgggttaatcggagaggggtaaaactcaaatacctaagagtgtctcgaccacaaactgggaagagtttttttttcttaaatacaccaatggaatggtatacaatgcggtttaaaaccttaaactgtgggactaagatagagaaaaatggaagttatatataagggcgctttttcaaaagtcaaatttggtcgcccataatgtttggagcgcgccccaacacttgtgaagaggtataacacccacaaatattgtctcccacctgtgttctccccctttgattcttctgaacaagacaactggccttttgccccctcttttttgatttcagacacttgtggtgaaaacccgctgtctgaatggggattctataatggcagcatagccctgctctgtgatgcccccttctcccccccaatactgtataaaatcgatgggtgcttgctagtaagttcgaccccccccactctctgtgttaagactcaaagcgaaattggtggagtccccccctcttatgattttttatttttaatacatagcccggtttttgaaaggggatctcccttcccctcgatttttttttttttttaaagaaaaatggggggagaaattaattaaacctttgttttctcccataaaaagaattccattttta

SEQ ID NO: 695465 - DNA, 376 bp, Homo sapiens
ggtggccagggctgggctacatactgggcagtgcaggtctagtcagtgaggtccttaaggtctcgtggttcttccaattgcacagctccaggggccactcctcccactgtgttctgctctttgatgggacagccaagggatatagtgtctctttcctctccatgcttccagcacccaagacagagcctgacatacagcaggtgcttaatacatatctgaacaaatgaatagttgggactgcaggtgagaagtgagggcaaaagaaatgaatttcactgggctctcaagtttcaatttttaatgaagatgtgtaagcacaaagaagcacccaggttctccttctgagtgacaagagatgtcatttaggtgagattaa

SEQ ID NO: 695466 - DNA, 569 bp, Homo sapiens
  misc_feature (39)..(39): n is a, c, g, or t
  misc_feature (112)..(112): n is a, c, g, or t
  misc_feature (125)..(125): n is a, c, g, or t
catctgctggactcctctagctggacctaaccctggtantatagataccaccagagctctgcagatatgcaggtgcttgataaatatctattaaaggaatgaatgagtcatntgctcacagtttntacagctcttgaagatactgcttatagagtatgtggcaatatatggatacattataatgttaaattttaaaggcactatatatggaattatctccaagtaatattgttaaattttaaaaacaaggaacaaaaacagtgtacacagtaggctatcattttgtgaaaagataagctctgttggcaaaagaatatccatacacatatttccttgttaatgggtaggctatctatggaagaaaacgaaataaactggtaacagcgagttagggtggaatggggggcaaactgggggactaaagatactgataggaaggagacatgttttatttttaaataacccctttagtctgtttttgaaatttgtaccatgtatatgatacacgttttgaaaaataaagcagtctacaaaacggtatgcagttgtatgaaaaaaagttaggagtt

SEQ ID NO: 695467 - DNA, 708 bp, Homo sapiens
taagtcttaaggcatcggctggcgggtgtcgggcccggggaacagcgaagaaccaagattggctccaacgtttggcccggtctctggatatgtgactggacgtgaatgatgcttcattttgggcaccccctttcccggctcaaggtagaatggttaaccattgaaaaaaatcccttcccaatcagaataacaaccacagggacaacgaagaaaaggagtaaggggagaagaagggtgaacagctggaagaagtctttacaactctctgcgggtcctggtaaacgcgctcatgttctgggtatggaagggacttaagaattcaggaaagatcaaaataacggggctcttccccactccctcggcctccctttcccggtgctggggggttaaggaaggtccgtggaactccagcactctagaaggatcgggtgaagcgcgaaggcttgcgggcgggtgaaaccaatgtggggtggaagggtccaaaccggccaatctgaacccgaaggctggtgagaagcatggggggcttgggataattcccgaatgacggtgtgcggttctaacctgtttggggccttctttccccaaaatttgttatcttccaaccggggggaggcccccagaatccttgtgggccagggcgggaccgagctgggattcagagccttgtgactcgtcgggccggtccctaatgtggaccgttgccct

SEQ ID NO: 695468 - DNA, 240 bp, Homo sapiens
ctatagcggatccccctgctccgcccctctctgctagtgagcaccgctagagctttcgttaattcctgagtttccagaaacactgagtgcagcttccgttagacttgctctctagccaccgccgctgatgatgattgggggctgaacattcctagggtgggtccctaggcctagggcctgacagggctgagtgtcatagggagttacaccttgaggggtggccaggcatgatgtacccca

SEQ ID NO: 695469 - DNA, 126 bp, Homo sapiens
gtatagagtaaggagccgtggggatctgtacatcttcccacatcctaccatgccctgaggcatggatcctcactatctctgacgcctccatctgtcttatctagtaacagtgcagagagatagaag

SEQ ID NO: 695470 - DNA, 832 bp, Homo sapiens
gctctcgccgcatgctgctggagcctgaagcagagaaggcagcgggtccgctgagcgtcccgagagccccgtgctcccgaccagtgtggcggggtgcgtgcccgtgggagtggctggggcaggtgcgggtggaagaaagggggtttatgtgctgcgccgggagggacgggccctcttccgaatgtctgcggacccaggctctcctcacgctcgcgcagtctccgacgcagtctcagctgcagctgcaggactgagccgtgcacccggaggagaccccacggaggaggcagacaaacattcgcagatgccgcgacaccaaacccagaacctggcctgccagcatggcccagactgttacctagccctgatggcagacctggtcctgtgccaggctcctgcagactttagcagatgttctggaaggagacagctcagaggaccgagctatatatcgcagtgcgcatcgcgggcgacagcaccactgcagggcgtggcatcggacggcgaccatcaacatcaccttgaccagtcacaaataacctgcgggacacccgggccgaagccgacgggactgtgacatgggactcatccagcgggattcaagatggaattacgcttgataccgagggccaggaaaggccagagggtgcatggatggcgccggagacggtggagcggtcaaagggtgaacagaaagggcctaaaccggatcccgggatggaaacaagacctgcggtaaccacagagaatggctgacaccggaccgagtacccctgggacgcagcgagagcatggacccgaaggagtcagggtaactaacggtgagaggaca

SEQ ID NO: 695471 - DNA, 335 bp, Homo sapiens
agcgggtgcgtagtggcacgcacagcagccgcagaccgcctcgcgcccggtcccgcggtcgcagctccagccgcctcctccgcagcagccagcgcctcagctgctcgctctgtgggtcggtccatctccggcacttgggcctccagtaccgcgtcgctcacaagcccttcaggttcgttccactagtgtactcctcccttctccggccagaaccagatacccgtcgaagatggtggaccgtcgagacacactggtgcacacaagcccgtgcctggtcgagctcacgacggacgcgactacgaacgatcattggcccgcaggccaatgaacaaacg

SEQ ID NO: 695472 - DNA, 276 bp, Homo sapiens
ggaattctcctgagtttcatttttgtgactggtacttgaagtgcatcagatgattaacttcatgattagagggctatggggtggtgatatagacatatatggaaaatgggatacccacattaagcagggtgactacctgtataccatacaacccagcacaagaaccacatgtagttcttgtgctggttattaaagagaaaggatatataaggacagaatggaaatgatggcccaaaattaaaaaaaaagggaagtttttccgaggaaaaaaattcc

SEQ ID NO: 695473 - DNA, 194 bp, Homo sapiens
atcgttcagagatcacctcactcattcacatgatagaaactcttctttgatactcataatgcttgatcattatgagagtgttattatgaaagagggaaatatgttcagctgcttgaagaaaatgaccagaaatacattaatattaaaataacgctctcggctgggcgtggtggctcacgcctgtaattccagca

SEQ ID NO: 695474 - DNA, 276 bp, Homo sapiens
ggtctgtgagaaaaaaacacccatggaagaagttacagagacaaaatttgcagctgagatgaaagaatgggcaatctagagactgccatatctgggtatccattccataatcagctttcaaacgctgacaccattgcatacactagcaagattttgctgaaaggacccagatattgctgtctcttgtgagattatgctggggcctagcaaacacagaagtggatgctcacagtcagctgtcgacgcgccgcgaatttagtagtagtaggcggccgc

SEQ ID NO: 695475 - DNA, 802 bp, Homo sapiens
  misc_feature (1)..(1): n is a, c, g, or t
  misc_feature (670)..(670): n is a, c, g, or t
nttgggggtcgccatcttttgtccacctagcgcgccgacttgtgttggtacaatccaaattcggccattatggccgggggacaatgtttttttatatcggtcaaacgtcgaaggagacagtagcctatgacagactttccccaaaaaaatagccaaaatgtacaaaaccacaccggatgtaatctttccttttggatgcgaagctcatttaggaggtggcaaaacaattggcttagacttgatctatgttttcctgggtcatgcggtgaaaaatgaccccaacatagacttgcaagacaatgcctgtaagataagaaaaataccgtaaagaaagtcactaagggaacgcaggacctgaaagaggaaagttacggagactacaaaggccaatgcaggtcctatcaaaaagcggcctggaaatagaaacacattcgaaccagtaaaggtgctgtaaagatggaaactgtggccacttggcgttttacccaggaccatttttagcccaaaaataataaattggaaaatttatttaccatgcttggggggtgccttcaaaaataattatagataagggcaatttattgcacgagtgccccatttcaagaaaacttggggaaacttgccaaagggggggaaccccccaattgacccggccgccgttttaaaaaangggaaccggggaaaccttgccttacccaaagaaaaaggctggaaaaaatctccctttaaaaagatggcgaaataaaaaagagagccgaaaaaaaagccctttaaaaagagggggagcccggttaaatatggg

SEQ ID NO: 695476 - DNA, 259 bp, Homo sapiens
attaggcgcgttctgcgtagcccgcgtagcgcaggctcattgccaaacatggctggtccagcaggtatgggcacatgtgctcatctccgcctcctgcgccaacatgttcttgggctgccactgctgccccttgagcatagagccatcttgccaatcgtggacatgttcactattgctggtttgttccatccagagcaaagggggacaggtgacatgaatctgccagcatgcaaacaacgcctgtggacatttggtcttg

SEQ ID NO: 695477 - DNA, 484 bp, Homo sapiens
  misc_feature (111)..(111): n is a, c, g, or t
  misc_feature (178)..(178): n is a, c, g, or t
  misc_feature (189)..(189): n is a, c, g, or t
  misc_feature (239)..(240): n is a, c, g, or t
  misc_feature (292)..(292): n is a, c, g, or t
  misc_feature (384)..(384): n is a, c, g, or t
tcagtcgacatacggttgacataggaaagctgtggaaagcttgtctgagaaggagtcagtctctcggccctctcccacccagtctggttcctccctggaaggtgacttggnagcctgcccttcggtgggggactgtcctaaacggaaagcagtgcacggcatggccttcactccagcntcctccttatnttggccccagagcactgggaacctaggaacagacacaggagggagggaannggatccacttggtggctgaggaacctggatgctcgtgaccctggggcgtgcnctccaagcagggctggaggttgatgtcgggaatgagtgggtcttcagtggtcgcccccatggctaggactttggcaagaaatccacctaagntcatagaacaccagagaaagcagtggggaggcccttattcactgtgagtagcagaaacattgtccaagaagggacctacagcatcaggtgtgggtaccag

SEQ ID NO: 695478 - DNA, 81 bp, Homo sapiens
cccgaggacacggccgtatattactgtgcgaaagccctttctggcgattataggcactactttgactactggggccaggga

SEQ ID NO: 695479 - DNA, 621 bp, Homo sapiens
atcgaaaagcaggcctaaaactcaaataaatagaatagatgcagagaaaactcgagctgcagctgatcaaaaagcaaggccataaagcccaaatgaatagaattgatccagagaagactcgagctgcagctgattgaaaagcaaggccataaagcccaaatcaatagaatagatccagagaagactcgagatgcagctgatctaaaagcaagtccataaagcccaaataaatagaatagatccagagaagactctagatttgctaatttttccaactccacattcagctactggtgttattgttcaagagcaagatcttgtagaatggctttttcttccacatactaattcatggcctctaactccttatttggatcaaattgctactatgataggaaatgggagaactcggattgttaaattacatggatatgatcctgaaaaaattgtccctctcacgaaggcacaaatacagcaagattttataaatagtcttacttggcaaacccatttagctgactttttgggtattctcgataatcattttcctaaaatgaaactgtttcaatttttgaaattaactaattgtattctccctaaaataactaaaccaattgaacg

SEQ ID NO: 695480 - DNA, 295 bp, Homo sapiens
aacctgtatcccgatcatccaagaagagcgaagaacacgcgctcccagtacacataaggtctaccgcttctagacacagagatggcccatacagctcttaactataaaaaccagctgctgtgcttccattctgagtacagaacacaagagatgccaacaataatgagaccttctactaccaatagatcctagctaatcaaatatacctcaaattaataaaatgtataaacatttatactcatttatatgttcataaattcgcggtatatttcatttttctatgactccctggccc

SEQ ID NO: 695481 - DNA, 309 bp, Homo sapiens
cgtgacgcgtaggatccagcaacagggtggtggacctcatggcccacatggcctccaaggagtaagacccctggaccaccagtccccagcaagatgcacaagagtgaagagatgagaccctcactgctgggtgagtccctgccacactcatgtcccccaccacactgaatctcccctcctcacagattgccatgtatgaccccttgaagagtgggacggggcctagtggagcctgcacctttgctcatgtaccatcaataaatgtacccatgatgctcaaccaaaaaaaagaaaaaaacatgtggcgag

SEQ ID NO: 695482 - DNA, 271 bp, Homo sapiens
ccccccccgggtttttttttccccccctttaaggatgggggccagggccctggggcggcccattgttttttttttttccccttttttttcccaggtttgcccccctttttccccccccggggggggggaaaacccttttttttttttccgcccccgggggggggctttaagggccccgtttggttcccccccgttttaaaaccccccggggccccccccactcctggccttttttggttttcctttgttccccaaaccccaatgggtttta

SEQ ID NO: 695483 - DNA, 170 bp, Homo sapiens
gaaagtttctgaacttagtgatgatttgtgctttttcaggacaatttgtggtgccagcacttaagcgataaacatccccctttaaatagagctgatcgggttttattcgcaggcggcgccgccaaaatattagggggcggaggtgtatttttcctgttaaccttcctcca

SEQ ID NO: 695484 - DNA, 1975 bp, Homo sapiens
  misc_feature (1810)..(1810): n is a, c, g, or t
gtgctgtgcgcgggtggcctctcgatgctagtacgtaggttgcgcggcggtgtatggttctgctgagagcgccttgataggccgtatgttagcagaggggcggtgagtagctacatagagagagttgtgtagatcgccgagcataggtgcccgcgtgcagacgcagagtcctgaggatgggcgggcacagggctggaagggggtccgatgggtggggatgaggaggatcgggggtgagaggggtcgtggtgcccgggcagtgtagatgtctttgttgcgggttatgtgaggggccaagtgaggcacagggtcgtaagtgaatgcacgggatagtgcgttgtagtcgtgccaggtgataccggtcatctcggtggttatgctacccgtgagagcgagagttgaatgcaggcccactcctggggagtaaaattgttcgcaccggtgggcgcaccaaattgtgttgagctctggaggtcgccggagggggtctgttaaccgcgtggcgctgagtggaacggaaaggtagaggttgagtagaggggcggggcgcgttaatgtgtgaggtgtgtgcgttggctggagtgaggaatttagagtgttggcgagtagcgttgttgtcaaaccgaggtgccgagggagtgccctgatgtagattgaggtattgcgttgtggttgggtgagaaggggatttgggaaggtggttgaggtgattggggtgttgatgttgtcgtcaatgtggggggggcctgtatagtaggtgttgtggtgttgttgcggggaagggtttaggttgagtgggatggtgggtggtgtatgtatgtcgtgtttatggtctagtattagtgtaggtctgcgtttaggtgtgtagagtagggtggtgggggtgttttgggagggggtgaatgtgtgtgatggagatgagggatgtcgacgtttgggcaaggtgagtgttgtggaagagtagtggggtgtgtatgtagtttactaaggggttgttaagttgggtaggaagtgtgggtatggtgtgaatgtatgaatggtgtctttggtttgtgggggtgccatgggtagtatgtggtcgtggttgtggcggtagaatgtgtgtgctaagggcctgtgtttgtgtgttgtgtggtggtagagtttgcgtggtgtcgttgttgctattgattagtgtattagtagattgtgctaggaagtcttttgttcgttggactgggaggtggtgtggtgtgtagcgagaaggagtagttatgagtgtgtggtgttagtagattggtgtcctagtggattattatgataaataattgtggatgtgcgtgagggtgcaggggctgtgttggcaggccagtatgtggtcagaagtggtgctgtttgctagttggttcgttcgtgttttgatgtgggttgagttttgcgtgggtctgggcagagaggacgctggagtgggagtcaggcgtggtggagatgatgtagtgtgcctagcgctgtagatgatagggcgagagtagtgcgtggtcgccggtgtgcgtgtctcgtttgagagggatgtatagagcgtagtggcgtgtgcgttgtgtgtgtgcgtgtgcgtcggtgttatagcgtcgtgagagaggaggtagtcatgtgttaggagagtgcaggaggcgtgccgcgctgcccgtgtgcaggaggtgtaggtggattaagctgcgtggaggttgcgtgggtgccagaagtcgatgtgtgcagcgtgtgcgcagtgtgtgtgcagaaggtgtagttgagaggtcagagtgcagtaggtgtgtgtgcagaggtgtgtagnatagtgtgtagtgttcgttgaagtagttagtgagccagagatagttgttagtgcggcttagttaatgttgtgtcagctgtagatttgttgtttaataataatgtaatcatcgagatgatgcatattgttacactactattaattttaactccagggatcagtgtc

SEQ ID NO: 695485 - DNA, 274 bp, Homo sapiens
ctgcagcacacatatcatctaccactctgatgacacgccagcttcccacctcatccaaacttgcacagcactgtttacaatagctatattatagtaaaagacataatgaatcaactctaatacatgagtttgtattccactagatcatgaagtcatccagcacagggattatatctcggcacctggcagagatcacagaccaaggaggagctcaatcaatgtcccttgaagtacataaaaatacaaatttatctagctgtggtagtcttctacg

SEQ ID NO: 695486 - DNA, 541 bp, Homo sapiens
gtactgcagctcaagaaagcaacagaatatgcatcctcacatcatcatatgccacatactctaaaatcaagccacataattggacataaagcaatcctcagcaaatgcaaaacaactgaactcataccaaatacacactgagatcacagtgcagtaaaaatagaagactaagaaaattgctgaaaatcatgcaattacatggaaatcaatcaacatgctcctgaatgactttttaataaataatgaaattaaggcagaaaacaagaagttctttgaaaataatgagaacaaagttgcaacatactagagcctctggacatagctaaggcaatgttaggagggaaatttatagcactaaatcccacatcaaaaagttaggaagaactcaaattaataacctaacatcacaacggaaagaactagagaagcaagacaaaaccccaaagctagaggaagacaagaaataactgaaaatccgagctgaattcaaagaaaccgagacatgaagaaaaaaaaattccaaagatctacgaattcaggg

SEQ ID NO: 695487 - DNA, 546 bp, Homo sapiens
  misc_feature (402)..(402): n is a, c, g, or t
  misc_feature (502)..(502): n is a, c, g, or t
taaactttccctttttggctgtctagtcatcctcgtcggtctactgcttctgggtatcgacattcgtcatcctcatcatcttcagcgtgcccgcttggcccgtagctgactcagcttcctcatcttcagtctccatcctcttcctcaccatcagccttcttcttcctcctcctcttcctccccacctttctttccctcttctgtggcggtctataccctcattgtggtcagccctccgtggctccccatttttccctcattatagcatttcccggtatagcaaggggggcgtcttctttcacattttcgtgccctcttccaacaagcttctcctttctttcctcctttataagtctcctgtgggtggtgtgaaatttgcgaagccgtgggtgttctatacgngctgtggcgtatctgtgacatgtggtgtgggtccacgcccgggtgaactccgatgtgccagggggaatatacacaaagaaagagccgagaagttctcagnggagacctcgtgggcgaataaaagcgtgtccggaagactccggc

SEQ ID NO: 695488 - DNA, 375 bp, Homo sapiens
ggaggcgtctagaggatcccaggctggcggaagaagagcataggaacaagcatgagctacctgaacgggtgcgcggggagtcaaggcccagctacaagcagctgctccagcatccaggaggtccggcggtgcacacgggctgagatgcctgacaacctttacaccttggtgctgaaggtgaaggaccggacagacatcatcttggaggtgggagacgagcagcagctgaattcatggatggctgagctctcggagtgcacaggccgaggcaggctggagagcacagaagcagagatgcatattccctcagccctagagcctagcacgtccagctccccaaggggcagcacagattcccttaaccaaggtgcttct

SEQ ID NO: 695489 - DNA, 199 bp, Homo sapiens
tgtggaggctgattgagacggtgaccagaattccctggcgcacagggtccaaagtagttatgatagtaagagccggcatggtggagataagaaggcttgtgatggaggccagaggtggcctctgtggaggagaacccggtagtgggcggggcagggccggcctccttgcagcccactctggtgctcccagacaacacat

SEQ ID NO: 695490 - DNA, 738 bp, Homo sapiens
  misc_feature (572)..(572): n is a, c, g, or t
  misc_feature (594)..(594): n is a, c, g, or t
  misc_feature (608)..(608): n is a, c, g, or t
  misc_feature (637)..(637): n is a, c, g, or t
  misc_feature (639)..(639): n is a, c, g, or t
  misc_feature (645)..(645): n is a, c, g, or t
  misc_feature (656)..(656): n is a, c, g, or t
  misc_feature (666)..(666): n is a, c, g, or t
atttagcatctattattcctggcagtgccttttaagattactagtcaagagaaaagattttcctcatttagcttagcattttgtgagctgccttggacagttatagtaaaagcttcagtggctttttcagtatagtaaaagcttcactgtatataacaaactttgctggtacttggtataaggagtagataaagcccttcagcttgcttacagtggcttgccatcagtagcactgccttgcagatacccgtttgacctcatcttcctccactgacccagttttctacttccaacttttctaatacagcttgcaacctctggcataacttcagaccttggccattggtctcaactgtttgaaaacctaaagattactcacccatcacgcttagttttgcagcatggtagggggaatgggaagtaaattcttcttaaaaaatttttttatgttgggctcggcacgatgctcacgcttgtaatcctagcattttcagaggccaaggtgggcacatcacttgaggtcaggagttcaagaccagcctggccaacatggtgaaaactcatctctaccnaaaaaaaaaatacaaaaattanccgggtgtagtggngcgcacctgtaaacccacctacttaggangntgaggngggagaattgnttgaacccgncaggtggaggttgcagtgagctgtgatcgccccactgcaccccagcctgggtgacagagcgagactccgtct

SEQ ID NO: 695491 - DNA, 627 bp, Homo sapiens
gacagcattatgtctcatgtatagattgatcagcaggaacatctgaatgtacactcagccccatgtaatgtggatccataatttccaaatgtcatagctcttatagatgctgtctatctatatccatgctatgagtcgctgtacagtcgagatctcgcaagttctataacaggtaggtcataccatgctccatgtatcgagccatctaatccccaggcttcatgctatacataataactgctagtaacgcgtaaacagctattagatcttctgagactagtagccaaacacatctactatcaagatacacaatggatctacatatcattcgtctcactaggtaaacactggtatataatccctaatagacagctccattatgatagaatactgtcaagtgtaactagaagagctccatatactcaccatcagtctgtgcaggatttattcctattccatcattggtaataattgcacttgatgcagcagtaactttaaattcttatgctgcaaacgttaagactgctgtgcaaggtgtgctttcagcatctctgagtactttgtacgtcatccgtgggtcccacgtcagcgtgatcgtaaaggcaaccttggacatggtggagccgg

SEQ ID NO: 695492 - DNA, 146 bp, Homo sapiens
tgcatacggaacaggacgacgcctccgggacgggcaggctgcaagtggctcctggctcccaaaccaggacccgtactggacagaccacagacgacggtcactggcacacagcatgacggcccaaccacgcatgcacggtgcacgcg

SEQ ID NO: 695493 - DNA, 139 bp, Homo sapiens
ccttcagggctaccgattctcaagccttgctcttgcagcgcactgatattcaggatgcaggagaagagtactttgcaattaaatcagaataaaagcagttttttccaaatctgaagaataaaattgagctaatggacag

SEQ ID NO: 695494 - DNA, 230 bp, Homo sapiens
gaaatgggggtggaatggatcacagccaagttagagcagagagatggtagataagacgtgagtgacagcacggtccagcctactcagcgaagaccgtgggtgaattagcatggcacttcgctagatgtctttatccaagtcaggaggaaagaagtggagtgggccacgatgtatgtctcccagggggtcggtacaccatggtgttttcaaggctgttttcaaggcacatt

SEQ ID NO: 695495 - DNA, 320 bp, Homo sapiens
tccaactccagaggcctgccgtgttttctggagcaggtctgccgaatgcagcctgccgtgttttctggagcaggtctgccgaatgcagcctgccgtgttttctggagcaggtctgccgaatgcagcctgccgtgttttctggagcaggtctgccgaatgcagcctgccgtgttttctggagcaggtctgccgaatgcagcctgccgtgttttctggagcaggtctgccgaatgcagcctgccgtgttttttggagcaggtctgccgaatgcagcctgccgtgttttctggagcaggtctgccgaatgcagcctgccgtat

SEQ ID NO: 695496 - DNA, 155 bp, Homo sapiens
atcccccagttgtcgcagtgtcggtgatgtctgggaggctcggtggacatcaggcgcagacggtcagctggatggccacatcggcatggtcggagccctggccgtcatactcagaattgaaatcgcatctggtcatgctctcgccgaaccagaca

SEQ ID NO: 695497 - DNA, 114 bp, Homo sapiens
caaatatgaggatcatggcgagcagaaccggaaggatgctgaagcctggttcaccagccggactgaagaattgaaccgggaggtcgctggccacacggagcagttccacttagg

SEQ ID NO: 695498 - DNA, 773 bp, Homo sapiens
  misc_feature (656)..(656): n is a, c, g, or t
ggcgtgagcagctgcagcgcagaggcagcatccagcggcggcgccagcagttccagtccgttgcttactttttgcttcaccagaatagtcattatgccgaagagaaaagtctccagagaatacgagagggcaaagatgggttccaaagtaatctaaacaggagcccacaagagggttctgccagatttgtcagagaaaccttgttccacaaaaaatgtgaaacaaaacaagaaaaaaaatatctgttaagaaaagaaccgtggagcaaaagtattagcagaggtgctaacgggaagaagggaggacaaagcaggaagttggaaaaggaggcacaggaaaatgattcttgtagataaccgagggagattgagtggtcattgaaaaaatggggggtggatttatgtattctctgtggaaaaactttttaaaaagctattttttaccaatgttatttgggtaaatgctattttaggactctactagtgggcatacgaaatatatcacggatggaccatttatcgtctcatagtcaatgctttggggaaatttacatcatcctcagtaaaataaatatcagttaatattggaagtgtgtgtaagatggattcagaactcatgccttgctttaaaattagtcctgggcatactgcgcggtnactgccatattggatttcatgcgcttctagaccaactacggcttgacctaggttactgtgtttatgacctggttgttgtggcctgtgctatgggcttaacaaacgctcttgttcccc

SEQ ID NO: 695499 - DNA, 272 bp, Homo sapiens
tacacaaaaattttaaagaatagcggaggttgcggtgagctgagattgtgccattacactccagcgtgggtaacaagagtgaaactccgtctcaaaaaaaaaaaaaaagaatagctggggttggtggtagcacgtgcctgtagtcctagctactggagaggctgacattggaagataactttgagcccaggaggttgaggctacagtgagtggtaatctccccactgtactccagcctggtgaaagagcgagaccctatctccaggaagaag

SEQ ID NO: 695500 - DNA, 84 bp, Homo sapiens
caggtacagctgctcgagtcaggtccactccacgccgaggatctggcgggatcactcaacaagcttgggtcaccgtctcctcaa

SEQ ID NO: 695501 - DNA, 158 bp, Homo sapiens
tacgaggtcttaaggcagtgagccataacattgagtttgcctgagcttgcacagttacagagatgaacagtgatcactgcacagacatcaggtaccaacaggtcaactggcactgcacaggacagatgctatcacatgaccgttaggtgcacccattg

SEQ ID NO: 695502 - DNA, 101 bp, Homo sapiens
tggaataaatgtcactttttggaggcaaaagaaggaaccgtgaacttttaaacacccttttcttgggggtaggctcttgccccaggcgccggtcttctccc

SEQ ID NO: 695503 - DNA, 2379 bp, Homo sapiens
accaggacactcttactgtcacaaatcccgcccaagcactgccttcccatccatgccctgccgggagcaccccatcatcctccccattagctgcaggaacggactttggcgccctcagcacccctggctggctcccagcgcacttccacgcctgccctgccctgctgcgctgcgcgcgctaccgcgcgctgcggcgctacgcgcgcctgcggcactgcgccgcgccgccgcgccacgcacgcctctcccccaacgcgcacacgctccaccctgcgaatcccctccggccacctccaagccgaacttacttctccaagaacacagcttgcccctacccactctccaagcctatcccttgccaccaagcaccccttcaccccactccccatatctacaacccggcctgaacaacaactccccagaacggaaaaccaaccatcccttctcccccttctccccaaggcgcggcaacccaaccgccaacaaccccttggcacccccagttgccctacacaccaccaacctggcgcggcccggccccaaacgccgcaaccttggcccaaaccacacttctcaaccaaacgaatcccaaaccccctcctcaacattctccccaaccaccaccgcccttgccactcctcgccccgcagacttactcatcaccccacccccgttaacacacaacccctttgtcaatccagttcccaccttggcttccactcgcaaacataaacacaccttccacaccaccctacttcccaacccacaccaaaaccccctcccacttaacctttactaacagcggccttacaacacgacggaacggccggacccatttaggtagcccccacaaaggcaggcgtcgcaacacaaacgtttggcaaacggcccccctggcaaagcgcctcggcaaccccgtttacctcccataaacagacactaccccctcttcctccccatccctccccgctttttggtcacttaacacccgccggccaaacaggcagcggcgccatgacagttgggccatactactcatggacgccgcgccaaaccgcgcatatactcggggcccgcaccccaaacaaacacctttgctaccccagcagacggaccatactccctaagtattggctcgcgcgcgacaccaacacgccgcaaaccgcgcaaaaccagacacggcgagggcgcatttctatacttcccctaaacaacattctcccccccccgtggcaaacctgcggccacttttgggactaccaacccgcccaacgcggcgcgccccccgctcgcccatataccattctctgtggatcccccacttccccccacttattacacgcgcgatcgccccccccctatgtgatcagtcgctcgtaccaaaacgccagtggcctcaaccgtacgccggcgacccccacttatcgccgtccaacaactaccccctctgttctagggtcccttccccgcacatcctttatccgcctctctcctcctatggtgctaccccgcccccccatactatcaatggtagccgcaagccccacgctattccctaaatagtaagatcctcgacaacccacgacaaactcggcaacgtaacccctagaaccagattatctttccaccacccaaccacgcctctagattataacaacgctagccaaaaatccacactgctactctttaccttagacacccactcgactaggagatccaacctacaatcctcactttactacctaccgcatattaaacgcatcgagtcgtgtcaacttcctccaataaaccccccctcttatagcccccattggcaacattcttcatcccaacacgcaccacaacacgcgctacacccttctccctcttataatcactctaccactccccaccctcaagcaacaatcatccatacctatcgatcaccccacaacccccaaccaacccatcatccctatgccgctcgacaccaccatcccctcacactagcacacaccaccaaaaaacagcctgactgcccccaccaatgactcatcaacaaccgccccacaccacctaccactccgccccctcccctcacccacgacacacaccccaccctatcccccaacaacaccgtccccatcacatacatcctttgagcgcatcatccgcaccacaacaccaaaccgtttcctccacaacaatcattcataccgagaccgacgccccgccttctcgcccaccacctaccacatagctttttcgggcgcacaccgcacacctcccctctatgggaatttcagaagacaaatccacctgttatcaacacgcccgaaataacatccacctccccgcccagcagacaactcgccatcaccctctagctagcaacacacg

SEQ ID NO: 695504 - DNA, 109 bp, Homo sapiens
cattcacaaactaaccctttttcaagatggggtggggggtggaaatgcagtttacccatgtcctcaaaataaagttttggtaaaaataaataaatgtcctttagttata

SEQ ID NO: 695505 - DNA, 219 bp, Homo sapiens
gccagagcagaaaagtatggacaacgctccatcacctgaatgcgccagtctgcgtcctagagagaagcttgcagaagcctcccaacttcaatagcctctgcagagggatgatgactacagcctctggagcatcctgcttgagaaaacttaatgctgtcagtcgaacttactcgtttgtccagccaaaacctgatgacagtcagataggcccgtggcacc

SEQ ID NO: 695506 - DNA, 1006 bp, Homo sapiens
ctgaggcaggagaatggcctgaacccaggaggcggagcttgcagtgagccgagatagtgccactgcactccggcctggtgaaagagcaagactccgtctcaaaaaaaaaaaaaaaaaaaaaaaaaaaaaaaaaaattttgttttgggggaagggggggtttccccccccgggtccccttttgggtggccctattacgagggtgagacaactcccccgccaaatattttcccccccggataagagaagtatctctttattcttcccaggtgtatcttcgtgggagaattttagcccttcccaggggtgaggcctcccacataagagaatttctgttctgctcttctttatataaacacggggatttacccccatcgttgtggcaccccgggcggcggtgttgtcacgaggggggccaccaaagttggggaaactccaccaggtgcgagacgatagaaaacccctttgtgggggcccccaaagatacgtcctccctccggcggattataaagccctctcctcaaaagtcaacatggggggcgacacataccagaatatttttgtgcccccacttgtgggggggaacaccattcttctaataaacaactcttgtgcaacaaaaagtgggggaatctctgtggaaaatatattgtggaccaaacaagggcgggattttgagaacgctttttagggggccccacaggcgaaactaccctttgcggggacactgacaagcctcccccaaaacgttctctccggagaagtatcacccccagacagctgagtcggtctttgtagcaaaaaacattcttctcaacgataatataactcttgctcgcgcgacccaatatcagaagcaggcggtgtaccacatcctatatatgttccacacaaggtgtgggcgctcacacgaagacaactcttcactactagtgtggccacccattaccctttctaaagactcagtttcttctaaaaaaagaggcggggccatgctgggacgcgttt

SEQ ID NO: 695507 - DNA, 434 bp, Homo sapiens
  misc_feature (70)..(70): n is a, c, g, or t
  misc_feature (137)..(137): n is a, c, g, or t
  misc_feature (239)..(239): n is a, c, g, or t
  misc_feature (374)..(374): n is a, c, g, or t
  misc_feature (401)..(401): n is a, c, g, or t
  misc_feature (427)..(427): n is a, c, g, or t
atcaaacagagtggaatggaatggaatggaatggaatcacactgaatggaatggagtggaatggaatggnatggaatggaatgaaatggaatggaatggaatggaatcaacccgagtccaattgaatggaatcgaangaaatggaatggaatggaatggattcaacccgaatggagtggaaaggaatggaatcaacccgagtggaatggcatggaatggaatggaatgcaatggaatgnaatggaatggaatggtagggaatagaatggaatggaacgaaatggaatggaatggaatggaatggaatggaatggaatggaatggaatggaatggaatggaatcattccgagttgaatagaagggaatgtattcnagtggaatggaaaggaatggaatcacnccgagtggaatgaaagggaatggaanggaatgg

SEQ ID NO: 695508 - DNA, 122 bp, Homo sapiens
ccagggctgggcgcagcctagggagagccccctatcatgcccaccacccactcgggcatgggttcatccttaacctatccccttccaccctcctttgctggcttaataaattctgcacttgg

SEQ ID NO: 695509 - DNA, 408 bp, Homo sapiens
  misc_feature (70)..(70): n is a, c, g, or t
  misc_feature (137)..(137): n is a, c, g, or t
  misc_feature (239)..(239): n is a, c, g, or t
  misc_feature (348)..(348): n is a, c, g, or t
  misc_feature (375)..(375): n is a, c, g, or t
  misc_feature (401)..(401): n is a, c, g, or t
atcaaacagagtggaatggaatggaatggaatggaatcacactgaatggaatggagtggaatggaatggnatggaatggaatgaaatggaatggaatggaatggaatcaacccgagtccaattgaatggaatcgaangaaatggaatggaatggaatggattcaacccgaatggagtggaaaggaatggaatcaacccgagtggaatggcatggaatggaatggaatgcaatggaatgnaatggaatggaatggtagggaatagaatggaatggaacgaaatggaatggaatggaatggaatgaatggaatggaatcattccgagttgaatagaagggaatgtattcnagtggaatggaaaggaatggaatcacnccgagtggaatgaaagggaatggaanggaatgg

SEQ ID NO: 695510 - DNA, 433 bp, Homo sapiens
  misc_feature (1)..(1): n is a, c, g, or t
ntgacaaatctgacacatccatgataaagttgcctgacagtctttcaccttaatgattttagtggttgaatcattgtcttcatctttatttcttttaggtgctgcaaaacagtagtcttttcaattctgtcactccttctacgatttattagctgaaaatctataaagaagagcttctgacagggtgcagaggttcacacctgtaatcccagcactttgggaggcagaggcaagtgtatcacttgaggccaggagttcaagaccagttggccaacatggtgaaactctgtctctgctaaaaatacaaaaattagctgggcgtggtggcgggtgcctgtaatctcaactacacgggagactgaggcaggagaatcgcttaaactcgggaagtggaggttgctatgagctgagatcacaccactgcactccagcc

SEQ ID NO: 695511 - DNA, 133 bp, Homo sapiens
  misc_feature (103)..(103): n is a, c, g, or t
gggagtagctctgagcgccggctgtgaggaaggaggttctgggcaagctatagccatggctgtggctgtagccatggcggaagtcctaatcgggtcggttccnggccccgcggaggatcttgccctactcgag

SEQ ID NO: 695512 - DNA, 169 bp, Homo sapiens
tcaaaaggaagacataaataagacaggaatagcatatacctcacaggtattctacaccaaagaacacatcaatcgaaacctggaacacatatcatacacaaaacgcctgagacctatctattactctcatctgatacctccctgacaagcgcctatagcacacgcgact

SEQ ID NO: 695513 - DNA, 349 bp, Homo sapiens
tatgacgtgtggaaactgcaaacaagtaggccttttatacattgatatcttttcccaagttactggatattaaatctgtatgtatctgtatgagtgtttgcctctaatattctcagtgtgagctgctgtgttctatccattgcaatattgtatactcgattgtgtatagaagaagctggtgagagtgccctcctacataaataagcaatcgcagtgttttgcatgcaaaatataaaaaatttaaattgtcctgattctattttgtaaatggagaaacaatcatatctttctaagcggtaatggaggaagactagtgctttgtgcattttgatatatttgagttcatttt

SEQ ID NO: 695514 - DNA, 111 bp, Homo sapiens
atgccctcccctccctatagccccatggtggggctaggctggggctcacccccagtccccagcatatttgtatgtctgtaattaaatatgttaaaataaagtcattatcgg

SEQ ID NO: 695515 - DNA, 290 bp, Homo sapiens
tgaataaatattaaacaactgcagagcacctctgtacagctatgctacgaactgtaggtcgtgcagagcagattcatggtcagggactttttatatgtagctgtcgctggaagagttcggggagggggagtgcttgctggtattgactcagccatgataaaaaagcctttcctcgagcgaacatggcattggagttggcgctcccgagggggaaaggcgtaggctcggcactcgccgagcgaagcacatggtgcatttcgcgacgcgtgcataaggctgactcttctgca

SEQ ID NO: 695516 - DNA, 661 bp, Homo sapiens
cggtacccgatcacgctggtcaccaggaaccacattggccaaccttctctccggtcaacaacgggccacctccccactacgagatgctccaggaggacaggaatggctattctgggggtgccccacaaccggcctcccccgatgtcccccgtgatgccacatccgcagcgagacctccgtgcctgacccagtggtctggtcccggtcaacaccctcttcaaggacacctgctgcctgggcttcatagcaatcgcgtactccctgaagtctagggacaggaagatggttggcgacgttgaccggggcccaggcctatgcctccaccgcccagtgcctgaacatctgggccctgattttgggcatcttcatgacccttctgctcatcatcatccccgtgttggtcgtcccggccccgcgatagatcacggaggcatcacttgaggccacggagctctgcccgtgacctgtatcccaaccgtactctatcttccattcctcgccctgcccccaacgaggcccggagctctgcccttgacctgtattccacttactccaccttccattcctcgccctgtccccacagccgagtcctgcatcagccctttatcctcacacgcttttttaccatggcattccatataagtgtatatgtttttggtga

SEQ ID NO: 695517 - DNA, 551 bp, Homo sapiens
  misc_feature (1)..(1): n is a, c, g, or t
  misc_feature (466)..(466): n is a, c, g, or t
ncctccatcatacctaccatcagctatgtatgttttaagaggttctggtttctccatattctcaccaatatttgttgttactcagtctgtttcattttagtcttttcaggagtataaactgagatttactatgattttaatttgcatttccctattgtctaagatgatgaacacttttcatgcgcttctatcttcctttgtgaaatgtctgtcaatttttttgccatttagaaaactgagttcagacagaccccaccctctacgaaaaataaaattaggccaggtacggtggctcacgcctgtaatcccagcactttgtgaggccgaggtgggaggtttgcttgagcccaggaatttgagaccagcctgggcaacatagcaagactctgtctctacaaaaataaaaatcaaaattttaaaaaatctgtgcatttcactgtatgtaagttttgatgccaagtaaagngaggagaggaccctgggaaagatgaaaatgactgagccatcagctgctcatccttctcccctgctgtcattgcacgaattctgat

SEQ ID NO: 695518 - DNA, 957 bp, Homo sapiens
atatccggcatcgtggtttaggggccagctatacaagactgatccggtcaccgtgtaggaactgacttataacgggggcctctaacgcggtcgcaatgtagagcaaccctcgtaggggagactccgcccccccctagtggccacgcacaacactgtgtggacgaaagggtggttttttggcaaacgcgacggttcgcctttcccggggaaaaaacggttttgttaacacggagggacaccccttttaacgcaaagattggaggattagaaagaagtgctgcggtcgttaaaaaagacaaggccgtccccgacgccattgcagcgcggaggcccgggatgaacgaaggggccgcgctcgcgtggccccgaatttcccccgagcgtttttgaaataagaaaccttcacacccgggcggtttgtcaaagacaccgcttgctgtcgttgcccccccggacttcagggggcccccttttttgtaagccaaggggagtcaagagcccttttcatgagcatttaaaattgggtccaattgggaacagacaccgaacagcccacgggtcactggttccacgcaaaatggggcagtcctggacctccattcccacgccgggggaagtttcttctccctgctgcccgtgctaagatgtaacatgtttagtaggctcccggccccctatatttgtgcggcaggcagtaaatcaccaacaacgggtgtatccggcgcttcccctatttttgtggtgacttcattatggggtaagatagattcccccccgggggaacacaacaggaacccgattttcaattggcgggcccactaggcgctcggggtgcgcaatgtcttctaaaacaaccgtggtgcgccaaatcttctccatatttgttatgtacaagaacgtagatcagagtttacaactttatactttcccgggaaaaaaacacggcccaacataaca

SEQ ID NO: 695519 - DNA, 884 bp, Homo sapiens
ctctgggtatatgatgtgttccccccctcctggtttctgtctcctcaatacatgccctccgttatattgtgttgcaaagtcggcctctattgcgcgccccccctctttgatatcgtctctgtggggtgcacaatcacgcaggacgagcccccaagtgtgtctggtactccctacgcgggttgcacggatctccccgacctgcttgctcccccacttcaaacgtctcggcgcgcgcccatctctctggtcgacccactcatcatggcgtcccgcccctcccctggctgctttcacgcggcgccgtctgagtgatcagccaacaattgttgctttgcggaagcccgtcctttctctttcggaatggccgcgtctctcgcggttctctttcgtagtgcctccccccgggcgcgcgtctcttagagattgttctggcccagaagtatttctccggcatgttctctctggtgtgacccgggagctttcatgttccccctcgtgcttcgcgctggttctgcctctcgtcgggggcactaactcatgcgcaggctgctcgcggcgcctcagccgccgccgtgcgcagtgatcctggcccctcctccttgtcttctaccagtgatttcggtatgcctcgccgcggcactcccgctgacttccctggtggcactccccaatattcgcgcggcccttacggctgtgtcggcgccgaacatctccggtccgctcctcttgataccgatctgcagctactatgtgcggctcacggcggggcgctccacgcaccggtcgcgacccgacggggcaggcgacgtgcagtcgactgtcgagtatacgcggccgcataacctcctgttctttgcatatcacttactaagaccttcatcaca

SEQ ID NO: 695520 - DNA, 277 bp, Homo sapiens
  misc_feature (19)..(19): n is a, c, g, or t
cgttacgggcgaacagggncgcgcttcgcggtggtcgcggcccaagtgcgtttcgctccgcagcgctcggcgacggcggcaaaggagatcaagtcgctgatcgtgtcgtcgaacgagaccgtcgagcacggcgcgacgctcgtcacgaacgcgggcgagacgatggccgagatcgtgcagtcggtgcggcgggtgaacgagatcctcgacgaaatcagcccaccgtcgcgcgagcaaagtgccgggatcgaacaggtcaatcgcgcggtgggcgaga

SEQ ID NO: 695521 - DNA, 108 bp, Homo sapiens
ctgaggcgcttacgttgcgtgcggggcgccgtggtcgtggggggcgcgcggcggggtagcgtaggggcggtgggccggtgccgtgttcgcgtggggtcgggcgggcct

SEQ ID NO: 695522 - DNA, 1078 bp, Homo sapiens
  misc_feature (270)..(270): n is a, c, g, or t
  misc_feature (291)..(291): n is a, c, g, or t
  misc_feature (330)..(330): n is a, c, g, or t
  misc_feature (339)..(339): n is a, c, g, or t
  misc_feature (349)..(349): n is a, c, g, or t
  misc_feature (418)..(418): n is a, c, g, or t
  misc_feature (447)..(447): n is a, c, g, or t
  misc_feature (464)..(464): n is a, c, g, or t
  misc_feature (470)..(471): n is a, c, g, or t
  misc_feature (488)..(488): n is a, c, g, or t
  misc_feature (519)..(519): n is a, c, g, or t
  misc_feature (521)..(521): n is a, c, g, or t
  misc_feature (552)..(553): n is a, c, g, or t
  misc_feature (555)..(555): n is a, c, g, or t
  misc_feature (560)..(560): n is a, c, g, or t
  misc_feature (562)..(562): n is a, c, g, or t
  misc_feature (579)..(580): n is a, c, g, or t
  misc_feature (591)..(591): n is a, c, g, or t
  misc_feature (593)..(594): n is a, c, g, or t
  misc_feature (599)..(599): n is a, c, g, or t
  misc_feature (611)..(611): n is a, c, g, or t
  misc_feature (625)..(625): n is a, c, g, or t
  misc_feature (632)..(632): n is a, c, g, or t
ggagtgcgattatcagtctcatcatatggggatgaaccactgaagttataaaggagcacactgtcgcactacatgtctaaattatgtaggaagattcctgtaatcatgtttttttaatttattattttaaagctatttgtataaaggatggttcccatacttggttattgaatagggggggtggggtggttccttgtggattaaatctgatattgttctaatactgaaagattttctaaatgtcactgctgacataactcccttggtctncaatttaatagttgttaagtnttgcccacattgcatatgcctttcatttataatttattnaccctgctngacttagttngggaattcgtaaatttaaaggtgtgtgtatctgtgtgcatctccctgtcactgtgacacacctagatgngtgttacttcaattaaaattctcaaattnaatttgattgcttcagnagggannatattctcaataatgtnacaataattaaggtctatacatgggtgtatntntctggttcacaacagcacaaaggtcttcatnntngtggntnctttgaagatctttttnnccctgaagtcngnnaatantttctagttatngatactcttctggnatatatnaagcttcgtgtagattgctagtaaaattactacggataggttgttttaacatatggtctatttaagtctgatgtctacggggcaagtgtagttactaaaaactgttccaccataatttggacagaaagagtatgaacaaacaattacaataacctatggcggtggggtacctgaagaaccccagttcggtatttccacgtaatctaagttatccttaaaccatatcaatctggtttgggggcaatatttaactttcccctaatgttttgatagaaacaggcgaaatttcacggcaacaacccttttgggcagtaccttccccacactgtcttggcgccccgcacatttggttcccgcgcccatgtgccctcttaaaaagaaaggggcggattacccttaaaggtgcacaacacgcaaggtaagtcataattcaacggggagaacaa

SEQ ID NO: 695523 - DNA, 837 bp, Homo sapiens
gatttaaaaaaaaaaaaaaccaacaaaaaccttttttcctagtttcagatacacgggattctttatacgagttggtctccatatgaaagcatgctgtccagtcgctctgtgtaagatctgtgtctgagtttggaatggggtgccacactttttccagtcaatcataatggctgtgtcctacggtaccatgtatgattctggtcctttcctatatccttcatgacagattatgatgtgggcttcatatggtgccttacttgtacattttaaaacctaaacgtcttcattcccttccatttcctacatctttaacctttgaccttttgggtaagagaatcagaactattacaaaagcttcatgaaggatttcagatgggtatggtttcaaatttccctctcttaatagttatttcatattcggtatgaaagaccagtttgggatggtcttggacatataggggggaaagattagcagtaatttcactaacttcccttttctctgactttcatgcatttctcatacatcttctttctgatgcttgacttaattggattcctagcaatagtctgcatttaacacgaaagggtgtgtccacattcatcagcttgaacattgactatttcatttgtccagggattttcaggacgaagagtactcatttgggtttatacaaccgatgaccagttcttcttaaaagaaaccgaagttaccggtactctcttgaactaccagtgctgttacgtggagatctctttacacaatatatatttatattcctacacagacctgcagtttgccttcctaatcataagcgggtaagttattcgccaaaaaga

SEQ ID NO: 695524 - DNA, 185 bp, Homo sapiens
  misc_feature (76)..(76): n is a, c, g, or t
ttttttaattttaatttttgtagagatgggggggcaggtctcactatgttgcccaggctgttctcgaactcctggncacaagccatcctcccaccttagtctcccaatgcgccggaattacaggtggctcaggtgtgagccaccgtgcctggcttttctccactatcttgaaatcagatgggagg

SEQ ID NO: 695525 - DNA, 918 bp, Homo sapiens
tggggtttccttttcggttaattctggtaaaaatgaaagggttcccataaataaggggcatgagccctttcttcacgaccatgtggttccattgacaagggggcaggggcaagagggggccgtggatggggagctccttgtgtgggggagaccagggacaggggagaccttgggattcaaacaaggcaccaagacagaggtggggtgggcgcagggagagaagagggctctcaaggggagacctctcacacccctcggtggcccacaagggtggaggggagtgacacagggtgtgcgtggagagaggggcacaagagaagcgtgcccgcggaactccactctctcgcgaggtgtgaggtggagagaaaaggctctcacctcgaggggggtcacattacaagcacccacgcgagtgtgtccctctcaaacaaacaaccgcgacagcgcggggatgtgtgtcgcactcactgtgcgcgcgcgtgggcacaaaaaaggggagtgtgggtaacacgtgcgccccccagcgacgcagggggggcccccaccctaataagagaggggagcacctccacctacaaggggaagtgaaagcggtgtgggcacagtgggacaagtcgggagccacgtgggagaacgaccaaagagaggtgtgctccacacaaaaaatctctctatacactgtccccgagatgtacttccccgaggcggcgcggcaacagccaccacaaagagacccctatcaccaatattaacgagggggagccacaagaagggaggaaggagcgaatcgcaggaagaggagaacagcaagtgggagggaggggtgcacccacacacaaaggaggaaagagggagccacaaggggggggacgccccaagtggggtggaaacaacagggagggagcaccaaaatcgccg

SEQ ID NO: 695526 - DNA, 1069 bp, Homo sapiens
  misc_feature (738)..(738): n is a, c, g, or t
ctcaagcaggcacctggggtggggactggcccgaggcctggctatcagtcagcggtggcagcagcaggacaaggcggacatacaaggagctcaccttccgtgctattctcctgacccgacagccggcctgtcgggagcacctggacgaggggccgcggaaacctgtgagtgcgaaggagcccccgctcctatgcgctctgaaggcctcgactccagcgagacctcatgtgcttttccggtgctttacctggctacgctgccgttgctccgttctgaccctccgtgatgctgctatacttcgtgttcctagcaggaattgggctggtccctgcgtggcaaccaggcacaagggttgatcttcgggcacctcgaaactagttgcacggattccattccaatcgccttcggttcagtcaacttaagcaagtcaacagagagtgggcgagtgagcactcacttacttggcatagtcattgttgtcagcgacagctgcgggcttgggcgccagtccgcgctctaggggtagtgaggcctggtacactcgtcgcagcctcaatagatcgcatcgcgatggtctcggtgggttgcgggcaaatctgtccattccgtgcttgtctttgccataccatccaccggggcaagaacggcgagctggataagcgagagcgagagggctcctgagttggctggggagacaaagcgacactgcagggcgagcgtgagcgggctggcaccagnacccccgctttggggaaatacttgcgccttatcggggggaagggaacgaaaacagacacggtgggtgttccctacactggtgcccaaggccccccacgggggccatgggtccccccaagggaacattgccttggagtttgtggaacacgggcactgggttaccacactgggttggcagtttgccccaacgacatctagcccggagccttggtacacccatttccctggcccaatatgcccgcaaactgggtgtaaacccaaagccgaaatgtgttccgtttcgatgggaccccccctttttcaattggtcttggtagaaggaaacttccct

SEQ ID NO: 695527 - DNA, 170 bp, Homo sapiens
ctatgatgttttatggtccctcggcaggcacaacttcgtccatcacgatctacatggaggagaggaagggaattattggttctgtctggagcctcggcgtgtgcagcaacaacttcgtccacatgagatttgcaacaacttcagtccatccctgacctccagaatcccac

SEQ ID NO: 695528 - DNA, 770 bp, Homo sapiens
  misc_feature (6)..(6): n is a, c, g, or t
  misc_feature (65)..(65): n is a, c, g, or t
  misc_feature (107)..(107): n is a, c, g, or t
  misc_feature (154)..(154): n is a, c, g, or t
  misc_feature (249)..(249): n is a, c, g, or t
  misc_feature (453)..(453): n is a, c, g, or t
tggccnacggtttctcaccctacgtaccatcgatcatccaagctgattgctgaagtcactctaangatccctcttcctggccagtgaaggagaaacatcctaatggngagactgcctgttttcttttgcattgagtccatgtgactaagccgangcaccttctctgcagagacagaagctcagtactgcccaggtacacagtctgcgccagccacagctgagcaacatcagatgggtgggaaattcggnttttgaaacccattaaaatgggcttcactgtagaaaatttaccaggaggaagcaggaagaagcggaccgacttaatcgaatatggcatactggtctgtggaatggatcgttcaattccacaaatacagcggacctaaggtaagctggggccaagagtggctacccattaatggttggctactggcgcttcaacggaaccttgtngcaatgattagaattgcaaaccgcgagagagttgcgattggcgccttccttctcgtaagaacctgtgctcgcgtcgatgggaaggtatatatctagcgcgtatgtgtctcaatatgggtaccagagaacattgcacagcgcacagcgcagccgtaagcggtgtgcgtgtctagagctcgctgtagatataaacacgcattagagtgtgaacgcagacgttatacagcgtttccgaagactctggccttttcgacctcggtatgaattccgcctttctctgagaggggtcttaaataccgcgattataggaggcggcc

SEQ ID NO: 695529 - DNA, 990 bp, Homo sapiens
actagttctagatcgcgagcggccgccctttttatcacagcaatttgagaagtttctcttattggtttctgacgacaagcattgtggggagaaagccaggcataaattagttacgatagttggtgtataatgtttctccagtgaagatttggacttttcttttgacccttatagaatgcataattaaaacagacgtattattttgaagtgaaatattgaatattaagaaaaataaatatagagactcttaaatacaaggagaccacaaactcacatacctagagaaatcaaacaggtaaaagcaagtggtgaagccacatggattaatgagatgatagaaagtacaaaatctactatgtaagtcagattaaagatagccagcttgcgagctgcctcgtgctttgcgatcttttggaagtcaattaactaattacataatatcagtgaatacagtatttctacagtatttgaaacggtgtgccactacccagcaatgccacttctagacatatatccaatgagaatggaaaacatgtgcacacaggcacgttgtagcatgaatatttatggaagcattattcacaatagcctacacagtggaaacgagtccaaatggccatcaagatggaatgactaagataaaatgtaggtgtgtgcatgcagtggaagtattatgttgtggcataaggagaaatgagcactgatgcggggtgttaaatggatgaactgaaagctttatggtaagtggagagaggccgtcataaaaggtaactattggttttcctttcatagggaatatctgataggggtgtcctagagacaaaacgagagcgaatggttggtcagggcgtgtacgggatatgaatgtcgcgagggggggcgtttcggggagggggggacaggttgggttaagagttggcttgaactgtgtgtgcttaactggtgtggagaacatgttgatttcccaacaaagaggggggatttaagaat

SEQ ID NO: 695530 - DNA, 100 bp, Homo sapiens
tgttgggcatctgtcactgtcagctgacacgtggagccgctgaagcccgtggggcaggtgcagctgaagccattgactcggtccttgcagaccccaccgt

SEQ ID NO: 695531 - DNA, 287 bp, Homo sapiens
aataaagtaagctagagaataggaaaatgttattaagaaaatcttaatgaatagtaaatatattttctcttcattaagtggaagtggattctcaaaaaggtctttaccctggcattcccattgagttggctgaggaagagtgggaggaggaggaagaggaggaggtggaggaaggaggaggaggcggaagggttggtcttgctgtctcagggtggcagagtcggaagaagtggaagagaaggatggggaagcaggagaggcaggcaaattcagtgtaacttttattt

SEQ ID NO: 695532 - DNA, 105 bp, Homo sapiens
ttttaaaaaaaagggggggggggggtcccccccttgttttttttccccccccccccccattttttttttttgggaaggggaaatttttggggttttcccccccca

SEQ ID NO: 695533 - DNA, 358 bp, Homo sapiens
ctcctgctacagtcttcttccttttgggcaccaaaatcagtgagtaatgggctggtactagcaccaagtctcctgcttagcttcagtaattttgctttagctctgtggttatcacacttcagagattagatgcgccctggtttataaactatggtaatttttaaactaatgcagagataagggtcatgaaaaattttgatgttgatattctttgtcatctgtactattccaacttgtaatttccaactctttgcaaagagcaaaggactaagtaaaaaaaggaagagaagtgggggtattagcaatttgattgactcaggattccattgggtgaggaactcaatattaaaggttaaaa

SEQ ID NO: 695534 - DNA, 298 bp, Homo sapiens
  misc_feature (24)..(24): n is a, c, g, or t
  misc_feature (51)..(51): n is a, c, g, or t
  misc_feature (59)..(59): n is a, c, g, or t
  misc_feature (130)..(130): n is a, c, g, or t
  misc_feature (196)..(196): n is a, c, g, or t
  misc_feature (201)..(201): n is a, c, g, or t
  misc_feature (204)..(204): n is a, c, g, or t
  misc_feature (218)..(218): n is a, c, g, or t
  misc_feature (250)..(250): n is a, c, g, or t
  misc_feature (264)..(264): n is a, c, g, or t
cacagcgcctctccagacctaccncgggacctaatgttctctacatgaacngctcattnggaggacagcagtgaggtcctgccatagagcaaatgtgttaggagagaaggtttcacatgggacccaacanccttcatcaatactttcctgagtttgatcatcctttagccttgtcaacagagaccctacagagttnttttnggngagcacgtcgtgancttgggggcaaggatccagaaaggtaggaagntatgaaaggggggngtcaacagcagggttttttaggggtcaggcacca

SEQ ID NO: 695535 - DNA, 649 bp, Homo sapiens
ccgggtcgtcgccgctgcggttgaacgcggtgatatgccagcgcggaacaaccgctaccgggagcgcgaggaactgcagcggctgaaggatcgatacggggaccagagacagcagcagcgactccagattccgagtcggactcaagacgacgagcgcgtggaattagatccccagccaggagcgggactttatacaaaacagctctccattgtagaagaagaaggacccccgcatttatcagaaagatgccaccattctataacagaacagacatcagtcatcagacagtgcaggaggacccagaagccttggagaagcagaagaacagtgcggcccatgtacctgacggacatacgagaggaaggttactcttggagaaggcaggccaaaatatgttgactgaggagaactcagactggcgctaagacttccaatcacagactccaggagaacaatcgtacgcaaagttaatgtggaaggaacaagaaaacagctcaagggaaaacgctttccggagcattatgatggagaggaccagtgaaataccgagggacgtgagactaggaggacaggatggctacaagtattgcatgcattaaaacatgccaaaaactagggcacgaagaaagccccagtgaagaaggccaa

SEQ ID NO: 695536 - DNA, 261 bp, Homo sapiens
cccccagaagccttagtgacccagatcttatccagagactcaagatagcctcaaatacagggggggattatgtatccaaaaaaaaaaaacaaaacggaaagggggcgggaagggccagttttggtaaaggccaatgggttgggagtcggccggggggcctttggttttattttcccaaccggcaaattacacaaaggggggggggggggataaccttttttaaggttttttggccccggggggagggggggcccttagggt

SEQ ID NO: 695537 - DNA, 595 bp, Homo sapiens
agcggggttgcaggcgcgtgccaccacgcctgactggctttcgtatttttttggtggagacggggtttcactgagttggccgggctggtctccagctcctaaccgcgaatgatccgccagcctcggcctcccaaggtgccgggattgcagacggagtcttgttcactcagtgctcaatggtgcccaggctggagtgcagtggcgtgatctcggctcgctacaacctccacctcccagccgcctgccttggcctcccaaagtgccgagattgcagcctctgcccggccgccaccccgtctgggaagtgaggagcgtctctgcctggccgcccatcatctgggcatgtgacggagcccctctgcctggctggccagtctggtagagagtgaggagcgtctctgcccggtcgccgatcccgatctgatgtaagtgaggagcgcctcttccgggccgccgatcacagtctaggaagtgagagagcatctctgccgcggtcgccacatcagtctgactatgtcggggaggcgcctcgtgccctcgtcgtcccggtgctgggatgtgcaggaggcgcactcttgcccggaccgtggatcac

SEQ ID NO: 695538 - DNA, 364 bp, Homo sapiens
aagtcatgaggcaggggcaggatgaagcccaggactctgctctggtaagtacaagaaaagaaggggcttaaaagggagagctgccattttaaccattctagcaggaaggcaactaccaggaagactcgtgtattgggcatagttgtcaaggaagtcagtcgtgtactcaaagagcttgtttcagaggaaccggggcaggagccagaaagggggcctgagaaggtgcaggggagggtgcagacaatgaggctgccactcccagattccggctgtgaaagtaaaggggcaggtagagcggggtggtgtggatagatgcagggtgggacagacgtggtcaaaagccagtggagggcctgcgtaaaag

SEQ ID NO: 695539 - DNA, 720 bp, Homo sapiens
agcgggtgggtctcagtagctcgtgcggcgggaggagtggcagcggcgatgtagcccagtttcgcgaaggctgtcggcgcgccgctgggcccgcaggcacccggctcgcgtccttccccgctaggtcgcccggctgcgcgccttccccgccgccatgatgcccaagacggaaggtcagctccgccgaaggcgcctgccaaggaagtagcccaagaggagatcggcgcggttgtcagctaaagcctccgtgctaccacagtggagagcgagagccgaacacacaggcagcagcgaaggataagatcttctagacaaaccaagtgcgaaagcagagaagggaacaggggagcccaagggactccaggcctgaagtggctagatccagagaaactatagagaaggacttaccttgcggaaaacggggataggcgaatgactgaggagagtccagcctcatgatgaatcagtgagagaatggaagttccgagtctgacttaactagagccatagtaccatgtcttatcagtggtccctgtctcgccttctgtgttacaatccagagcgaatagtttcttagtcaactatgttggtagagtgcaaaggttgactcaaggatagctctagaaacagttttgagagaagggaggggaagtcccaccgtctatcccatgtgttataaggtgtacaaattgctttctgattgtcaatgaggttgaaact

SEQ ID NO: 695540 - DNA, 121 bp, Homo sapiens
cacgaggattaccattgattctgacctgtttaggtatctggcctttgtgctcagtcaggaaagctgtcctggtgtccatgcttatgcactgtgtgccctcgtaggtgtaccccacctgacg

SEQ ID NO: 695541 - DNA, 364 bp, Homo sapiens
  misc_feature (39)..(39): n is a, c, g, or t
  misc_feature (254)..(254): n is a, c, g, or t
tggaatagccatcgtccagcacgcgactttgaaggcggngagaggaagtcgaccagcaccgggatcggattgaccgcccggtgcggataggccacgtgaccctggcggccctcgaccgtgatccaggcgttgatgctgccgcgccggccgatcttgaccatgtcgcccagcacgcccgcgctggtcggctcgccgacgatgcagtggtcgaagatctcgccctcggcggccagggcctcgacgacctagacggngccgtcatcggccacgccctcctcgtcgccggtgatcaggaagctgatcgagccagcatgctcggggatcttcgacacggcggcgacgaaggcggcgatggccgattcat

SEQ ID NO: 695542 - DNA, 449 bp, Homo sapiens
gattacacaggctgacaaatttgtgctgcactgttaatgatgaatatgcaactctggcctatctgttccatagctcacagatgcactgtttcccagccatttttcttacaactgcatgtagaaggttgcaaggacagacttcaggcagccattcaaagcaatcctcactaaatgaacaaccacagccaaatactatgtctgcatttgaacagtttcattcacattatgctgctatatttcttatgctgctatattcgagttcaatgctaccacaggcttctcagtgcttcacatgttctttcaccatgaaattgtacatcgtgttactttccaaaattcacctaccacaaagatatcgatgtacaactccttttaaaatgtttcacggccggctgcagtggctcaagcctgttatctcagcactttccgacgccgcagtgggcggatta

SEQ ID NO: 695543 - DNA, 287 bp, Homo sapiens
gaggactacagaataagattatatacatagacacatagctaatcacagtttcctgcactgaatgttcatccaaccataatgtatcaggctacactgggtagtgtatctgcgcgatggtggtcttctaaaaatgctgaatgaggatggacgccgtgaggaagagcattgttagatgtccatagtatgactagagcagttaggtattacatgaataagcagatatcttctaatacagacagttgaggtatatgcactatggtagttgtcgctatatgattgaaataaag

SEQ ID NO: 695544 - DNA, 153 bp, Homo sapiens
agtttataccgaggggcaaactctatgcagagtaggtcgtatgtgtgagacagggtgagaggccattgactaagaggttatccatgtaatcccggtaaaagagataatggtcagaacagggtagcaagagtgagagtgctagaaggaatttga

SEQ ID NO: 695545 - DNA, 458 bp, Homo sapiens
gccaggcagaggggctcctcacttctcagacggggcggccgggcagagacgctcctcacatcccggacagggtggcagggcagaggtgctccccacatctcagacgatgggcagccggggcagagacgctcctcacttcccagatgggatggcggccgggaagaggcgctcctcacttcctagatgggatggccgcccggccagagatgctcctcactttccagactgggcagccaggcagaggggctcctcacatcccacacgatgggcggccaggtagagacgctcctcactccccagatggggtggtggccaggcagagtcttcaatctcggcactttgggaggccacgccaggctctgggaggtgagtttgtagcacgccgagatacgccactcactcagccttggcacattgacacttgaaaacattctttaggtaacattacgttagtagga

SEQ ID NO: 695546 - DNA, 709 bp, Homo sapiens
  misc_feature (626)..(626): n is a, c, g, or t
gaagagaatagaaaaaaagagaccttcccaccgcgcttctcttccgcttgttccgccccttctttgggggggggttttataaaaacccccccactcgggaggaggaaccacaccaggcggtgttttttggattagaaggagaaatataatttggaagatttttggggtgtatactattatgggtataaactttcccgttttctcgtccctcgtctaaacacacttccacattttctctgagacccttcatattgttcgccccttttatatacaccactctcttcggtgtctctaccacacagagcccccacaagggagtctcctcgcgcgctttgagttcacacactgtagacccacgctatgcccacacaactccacgcgccactcccacacatttgtaaagcccacttatgtatataaaggacccacaatatagggactgtttgccaccctccaaaactttatgaaacttcacccaccccctaagtgtctcgtcccatcggaagttaagaaggggaccactcacactctatagaaagtttcttaatatagaaaaggaacaccaatttgtttcctggctttaaccttgggaaaaaagctagccagcgaccaccttattatagaangaaacatttgtgcacctatgttgccctaatcttcttcccaaatgtaactgttataatataaaattaaggggtaccccatgcca

SEQ ID NO: 695547 - DNA, 1304 bp, Homo sapiens
tgctcaatgccttcaatgcacaatccattttcaacattatcattctctacaacagcaccttcatttccaacatcaagcatcaatcatcttggaggtattgggaagtaaacaactcccaaccatatacacatttgaggaaggcacagatattcacatcatacacacatcattaccactttctctgcactgcagcatgctctgatacacttactaattacctacatacccttgcgttctccactcagtcagtcacacacattactcatctatcatactatcatcatttgacaaacggacaacactatactaactccatatcctatcagacacagcaacagcatactagcctagtaagatatcctatatatcatataatactatcccttcatcttacctcgtgcaccccttcacaaacgacttgacagcaaacgcagcaacacttgctcacacgtccatactccagcgtaatcatacggcaacagtcacgatacagacaatcgtatccacgtaaggtcaagtgtcatcctatccagcaatgctgctaggacttacacaggtgcaccagcccccagtattccagtcagacagcacgattacaacgcacacgcacacggtcccacacgctcacatcttactcagacatcactacgtgcgcattcttaacgtgctacacgacgttacctgaagggtccacattgaatcctcatcagcttacaaagctctactgcaccttcaatcatgcaccctcacactgccattcacggacgatcatatcaccctacaccctccacactgccctgctacaccgcactcatatcctaatttcccacctgactcccttcgcacacaccaacacacgccacaacaccggtcaggccccattaccacgcaacctcacccttaccaactcctcttcgccccgtgctaactcctcaagacaaaaccacgacatcacacaacacacccaggcgacaacgacgcaccccgccgagcaaacgacaacactgaaggagcgacgccccaagcaagaacaccaggccgagggcaacaaaaacaacatacaacaacaagaggaacccggaccaaggcagggcaacaccgaccacaacccagcgcccaccgcgacagaagccggcacgcaaacgcggcaccaccccaccgcaccacccgagcacgacagccaacgcaaccgaactccgcaaaaagaaaggggaagaagtatcaatactcttcagaagacgcaagcaagagacaaaccagagaggacacaccgacacaccgaacaacccgcaccaaagcacgca

SEQ ID NO: 695548 - DNA, 697 bp, Homo sapiens
aagatggtgaaaccccgtctctagtaaagataacaaaaaattagctgggcttgatggcatgcgcctgtaatcccagctactcgggaggttgaggcaggagaatcgcttaaacccaggcggcagaggttgcagtgagccaagatcgcgccactgcactccagcctcagcaatagagtgagactgtctcaaaaaaaaaaaaaaaaaaaaccgtgccaattttctcaaacattaccggtaaagattatttccagggtgccatttataattagtatagcagcagggcttttactctgtgttttgcccagattgcagtcgggggcagtgggttggtgtgcgggactttctcagtggccatcattcagtatgcttaggggatttggatagacagggcattagcctggggcattattcacctcattgggtaaaggggctaagaagcctttctttttatatgggcactctcttttttggacaataggggtctatactctgtcacccgggttagagtacactgggtacaatcacgggctcaattgtaggctttaacctccgtggcgctcaggtgtttgtcactatgcccgggttactttgggtatcttgggtagagacggtttcgccactttgcccaggttgaaggatatgcctaggctcaagcgattggcaacctcaattccggaagtgctgagataccggtgtg

SEQ ID NO: 695549 - DNA, 219 bp, Homo sapiens
agctgctgctgttttgagtctagaggatcccatcaggcgattactgtgggtgcatgctggtgttgctcttgtagcagttgccctgcccgttcttgcaggtgacttttccgggcaccagacattctggacatctaccaggtgctcgtgcacaaaggtgttcactggcttgcaccgcccctgtgtcgtatcccgagcgcctcgccagagtcttcgcctgat

SEQ ID NO: 695550 - DNA, 140 bp, Homo sapiens
tgactatcacgcaccatatgaatcgcggtctataccataattcctagctgcggtatccaggcggctcgggccgtgtttgcacagctctaattatatcacaatgtaaacgcttcggtgcccgtgggacacgcagctaagag

SEQ ID NO: 695551 - DNA, 190 bp, Homo sapiens
ctcacccgacggggtggcgcgtgcctgtagtctcagactcgggaggctgaggcaggagaatcgcttgaacccgagaggtggaggttgcagtgagcagagattgcatcactgcacttcagcctgggcagcagagcaagaccctgtctcaaaaagaaaagaaactgctgtctcccaccccgtcgggtggatg

SEQ ID NO: 695552 - DNA, 720 bp, Homo sapiens
  misc_feature (154)..(154): n is a, c, g, or t
  misc_feature (175)..(175): n is a, c, g, or t
  misc_feature (192)..(193): n is a, c, g, or t
  misc_feature (244)..(244): n is a, c, g, or t
  misc_feature (301)..(301): n is a, c, g, or t
  misc_feature (319)..(319): n is a, c, g, or t
gggacagccttaggtgggtcatggagggattatggtctgaagtaaccagcaacctaggaacatagaaggtaatatttggcatggaataatgcctagccttagtagataaagcggcattaccttttttttttttttttttgggaaacaaggtctnggtctgttgcccaggctggantgcagtggtgtgatctnnggtcaccgaatctccgcctcccaggctcaacaattttcctgccccagctantgggggggctgaggggggggaatcacttgagcctagggaggtcgaggccacagtganctgagatcaccccattgnctttccagccgtgttgacagagcgagaccctgtctcaaaaaagaacgaagaaaaggggtggggggaggggactaagatccctatgtcctagagatgggggacatgtgtcatggtatgggaggagggacgctcaggtagtgacgggacgggatgactcgtgtcagggactcttggtcctctgaaacgcaccccgtgttctaggacaattataccgcgtgagtgagttgctgaataaaatttatatttccaacacaaaaaacaaactaaaaaaaacaactccgggggccatctaatagcggggggcggggacaaacaagcgggttactcagaacttgcggccctatgtgcgccaaacggtgggtctcgtagacccccagtttttttcttgcacccaatgctgt

SEQ ID NO: 695553 - DNA, 216 bp, Homo sapiens
  misc_feature (59)..(59): n is a, c, g, or t
  misc_feature (70)..(70): n is a, c, g, or t
ttcggagtgaagaagattgcacttttatgttcaaataatgaaatcaggtaacactgttnaagaaatgacnagttcaagttcatttgacagagtttagtttggggagagttactattaataaaattgagcattttctcttttattatttttatatataaatatacatatatatatatatatatatatattttttttttttttggagcttcactcgaa

SEQ ID NO: 695554 - DNA, 139 bp, Homo sapiens
tcttctggttctcactggatccacttctcccggcgggctttctcggtggcgctcattaattctttgcagttttttaatctccagctcatgctgctgctgcagagagcgctggcgcagcagcgagaactcacggcccggc

SEQ ID NO: 695555 - DNA, 350 bp, Homo sapiens
  misc_feature (4)..(4): n is a, c, g, or t
  misc_feature (25)..(25): n is a, c, g, or t
  misc_feature (93)..(93): n is a, c, g, or t
  misc_feature (285)..(285): n is a, c, g, or t
  misc_feature (319)..(319): n is a, c, g, or t
  misc_feature (335)..(335): n is a, c, g, or t
  misc_feature (339)..(339): n is a, c, g, or t
  misc_feature (350)..(350): n is a, c, g, or t
gaantttcaattatgtttggccccngcctggtcctcgaaattccctgaccctcaagtccctccccgcctcgccctcacacttgtaattccagnacttggggaggctgaggtgggaggatcacttgaggcccagaagtttgagaccagcctgaggaaaatggcgagcacctatctctaaaaaaattaactgggtgtggtggtgtatgcctatagtgcaagctgctcaggagggtgaggtgggagaattgcgtgagcccaggagtttgaggttacagtgagctatgntcacaccccttcactccagcctgggccatagagnaagaccctctctcttnaaancgacggggggn

SEQ ID NO: 695556 - DNA, 1599 bp, Homo sapiens
  misc_feature (268)..(268): n is a, c, g, or t
  misc_feature (356)..(356): n is a, c, g, or t
  misc_feature (1426)..(1426): n is a, c, g, or t
  misc_feature (1523)..(1523): n is a, c, g, or t
gaagcaaccagcggcttggtcgtggttaacgctgtcatatgattccgcccagtgtgtgcattgcgtagctacttgacagtgctggtgttccaggctctcggagaggcccacgccctgaacgatcgagttgactgcctgtagtgtgccgtgaatgaagcatagtgctgcattcattcggactggagagcacgacatcgtcggctcgaggattacggatgacacgaccgtgccgagcgggcaatacgatagcgcgcgtactgcagtaagngaaggatcatcaatattcgtgctgacttttgcggcactgtggcgattccctcgttagtccactacttttcccagagtatctcgtaganttggtcgatcatgacaacatcgcacacagaagatgcaacgcgactgaaagtaatctgtcttttcatggaactgttctctatccaaaaggtcaacgtatctcacgggctcacccaatcgggctgtggtgaactgaagctctcaatctgacaacggatcgagtggctacgggaaaagcattccttgtgcaataagggaatcaagacatacttttcccgccgcaatgtgtcgcacgactgtagttagccgatagacagggtcccctcgatgctatcgcgcaatcgctaaggtgaaaacccgcagttgtgggaataacccctatgcgtgcaaatttccactcgcggttggcaatatttcggagggggggcaaaagtgcatcgcccacctatttgatttgggccaatagaacacttggccttgtttgacggctgttattgggttgacgcaaaaggctaagagtagaagcactgaggcgtagtgacgcgttcggtgcctgtgggatcgctcatttgagatacagcactagaggctttactatctcgtccagaattggtccgaccacccgttttaatcaccgcaagtgtgggagtccaattagcgccgagcagagtgccaaatcagggaaaagggacgacgcgtaacgaaggtcttaaaatcttccaaagtgtccttttgatgagcgttacgttggtaccccaagtaaggcacttccgaaagagcttaggctagacaccttgagttggctctcattagaaacggataacgggcgaaacattgacaaagagaccaacgttggaacggtaaggtatgggcaacacttcttactcaggagaccctccccatttgtggcaacgattttgcgccattcaagggcacactggacgttccagtaaccccatcaagggccagtttatcgaagcggcaaaatctggttcgcagcatggagaaccgtatagaatggaaatagtccagacggaacgacagctgcgggcacactacattcccattgtgaagggcgcagccacctgcttggtcaccgttctggcaatatgacggcacagcggaaaggttncaccattaaggttaccaaaggcgtggggtccagtaggacggtcacattccccattttcgagagcagagcgtgatataaatttccagactaaaaacgngccgacataacggccatatacccggtttttgtggtatctataaagcacaccgcgtgtcagtagatagacctgttcc

SEQ ID NO: 695557 - DNA, 163 bp, Homo sapiens
ggtacggtgtttcagatgcaccaatgtccttgttgcatttgcaggccaggtttcctaccagtggctggcgacttagttttactgggccgacgtggaagggttagggagttctgacgtggtctctgtttaccactggactctgggtctgcatgttcatagcctc

SEQ ID NO: 695558 - DNA, 193 bp, Homo sapiens
tccaggatgaccaggtagactaacctccactctcattacttcatttgactagaaaaaaaaatgtattcaccaaggaacaggacccaattagttcagacttttgttacgtttctttactaaggcaatttttgaaacaccagttactatgcggatggtgggaatttttcatggcttacagaaatagcagacttag

SEQ ID NO: 695559 - DNA, 497 bp, Homo sapiens
  misc_feature (2)..(2): n is a, c, g, or t
  misc_feature (25)..(25): n is a, c, g, or t
  misc_feature (37)..(37): n is a, c, g, or t
  misc_feature (78)..(78): n is a, c, g, or t
  misc_feature (84)..(84): n is a, c, g, or t
  misc_feature (112)..(112): n is a, c, g, or t
  misc_feature (114)..(114): n is a, c, g, or t
  misc_feature (117)..(117): n is a, c, g, or t
  misc_feature (228)..(228): n is a, c, g, or t
  misc_feature (370)..(370): n is a, c, g, or t
gntgatctggggtaatgtcatttcnaaactttagacntatctaatagcctaaaatgacttacaaagaaacgtgtctgngtgtgnatgtgtatatattgataaatgggtatantnaantatatatacaaacacatacttatatactattacccaggtataaattcttttttcaggattttttagatagcagtagaataaaaataattttaaaatgtcatactttatagnttaatttcccccttaaaattaaactataaagtatgacattttaagggggaaattggttattttcaattattaaaggttaaaataggccaaatcactttttatgcaatcatgttttatacagtggtctcattgcacattgtgntttttctgcactttttacggtatccttatcatgctggtatgtcaatatacaccctaaagaaaaactccatttaatgattgtgccttgtattctattattttttgcatcattagtaaaattaagttgt

SEQ ID NO: 695560 - DNA, 112 bp, Homo sapiens
caggagggcaaggttgacagttatctccagaggaggaggagaaagggagaatccgaggggaaaggggataagatggcttcagccaaaatgccgcaacccgagaggggacctt

SEQ ID NO: 695561 - DNA, 128 bp, Homo sapiens
gcaatgacgccacggcttattcttcatagcacccatttgagaccaccgttaccattccgggagtcatatatacacttcaagtaactacaccgaggacttggctcaagggactattactccattaagga

SEQ ID NO: 695562 - DNA, 424 bp, Homo sapiens
cgcgtacatcctcttattaaactcgtaaatactattgggacaggccgggcgtggtggctcacgcctgtaatcccagcactttgggaggccaaggcaggcagatcacgaggtcaggagattgagaccatcctagctaaaaaggtgaaaccccgtctctactaaaaatacagaaaattagctgggcgtggtagcaggcgcctgtggtcccagctactcaggaggctgaggcaggagaatggcgtgaacccggggggtggagcttgcagtgaccaagatcgcgccactgcactccagcccgggcaacagaccgggactctgtctcgagaaaaaaaacaaaatttacaaaaaagatactaccgggcacaaagaatttaggagaaatagaataatcatctctaccgaattctgctctcaattaaacaag

SEQ ID NO: 695563 - DNA, 832 bp, Homo sapiens
acactctactctcctccaactcgtcgcgctctaactcgcacgataatacacccccaaatgcgtttttggctttggctagccttgaggccaaacaacaggacttatacttgcgaattatgtcaaaattcttggcaaaagaaaaggttgcgaatactggcggaatcaagcaaagtttccaagctgcaacagtcttttaccaacccaacattaactaaaggagccacggttgctgattctttggatgaacaggacgctgcctttgaatctgtttttgttgaaactaataaggatccagtagcacctgatttcattgggaatgatggagaaaagcaagatctttgattatttacatgttttctctgcagtagaacaataacttaaagaactctataaaatcatttctcacaatcaaatgcatggtcaccatcatcgccaacatttgctattggtttctatcacgtgttttgctgcatataacctatgaaaggaacacacttaccttggtggccaagcacacctacatacatgtaattataccccttataggaccttaaggccttttggttaacctccaccttactactgatcagacagatgttatttcttaactaatcaacacctctcggttactactgactaatattattaacaatctataatctcctcgattttgtctaatataattataaacccctataataacacgtagttacagaatatcaatacagtaagaagttagttcgtatttaataacctaaaacaagatacactcacattctttatcggataaatactaataaatattggcaagaacctttacatactacacaag

SEQ ID NO: 695564 - DNA, 899 bp, Homo sapiens
  misc_feature (89)..(89): n is a, c, g, or t
tcctcggggccttcctcacagcgtttaactatataggagcctgtggcagacatgtgtggcggcgatattctcggaaaaatatattctgngggcacaaacgtctccaaaagagcgcaatgttgggctttacagcttgtgaaggctctttagataatgggtgtaggcgaccttttccaagtaccccctgagtggggccccacggggtacgccgaggccactgttaatgttgttccaaagagttgatgatgaataaaatcgggtgtttttgtgggggcgccctcttactcgcggaggattctcccctctattaaaagagaaaccgccgccaaaagtttgctccgtgcccccttaatgctgtctagccccccgcttcgcaaaaaatgttctctgagaagaatttctccaagaccttctaatggaaccaaaatgttttcaacagggggggaaaatactcctcaaagggacgtctaaaccaaggggctcgtcccttttgaaagaattttacactccatttatgaccgctttcactaataaaggaccttgtggaatcttggggcaaacatattcacacagcgtctgtttccaattgaaactcccggggtgtctactcccccttgagagccgcgaatttattagtaaggggccaaaacttggcgcgtggaaacctcacatcgcttctcttcgcgcgccatatcggcgtgacttcttgaaaataacctgtaccaaacgtcccgtactgctgtggtataacagacgggcccacgctaacgactccccttcagacgacggtcaattattctccaccggaagatcgcgccgcctgtctggacgccgcagggccccgagctaccaaacggaagaaacgaacacacttcccccagcatacaatatacgaagta

SEQ ID NO: 695565 - DNA, 144 bp, Homo sapiens
  misc_feature (27)..(27): n is a, c, g, or t
  misc_feature (72)..(72): n is a, c, g, or t
  misc_feature (95)..(95): n is a, c, g, or t
  misc_feature (104)..(104): n is a, c, g, or t
actgccccgtgcagactggaggggacnctggtagagatggaggaggaggcaactggtcacccacaacccctncttgatgcctctggcctccttgntgcctctgncctccttggtgcctctggcctgcttggtgcctctgccgtg

SEQ ID NO: 695566 - DNA, 327 bp, Homo sapiens
agacagagccttgctctgtcgcccaggctggagtgcagtggcgtgatctcggctcactgcaacttctgcctcccaggttcaagtaattctcctgcctcagcctcccaagtagctgggattacaggcgcccgccaccacgcccggctaatttttgtatttttattagacacagggtttcaccatgctggccaggctgatctcaaacacctggccttaggtgatccacccgcctcgcgcttttaaagtgctgggattacaggcttgagccaccggacccagccaaggccccggttttgctttactagtctgccgcaactggaaggacca

SEQ ID NO: 695567 - DNA, 159 bp, Homo sapiens
accttccggggaggtactagtggatgacagaggcgtcctgtgcaagacgactggtcaatagctccagatgacgacaaggtgcgcttctcactttctggagtcacaccaaattcctctccgacgatgctgaaccagacggtctctgacgagagctgtgtc

SEQ ID NO: 695568 - DNA, 476 bp, Homo sapiens
  misc_feature (24)..(24): n is a, c, g, or t
  misc_feature (391)..(391): n is a, c, g, or t
  misc_feature (402)..(402): n is a, c, g, or t
  misc_feature (421)..(421): n is a, c, g, or t
tgggacgtgctcttggctgtgaantgtggggtgtgtgcagagagcctgggcctggggttcccagaggagcatcttggggaggcctgcacagtaggatcctgcccatgtgccctgagctgatgtgccagccgtgtgaaagtgctctgacaccgtgggccgtacggagggcctccagaggggatgttgaaggcaggagacagctgtgccgggagcctctgcaggccgtggagggcccgtcctgtgacgtgtcttgccctccctgcttccacctctggtgtttgcttgcttcttgcgttcagggaccctttgcttgcagcgccatgttcttgcatctttcttttgctttttgtaagcttttgggatctttcagttttgatgggattgggacaancatttatcctncttgttgggcacgggtttnaacctaaaaggaaagaaggacagagatttttttcccacaagaagggttaaagttt

SEQ ID NO: 695569 - DNA, 1310 bp, Homo sapiens
gctgatcccccgttgcgggtgccctggctgcgggccccagtgttgtgaggatgcccgggtagtcgcgcgctttcggtagcttagggtctaacgggggtggtgacttagcagatctggatgggttcacacattgtgattctcgaatgcgagagtgaaaactggagattcatgatgaaaagtaggcccgcttcggccactggattctcaagaaggacggaggctgccccttcctgtgcaatagatgccccaagtgaacaccagtcagaggaggagacctaagcagatctgctgtccaagaggagtctaagtcaagcagaggcctccaaggaagtggcagagtccaaactcttgcaaagtctacgagctagggatcaagattattaagccagcccaccatgcccaacacgcaagtagtggccatccccaacaatgctaatattcacagcatcatcacagcactgactgccaagggaaaagagagtggcagtagtgggcccaaccaaattcatcctcatcagctgtgggggagccccaagtcagcctccaggactccggcctcaaacccaaaccagctattgattgccaaaaggacagaagtgacccttggagaccttgggaccaaaacctgcagctagggatgtgaatcttcctagaccactggagccctttgcgagcagaaacgggcagactgtgcagatggtcgacgcagcagggctgcactaatcaaaaatagcctatcaaacattccagtggctttcgaacacgactgacgttctgatggcctcggactcccgcagccatcaagcaacgagactggggaaaacggcaacaatggtcactgggagaccaacgcaacagcgctcaacgggactgaacgaagcctttcgaagaaccactcacacgctctcgagcagcaactcactgagtatctgaaacggcacacccctaaactttcactgtgcgcatgaatacaaaatctcgccaccacaacactacatgtctactacaagaacccccatattacttacataaacgaacacaatcaaatcgctgagtacttaatatgacaaccatcattacaactaactaatacacacactggtacccaaccactactatagaagtactcactctaccaacagcacttcatcacgcaaaattattctccaaacaacacacacacacagaccatctgctaccacaacccagccacctcgactcatatactcacccacaaccaaccaacaacaacactgatgatacccacccacacatcgagccaactaatcactatcacaaactatatctac

SEQ ID NO: 695570 - DNA, 112 bp, Homo sapiens
ttctgcaccacagcggaagacgaattagcagattctctctattattttttgttgttgtttgtgttttaagataagatctggctcaagtgcccaggcgcagtgggaccatctt

SEQ ID NO: 695571 - DNA, 310 bp, Homo sapiens
agaaattcactaataaaaatctttgatttttgtcgagtctgtggggcatctacgtgaaccttgcctacttgtatgtctcccctggacatcatgttttataatttctctcttttgtactctttccctttatttctcacactgatctgacactcaggaaaaatagaaaagaacctacattaaatatcacgggttaatttcccctcgtatatcacactgtgcctctttctctcacctgttctgacctgtcttgacttgaataggtagaggcaactgcatggctgttcatgatacaagtgcaagtcattacaag

SEQ ID NO: 695572 - DNA, 180 bp, Homo sapiens
tcggtacctgtcatttagtccatggcgggcaggtggctcatgcctgtagtcccagcactctgggaggccaaggccggcagattgcttcagctcaggagtttgagaccagcctgggcaacaaggggaaaccccgtctctaccaaagatacaaaaaattaggcagccatggagtaaatggca

SEQ ID NO: 695573 - DNA, 631 bp, Homo sapiens
ttggggctccattcatgggtcacctcgagccacttcagagttcgggaagtgaccacggaccaggtgggaggaatagacttctagttcatgcggggacactggagccagagagtggaaagctgggaaagaccagataagaaaccggcccttggtctccctagggacatgagacaccacattccattggtgctagaaaaacctatccacggatgagtctaacggttccaaacgcctcccaccgggtgtgcacagcggccggggtccatggtcactggggtgcatcaggtggtcctccgattttaagatgagtttccggtctagagatgtcctagtctgctcacgggcgggtggcagtagggtaccctgcgtcctcgaaaagccagagggttcacctagtcagacgaaactccagaacagggctgggggagggcctgacggtccggctcacccacagccgatctgttgcaggtcagcaacggtgtcgtgagcagttgccaaccaccagcctttcgggtgcggttctccagttcacgtctgccagtgggtgagggcagaggcagacctggtcagacccagcgcccctcctccctgaatggagccaaaggttacgagtcgaatcgtactgctaggg

SEQ ID NO: 695574 - DNA, 398 bp, Homo sapiens
  misc_feature (306)..(306): n is a, c, g, or t
  misc_feature (331)..(331): n is a, c, g, or t
  misc_feature (386)..(386): n is a, c, g, or t
tggggtctaattaacgaggagatttgccttctctgcctattcctgtcaacttatttcaattcatggggtcagtagttagattcaaagtcagctgactctattcttcccttttcctagaaatcacatgcctattgttaagatgctggatcattaaaagtcagaaccacagagcatcagtgctgcctactgtagacgcctcctcttccagctcatggggctggatgagctcatcctaattacatgggaaaactgaaggtcagtgcatcaaattaatgcaggcagcattatttcaaagggggcgcatgnacctcccctccctatttacaatttnggtcagtgaaaatgggttgttcttcttcccttgcttgcccaatttttgttcaacngggcctttcagg

SEQ ID NO: 695575 - DNA, 650 bp, Homo sapiens
  misc_feature (333)..(333): n is a, c, g, or t
  misc_feature (417)..(417): n is a, c, g, or t
ccgagtagctgggattacgggcgcccgccaccacgcccggctaattttttgtaattttagtagagacagggtttcaccgtgttagacccggatggtctcgatctcctgaccttgtgatccacccacctcggcctccccaagtgctgggattacaggcgtgagcccctgcgcccggccacattcagttcttatccaagaaattaccccgacttaatcttgagatgatacgattatgccccatattaagtaaaaaataattaagaaaaggttttctctaaatagatctttaggccaaataacccgctgatgaaggcattctgatgccttctatcntgttcacgtcatcttcccaaaaccacgttaaaataacccacctttttgttgggcacatatgaaatttttaaaggagtagaatancccaatgatagagaaccacgagctgcctgaaattgagaattttgattttcttaaagtgtgtttctttctaaaattgctgttccttaaatttgattaatttaattcatgtattatgattaaatttgaggcagatgagcttacaagtattgaaattattactaattaatcaccaatgtgaagttatgcatgatgttaaaaataccaacattttaatttaaggctttgcaacacca

SEQ ID NO: 695576 - DNA, 127 bp, Homo sapiens
  misc_feature (90)..(90): n is a, c, g, or t
  misc_feature (101)..(101): n is a, c, g, or t
tgcccagcccctcccccaacaagatctcttggactcaggcctcaaagcctggcctggttgtaaagtgtgtgtccctgtgtgtgtgttgcnggaggggaggnctggggctggaagtccagaacccagg

SEQ ID NO: 695577 - DNA, 889 bp, Homo sapiens
  misc_feature (515)..(515): n is a, c, g, or t
tcgggactgcgtggacggctggctccatagagaggcatccgtcatttgactaccagacggcggccagcggcggagccaggccgggtccatcagcagcccagcgccggcggctccgcggaaagccgcggagcgctgcgaccgtagggccggcaggtccagacgcgtcagcagcagtcccagcgcatcacatctgtccagcgtgcctccgtgtagatggacagggacagatgagtgagtctgagcatcgtacagtcgcaagtccagcaccgttgggcgcttccaaagctgggatacaagtgacgggagactgcaggaagcaggggccaggggcaaggcccttgcgaagcgagacgtccggctgagtgtccctgggactagcgctgtggtcaggtgacgatcaggtaatggagtcccagaccgagatgtgccagaacaaccctaacgaggaaccctcgggggcgcggaaccaaatacgggggaaaggctacacataagctacatggggcttgcatggnaccataggaatcccccggtacaacacatccactcgacacatatccacgaggaccgggataatccctaccgcggggtctaggcacgtcgcaaatacaagaggtgggcatgaacgggaaagtggcataggaagaggacaggggggaatcacttcgaggcagaagggaaaaggtcacatcgcgcggagtgcggaaccgaagacgcccctgtgatggaggacccctaatgagcggtgggccctggtcctggactttcgcttccaagcggtgagaaggtggaaggacaaagaggttatccaatatcctggggtgaagcttgcgaacaagcgtttttgcttgcccggtctcaccacaaagccggtcaaccacgagagcag

SEQ ID NO: 695578 - DNA, 250 bp, Homo sapiens
gatcatcgtgagtaagaagcctggctgtgtgtaccgtgggaagatgccatagatttgcgttacaggatgtaggagtagatttggtctgtgataggtggaatggagaatacacgtgtaggtgcttctgggtagcactggtgtgtattagtttatgtagccatgccagagtttgtgtgggcgggcgcatgtgcaccacagagtgcactcgaggggactttcagtcacaggatttcataattgtcatcgtcac

SEQ ID NO: 695579 - DNA, 182 bp, Homo sapiens
ggccccctactttatttaaaattgcaatcccccgccctcccttactgcacattttgggtttttatcccttcccaatttttttttcccaaagaatttatgacctattttattacatactctttattttgctcattgcctgtctccctctacccctacacttgaataaaagctgttatgtaaga

SEQ ID NO: 695580 - DNA, 506 bp, Homo sapiens
tgctgtgggggcatcggagccagccatgtaagaatcagagctgctccttcctgtgaatcctaggtggccctatgtcttctgtggagttacagtataaagcagggagctaattaagagtattaaaacttaaaaccattttttgactctgattttaagtacatttttatatgtcagttgctgcccttcacactaccaggccctgcagccacagtgttctgttggagaaacttggggaagtgttttctgaaccagtttctttttcttggggtagagcgtgaaatccagacctgtttttgaaaggacagcacaggaggagaaaagtgactgggacgatgcttcctctcatccaaaacacatgcagagatcacactcactcactcaatagctgtttggtgcacgcttatgcacgacccgcccacctgtgaacttacagtagctgttcatatatgagaagttgtgtttctgtgggggttatttttctggtgtgtgtgtgtgtgtattgtgct

SEQ ID NO: 695581 - DNA, 153 bp, Homo sapiens
  misc_feature (13)..(13): n is a, c, g, or t
caactacagcagnctccttccaagatcagtgatctcagatccccataatatttaataataatgagaaagtttgaaatattgcgagaactgccggcgcaccagggttggtgctccacacctagtaatcccagcagaactgccggacatggtggc

SEQ ID NO: 695582 - DNA, 121 bp, Homo sapiens
cgggattgcgtagtatgaagaccagagaaggataagacaagatggaaaggaggctgggcactggtgattcccacccgtaatcccagcacttatgggaggccaaggcgggcagatcacttaa

SEQ ID NO: 695583 - DNA, 434 bp, Homo sapiens
tggtgcacaatagcaaaaccaaatacttcactaacatatttctgtttaaaacattccctaggtaagttaagaatacttgttaatcattggatttataaaataaatggcaagaatgaatacaaactattacattcctctagttaacaaatttttggcttacataaagggatgtatttattctcagtctctgtttaactgtatgtttttcaagatcagtagtttgggtaaggatcagaagctcatctaaggcaacatgcgctgtacttaaattgccatgctttgggatttcagagcagtttgatgtcaaaagctgttgttagaagtattttcctcagtctttcagtgaatatttaaccccttattttaccttgagaggaagggctgtagtttttattccaaagatgctaggtatagaccatgttgttgctacccac

SEQ ID NO: 695584 - DNA, 159 bp, Homo sapiens
gaatcgagctcgtaccggtgtttccctttgatctcttattattcttgttgttttttttttttggagaagggagttccgctcttctttgcccaagcgtggagtgcaagggcacgcaactcctcagcctcaccaacaagcctccacctcccgaggtttcaa

SEQ ID NO: 695585 - DNA, 167 bp, Homo sapiens
gggggggctcccgcgggggggggtccccttttttttttttccgggggggggcccccctttttaagacccattttttttttgtttaaaagggggggggccccccccccccttttttttggggggttttttcccccccctttgcgcttttggggggtttccccccccca

SEQ ID NO: 695586 - DNA, 1002 bp, Homo sapiens
tagcagagagctcagacagcgaggaggatgagaagccagaccaagccacgcagcataaagcaaacagccaagcaaagcacacagggcagttggcagaagcagcaaggcagcagaaggcaactgtccacgcattgcaggcaggcgctgcatggatcctgggcggcagccagagtccgcggatgcattttgaccgactggtgctgagctcccccaacagctccattctgtggctgcagtacatggactttccacctgcaggccacggagatcgagaaggcccgtgccgtggctgagagggcccttaagaccatcatccttcagcagcaggcagcaggcagaagctgcacacgtgtgggtggctctgctcgaacctggcagaaccatgtcacggcctctcaggcagtccctgacccaaggtctaacgagcgagccgtgcagtacaacgagcctctcaaagtctttctccacctggctgacatctacgccacgtcagagaacttccaggacgctggtgaactctacaagcggatgctgaagcgtaccggcaggagaaagctggtggatcaacatacggcgccatccttctgcggcaggagccaggctgcagccagcaacgcgtgctgcagccgagccaggcagtgcatgctaccacaggcagcatgtggctgtcattgcccaaagacctgccccagctcgacgcccacgcaggcggcatgccgagcgggccaacacccatgagacacacgcatcacactacacaagcgcaccagagcgggcggcccaaccgcacgaccagtcaagcacggaagccagaagggcggtccgggaccactgaccaggaacaacacctaacatggcccacaaacacagaaaccactcaagacatcagggaaacagcaaccagcgagcacaccacgacagccagaacagcacagccctagaaactagacacacaaatcacacaccgagctgagccaccacacaccccggcacgaccacaca

SEQ ID NO: 695587 - DNA, 414 bp, Homo sapiens
  misc_feature (18)..(18): n is a, c, g, or t
  misc_feature (37)..(37): n is a, c, g, or t
aaagccttattgagtggntacaagaacaatgagacangaggaactggagacaagtatagatgactgaagtaattttttagttataaaatggaagaaataaaatggggcagaggaggaagagacgggtcaagagaggatatttaagaggagggaaatttggatgctggtaaaaaatatccagtagagaaaaaaaattaagggtgcagaaaagagaaggtgaactgctaaggtaatgccttgggtagaaaagggggagggcatgcgtagttcctccaggaaggaaggcagggtacatgggcacagatgcagataggtgggtggacacaagagttggaagtctataaacagaaaggaagatataacccaaaggtgaggatgtggggaaaggttgagagtttgaggggaaaagaccct

SEQ ID NO: 695588 - DNA, 222 bp, Homo sapiens
aatatgtacatagacaaacagaaaagattgaagcatttcctcagacgataacacttccacgtgcactaaaaaattgtacaggcctttttgagtaccaggaataagtatatcaggagttcccgtcgtggcacagtggttaacaaatccgactaggaaacatgaggttgcgggttcgatccctgcccttgctcagtgggttaacgatccggtggtgccatgagc

SEQ ID NO: 695589 - DNA, 153 bp, Homo sapiens
atgatcccgacgctctctctgtggtggtgatagggtcggcctccaggtttcaagtcagtgaactgcccgtccttccccttgtttcttgtcgacgcgtgcttgtggactcttggcaaagtacgcacatagggtctcgtccacactcgatcatgt

SEQ ID NO: 695590 - DNA, 439 bp, Homo sapiens
  misc_feature (178)..(178): n is a, c, g, or t
  misc_feature (197)..(197): n is a, c, g, or t
  misc_feature (219)..(219): n is a, c, g, or t
  misc_feature (234)..(234): n is a, c, g, or t
  misc_feature (260)..(260): n is a, c, g, or t
  misc_feature (271)..(271): n is a, c, g, or t
  misc_feature (275)..(276): n is a, c, g, or t
  misc_feature (286)..(286): n is a, c, g, or t
  misc_feature (437)..(439): n is a, c, g, or t
ggtaaagtagtgcccttatttggatgaaacccactaccttctgtcagaaactcaaaaggaatcattgctggcatggtaaccctaaagaaaaacaacccagacaagtgccccaacgacacttaaaaaggtgatttattatcttgcccaagtttaggctgggcatggtgactcatgcctntaatcccagcattttgggnggctgaggctggtggatcaccngaggcccaggacttngagaccagcctgaccaatatgcaaancctcgtccctnctannaatacaaaanttagccgggcatggtggtgtgagcctgtagtcccagctactcaggaggctgagacaggagaattgcttggattcaggaggtgggggttttagtgggccgagatcacgccattgcactccagactgtgcgacagagtgagactctgtaaaannn

SEQ ID NO: 695591 - DNA, 493 bp, Homo sapiens
tccaacgtgtaatgttcggtgggagtggggggggtggtgcgagacttaggttaggagcattggcgacggtgaaggtgatgtggcgctgtatggaagcttgccgttggtgtatataataccaaggatagagatcttatgaagagtatggaacgcctattaggtctctgattataactgagactgagaagttacaataggtagagctttgagggaagagaaaatccatcaagagtacatcaattcatgatattgctggtgaattggccaagaaaaggtagccttgtaatggcagtcgactaagaatgcttatgtgcaaactgatagcttcaatttactagaggtgcatagaaagtttggtaaacaagagacaagtttataggactgggttatatgggcatgtgctaatatgttatgttagagaaagaagtacagattagcaatagatacttgttagatgacaaatcaagagcgaaaagtagtgtaatggagagat

SEQ ID NO: 695592 - DNA, 178 bp, Homo sapiens
tggcagagagacagcccttcccaggttcttttctttagcccacttaaagaacagggacctcagtgctgcaggtttccttaggtaaataaagaggccgggcccaggggttgacacctgcaatcccaacaccctggaaggcttgcttgaggattgcttgaggccagcagtttgagacaca

SEQ ID NO: 695593 - DNA, 327 bp, Homo sapiens
ttttttgagatgtggtcttggctgtcacctaggctagagtgcagtggcaaaatcatggttcacttcagcctcgacctcccgggcgcaagccatcttcccacctcagcttcccaagtagctgagaccacaggcttcaatgtgattgaaaaaattcttcaggcttgtattctctagaatctcaaccgtgataagggtttattctgtaaataatggaagcagtggcagaatcacatgcaaccacatctggctcatttttgtatttttttgtggagatagggtctcactatgtcacccaggctggttttgaaatcctcagctaaagtgatc

SEQ ID NO: 695594 - DNA, 223 bp, Homo sapiens
ctcctggactcaggcagtcctcccatctcggcctcccaaagtgctgggattgcacgtgtgagccaccatgcctggcctcattgatttttaaagtaggacaaggtaaagatctaacccccaagccaggtgtggtggctcacggctgtggtcccggcactttgggaggctgagatgggcggttcacctgaggtcagcctgggcgacagagggagactccatctca

SEQ ID NO: 695595 - DNA, 363 bp, Homo sapiens
  misc_feature (355)..(355): n is a, c, g, or t
gagtgcagtggtgcgatctcagctcactgcaacctctgcctcctgtgttaaagttgttctcctgcctcagcctccaagtaactgggactataggcacatgccaccacacccagctaatttttgtatttttagtagagatggggtttcaccatgttggccaggctcgtctcaaacttctgacctcaagtgatccacctgcctctgcctcccaaagtgctgggattacagacatgagccactgcaccgggcctagaacaggaaatacttctaacgtaaactaccattagagggaaaaatggttcctaaaaggcaagagtagatagaatatgtaagctacggacactattcagagaanaggcagaa

SEQ ID NO: 695596 - DNA, 538 bp, Homo sapiens
tgcaagtcgaaagatattgttctggttgcctatagtgctctgggatctcaacgagacaaacaatgggtggacccgaactccccggtgcttttggaggacccagtcctttgtgccttggcaaaaaagcacaagcgaaccccagccctgattgccctgggctaccagctgcagggtggggttgtggtcctggccaagagctacaatgagcagggcatcagacagaacgggcaggtttttgagttccagttgactgcagaggacatgaaagccataaatggcctagacagaaatttcccctattttaacagggaaagtttttgggaacccccccctaattatccaaattcagatgaatattaacatggagggctttgcctgatgtttaccaaaagccctgggtgtggatggtgacgcaaaggaggtttttatgccggggactggacaaatcccctttacttaaatccgtcctgtttagggacttcagtcaactacagctgagtccataggccagaaagacaaaaaatttttatcattttga

SEQ ID NO: 695597 - DNA, 749 bp, Homo sapiens
attggctccgtagatgtggaggctcaggggaaccgggtctgccgcgcatgcatccctgtctaactggctgcttgtgattcgcggtgcaggtgcttgaggaatccaaagactccgtcgttgcgcggcaatatgaagatggatgctggagcaggccaacgagagggagtgtgaggtgctgaagaaaatctaggtggctcgggccaggggatggagctcgccatgttaaagatacgtagcggaggaagactcgatgaggttctgagtgtcgggcgtgccacgtggtgacaccgggatcgggctgaggcacggaggaacatcatcggtgtccagtgtcccctgatccattctcgacagcctgaaacaagctcacccgtagcttacgcttggaagcgggacttgggaacatccacgctatatagttaatacgagggagttttagagacgtactaggaagtttggaagatatagagagtaactacagaaagcattcttggtctcaaatcgtctaatatattttgatagcttgatatagcacgcagcgtgtaagaagaagtaatacaaaggtgagtcactagatctgctcttgagaagctctaatttgtgtttcctaggggtagtactgtataacaaaagcagaatatgtgtgctatcggttgtgcatgacggaacagtcgggccataatgttcgtttgcctcatttcttccttctagaacaccgaatctagaggggtgtcgccagtctcgctcct

SEQ ID NO: 695598 - DNA, 270 bp, Homo sapiens
tgggggggggggccctttttttttggggccccccctgggcccacccccctccatttttttttgcggcccccctttggggggggttttttccccggcccccaccctttttccttttttttttttgggggggttttttcccctttcctcccccctttttccttttttcccgcccccccccccccccgggggtttttttttttcccctttacccccccgggtgatgccttttttggttttgggcaatttttaaatatttcagtggggggagga

SEQ ID NO: 695599 - DNA, 300 bp, Homo sapiens
agcctggccctgtatatgggccagaaatttgtttggtgagtggatcccgtcggacttgctgacgaatatagagtcgacgcctcatattttctcatcagcttcttcagtctccatccctatggtcatcccactgaaatgactgtcaactgatcatgtcctctcagctgctgtggtcttagctcatcgccatgctgggtgcccatcccactggttcttgcaccctttccaactttttctgtaattgctgttctcatatctgaactggaatgctttattcttcaatttctgtgcccatttcaa

SEQ ID NO: 695600 - DNA, 325 bp, Homo sapiens
ctcacctctctcacacggttctctccacactggtatgggagcattattaccttctttgcttttgagcccttgtatttagatgtcaaagtaagtggtattttttctttcccataggaaatcaatattttgagtaggctggtaaccgttcagacatgtaaaggtctttttgacactcatatcctagcatgaattgaaagtaagctttgaattttccgtttattcttttgaatcatcagaaagtagttacagaaaggaagctttttgagatagaggataccattagtcctttgcccttaagtgtgtaagtttgacccagtgtgtagag

SEQ ID NO: 695601 - DNA, 926 bp, Homo sapiens
catttacccaaataaagtgataggcgatagaaattgaaagctggccgcaatagatatagtaccgcaagggaaagatgatacattatacgcctaatgcctaatatactcaaggactaacccctataccttctgcataatgaattaactagaaataactttgcaaaggagagcccgagctaagacccccgcaatacccagtacgagctaccttatagcaagcatggctaacagagacgccaccatcgccagtctatgatagctaaatatagatgggagagattgagtagtgtatgaggcgaaataagtctattcgagtcctgcgtgatagactggtagtcctaatgatatgacatcttgattattgcgaactgtattaaaattgtgtctcacagaggccctcctaagagtccccattggtagattttacactgtatatgtcccttaatagaggaacagcttctttgtgacaactaggaaacaatactcttgtcgtacgagatgtcaataaattttcagcaatccactacgatacggccgtaaaagcaagtcaccatgttaatgaaagcgttcaaggcgtcaagcacctcatctaccttaataaaagatgccaaagcatatgaagctgaactcctcacacccaatttggacccagtctatcgaccctgattatgaacgaacgtaaattgttcagtaactacaagtcaaacctaatgaaaatacgatatctaccttccgacataatgcctaggcgtgagaatttaaaaaactacctggaaactggaccatattaacagggccaattgattctacgaattctaaactaaacgaagtcattattttacccgtcaattgtcaaaccccaaacaagaggggccatggctcattaagcgaaaagggtttcccccaaacagttccaaggcacctcg

SEQ ID NO: 695602 - DNA, 364 bp, Homo sapiens
accccctgctcccggggagatcactaaagaaaaaaaaaaaattcttagaaaatttttgagcatgagacagaagatgtccctatcggggaatttgaaaacaaaacaaaacaaaccaccacacccttttcagaaattattttcattggagcaaagattcccaaactacattttttttttctttttgaaaattcacatttccaagggatttttttttattatacttaaagttctagggggcatgtccacaacatgcaggtttgttacatacgtatacatgtgccatgtgggggggctgcacccattaactcatcatttacattaggtatatctcctaatgttatccctcccccctcccgggatacag

SEQ ID NO: 695603 - DNA, 392 bp, Homo sapiens
gggcccagattatgatgtcatgtaactcttttattgttatcaaaaaaaaattttttgacacagtatcttgctgtgttgcccagactggagtgcagtggcaagatcacggctcactgcagcttccaactcctgggctcaagtgatcttcctgtcacatgagtctcccaagtagttggaacacaggtgccagccaccacacctggctaatttggtttggttttgtttttttagagatgggctcttgctatgttgcctatactggtctcgaactgctggcctcaggcaatcttcccccctcggcctcccaaagtgctgggattacaggtgtgagccactgcaccctgcctcagtacctccattcttcccacacaccctcctcatgtgctccttcc

SEQ ID NO: 695604 - DNA, 446 bp, Homo sapiens
  misc_feature (67)..(67): n is a, c, g, or t
  misc_feature (286)..(286): n is a, c, g, or t
  misc_feature (298)..(298): n is a, c, g, or t
  misc_feature (388)..(388): n is a, c, g, or t
  misc_feature (402)..(402): n is a, c, g, or t
  misc_feature (430)..(430): n is a, c, g, or t
  misc_feature (437)..(437): n is a, c, g, or t
aaatgtagggtaaaaaaatgtttacatgggcatgattcttttttataatttactttaaagctgtctncatgtttgatgtatctgagcaggttgctccaccaggtagctctaggagggctggcaacttaaaggtggggagcaaagaattctctttatccaacatccaacattttggcagatttgaacttcttcaattttttgcactcaaagcttgttaaaatagttaagcgggcataagttaacttcccatttacaaactttgcttaaaatttgggggaaaatttanaaaaaaaattgncaggattattggaaatttgttataaagaatgaaacattttgtcaaaaaaaattcaaatttactttttaaacatttgaaaaaataaggcanggttgtggttaatntggtttatttttgttccccaagttaaanaaatcanaaaacttta

SEQ ID NO: 695605 - DNA, 112 bp, Homo sapiens
atgctggaatagctcccttttttggtcttggttcaggggggtgggctttccctcccccctccccctattatttggggataaagaatataaagacaaccctggcaaaaaaaaa

SEQ ID NO: 695606 - DNA, 556 bp, Homo sapiens
  misc_feature (165)..(165): n is a, c, g, or t
  misc_feature (168)..(168): n is a, c, g, or t
  misc_feature (172)..(172): n is a, c, g, or t
  misc_feature (182)..(182): n is a, c, g, or t
  misc_feature (195)..(195): n is a, c, g, or t
  misc_feature (202)..(202): n is a, c, g, or t
  misc_feature (204)..(204): n is a, c, g, or t
  misc_feature (217)..(217): n is a, c, g, or t
  misc_feature (221)..(221): n is a, c, g, or t
  misc_feature (224)..(224): n is a, c, g, or t
caacagggcatcccatgagtgccagcaccaagctgaagaggaacagcgcaacccaccacttcccctggatgtttccttgtcgcatggcgtggcttgagacacgtgttcattcccaccccagcttcaacgtcacagcccgtgacttccaacgcttctttgcagacntgnactntgaggaaggntggtacatgtggngccagtnangtgatttgggggnaggnttncagcaagaccttcacctcctccagacccccctcccctcctgtgtgccttgtaaatagaaccagatcaggccgtctcctcttcccttcccgggcccccgggtgtaaatatattgttatgatttttttcttaaagaaaacgtcaattcgcaccgttcaggctggcgccaggcctcccacagctggaatttgcctcttgtgctctggccccaaggtcaacttcctcctctctccaccctggagggccaggggagtggaaagagctccttatgtcttagtttccacagtaagggttgcctgggttcagacctccgttccataaattattggcatga

SEQ ID NO: 695607 - DNA, 332 bp, Homo sapiens
gtatccaaatatcttccaccttgtcctcgcttattttctcctttctgttatcgtatatgcttgatttgatgataaaagagtttgttgcagtagctgcttcctctctgagtgcttctctctgggtcaaaaattcattctttatagatcgtttcttggaattttctagtctctggaagagaaaggtctctccatacggaaagatggaagatgaattctcctcatttgaattttgccatgccacagatttttcagttgaggtagcaacatttcttctttcacggaaatagctcccagaaactccttttgttgaccctggaatctctggtacaggt

SEQ ID NO: 695608 - DNA, 137 bp, Homo sapiens
  misc_feature (19)..(19): n is a, c, g, or t
cagctctctctgatgcganctgggtcctttcgcttcttccagagcttcctttaccatatctgcagtgtatttaacatctgtgcactttggcttgccctttgtagcttcttctaacaacatctcagctctggcaatgt

SEQ ID NO: 695609 - DNA, 309 bp, Homo sapiens
gtggaagtgacatcgtctttaaaccctgcgtggcaatcctgacgcaccgccgtgatgccagggaagacagggcgacctggaagtcaacttacttccttaagatcatccaactattggatgattatccgaaatgtttcattgtgggagcagacactgtggtctcacgcagattcagcagatccgcatttcccttcgcggaagactttggtgcttatgggacaagacacattatcgcaggccatccgaggcacctgagaaccacccagcttgtgagaacttgctgcttcatatccgggggaatgtgggctt

SEQ ID NO: 695610 - DNA, 776 bp, Homo sapiens
  misc_feature (519)..(519): n is a, c, g, or t
agcggagtgttcactccaggccacagactccgaccggaactgacagcgcggcctccaggattgaagccatccctggcttgaagtagcctaaggagatttgctagtttgagtcctgggagatgagatggggaagatgggcccaagctgcaacatgaaggtccatgatgaacagttggcatctcctacagtgcctgccacttggtaatgttcaatgcagccaagggagctaaggtaatgaacaaaacagagaagttcctaccctccctgatgttcattctagcaaatggagacagatgataaaaactgcacatcattgagcaagagggacaccatggataatggaaagatctacggcaaggctggctgtctgccctgtctaaggaggacgtactggaccatcctgctctgcacatccagatgtgtccatgaatacatccataaaacgatggcctgtggaatcctataggaaaatgatccagagcctgggcggtcagaaggaacaaacacttgatttacaanataaatcttctatgtttatgttttaaagacacacagaggaaaaacatttttaaattcatgatttccccccccagattttaactattgtaatctctttctttcctgagccttaggcatcttcattataaaccaaaagatataacttgagattttcccagggtttatatactcgttagagttggaaacatgaaaatggcaatttgggatgtctctttggagtcaaaaaccttataaaaatataatgtactttcaaaaaa

SEQ ID NO: 695611 - DNA, 852 bp, Homo sapiens
  misc_feature (68)..(68): n is a, c, g, or t
  misc_feature (110)..(110): n is a, c, g, or t
  misc_feature (143)..(143): n is a, c, g, or t
  misc_feature (174)..(174): n is a, c, g, or t
  misc_feature (177)..(177): n is a, c, g, or t
  misc_feature (365)..(365): n is a, c, g, or t
  misc_feature (391)..(391): n is a, c, g, or t
  misc_feature (507)..(507): n is a, c, g, or t
  misc_feature (519)..(519): n is a, c, g, or t
  misc_feature (623)..(623): n is a, c, g, or t
  misc_feature (705)..(705): n is a, c, g, or t
  misc_feature (716)..(717): n is a, c, g, or t
  misc_feature (780)..(780): n is a, c, g, or t
  misc_feature (798)..(798): n is a, c, g, or t
  misc_feature (803)..(804): n is a, c, g, or t
  misc_feature (808)..(808): n is a, c, g, or t
  misc_feature (819)..(820): n is a, c, g, or t
  misc_feature (831)..(831): n is a, c, g, or t
  misc_feature (835)..(835): n is a, c, g, or t
  misc_feature (842)..(842): n is a, c, g, or t
ggtaagggcagtcgtccgcgctggctgggcagggagcggcagcagcgagccggggaccccggcgccgnccgcgcgcggtgggactggggctgcggtcccggccgggtggngggctcctgggacacgtgaccggggcgggagcngggccgggcggacgggcttccgcctgggccnggncgcggcccctctgagcgcccgcctccccggaggccccgtctgaggtctggcagtcagagacagccgggcgcccacggcccgagcgcccacggcagcaccatgcccgcactcctggagcgccccaagctttccaacgccatggccagggcgctgcaccggcacattatgatggagcgggagcgcaagcnggcaggaggaagcacagcaggtggcntacagatgatggaacagaagcatgaaggaagaccaggagcagacggcaagacaccaggagatggacgagagaatgtcattagcaggagaccaaggaacaaaattctgaagttgganggagaagctttnggctctacaggaagagaagccccagcttttcctgcagctcaagaaagttttacatgaggaagaaaaaccggaggcgaaaggaacagagtgacctgaccaccctnacatcagctgcataccagcagagcctgactgttcacacaggaactcatctctcagcatgcaggggagccctggagggacacnatcgcccaggnnaccctcatggcagctgacaggagcccaaaccaaatgttttggacccccaagtgcttacgaccnggcactacgtggggtcanccagnngctnttgcagggacnncagagcatggncaanccaggcngcctggtggg

SEQ ID NO: 695612 - DNA, 180 bp, Homo sapiens
gacaagccgctgccgccgcggatctcaccgtcgctcaggctttttagaacttcagccataaaatgggcgcattttccttgatcatatcggtggtacccgtctgttattcttgtgccaactgtgatacgatccttaccaaccgctccgaactcctctccactcggtttcacaggcgccact

SEQ ID NO: 695613 - DNA, 722 bp, Homo sapiens
  misc_feature (68)..(68): n is a, c, g, or t
  misc_feature (235)..(235): n is a, c, g, or t
  misc_feature (261)..(261): n is a, c, g, or t
  misc_feature (377)..(377): n is a, c, g, or t
  misc_feature (389)..(389): n is a, c, g, or t
  misc_feature (493)..(493): n is a, c, g, or t
  misc_feature (575)..(575): n is a, c, g, or t
  misc_feature (586)..(587): n is a, c, g, or t
  misc_feature (650)..(650): n is a, c, g, or t
  misc_feature (668)..(668): n is a, c, g, or t
  misc_feature (673)..(674): n is a, c, g, or t
  misc_feature (678)..(678): n is a, c, g, or t
  misc_feature (689)..(690): n is a, c, g, or t
  misc_feature (701)..(701): n is a, c, g, or t
  misc_feature (705)..(705): n is a, c, g, or t
  misc_feature (712)..(712): n is a, c, g, or t
ggtaagggcagtcgtccgcgctggctgggcagggagcggcagcagcgagccggggaccccggcgccgnccgcgcgcggggccccgtctgaggtctggcagtcagagacagccgggcgcccacggcccgagcgcccacggcagcaccatgcccgcactcctggagcgccccaagctttccaacgccatggccagggcgctgcaccggcacattatgatggagcgggagcgcaagcnggcaggaggaagcacagcaggtggcntacagatgatggaacagaagcatgaaggaagaccaggagcagacggcaagacaccaggagatggacgagagaatgtcattagcaggagaccaaggaacaaaattctgaagttgganggagaagctttnggctctacaggaagagaagccccagcttttcctgcagctcaagaaagttttacatgaggaagaaaaaccggaggcgaaaggaacagagtgacctgaccaccctnacatcagctgcataccagcagagcctgactgttcacacaggaactcatctctcagcatgcaggggagccctggagggacacnatcgcccaggnnaccctcatggcagctgacaggagcccaaaccaaatgttttggacccccaagtgcttacgaccnggcactacgtggggtcanccagnngctnttgcagggacnncagagcatggncaanccaggcngcctggtggg

SEQ ID NO: 695614 - DNA, 375 bp, Homo sapiens
gtacctcggaccggttcgcagtaccccacagcacagcaagcggatgacaatatttgtaaatgtggcaatttgaagaacatagtcaacgtaacaaactcttgtataagcttttctggtttatctgaaaactggccaattctttccttttataaggtctaattagacatggaaagtggcatatgtactctttgagtgttccctcatctccatcaactactttccacagtggacacaggcttgaccttaggggctgatatggagccccactcctggtgtactggttgggctcattttcttgggcagcagagggtataggctagggctagttggataagggggaaaggtgcctgatgatattggggtggaatctcatta

SEQ ID NO: 695615 - DNA, 688 bp, Homo sapiens
ggaggagctcgcctgctgccctcttgcgcgcgggaagcagcaccaagttcacggccaacgccttggcactagggtccagaatggctacaacagtccctgatggttgccgcaatggcctgaaatccaagtactacagactttgtgataaggctgaagcttggggcatcgtcctagaaacggtggccacagctggggttgtgacctcggtggccttcatgctcactctcccgatcctcgtctgcaaggtggccaggaactcccaaacaggcgaaaaaaatgcttgccctactcaagttttcctcctttccctccctgggttggtgctggggcatttggctcacttcgcttcatcatcgactgaggagcaagggccaacgcttctcctcttggatctcttccatctgttctctgctgtggtcatgctgtagctgaccaagctcgtccgggggagaagccccttccctgtgggtctgggtctggcgggctcagctagtcagagtacgtatgatattgtcgacagatagacacgtcaagctttcgacttccgtcccgtcgaagaaattgtcccgccactagtcctctgagggctgactcccagtctcttcactctggtcctcaggcgaaaactgggccattaccagagtcttccttgctcggtgcgacacctgctgtccgattgacggtgatc

SEQ ID NO: 695616 - DNA, 107 bp, Homo sapiens
tattaaaaggcccttttggacgattattcagccactactagcaagaaaatctgaaaggtctcggcctaaagcagggcctccccggaagggagcccaaagggtaccga

SEQ ID NO: 695617 - DNA, 288 bp, Homo sapiens
  misc_feature (27)..(27): n is a, c, g, or t
  misc_feature (63)..(63): n is a, c, g, or t
  misc_feature (80)..(80): n is a, c, g, or t
  misc_feature (103)..(103): n is a, c, g, or t
  misc_feature (113)..(113): n is a, c, g, or t
  misc_feature (119)..(120): n is a, c, g, or t
  misc_feature (123)..(123): n is a, c, g, or t
  misc_feature (141)..(141): n is a, c, g, or t
  misc_feature (145)..(145): n is a, c, g, or t
  misc_feature (173)..(173): n is a, c, g, or t
  misc_feature (178)..(178): n is a, c, g, or t
  misc_feature (186)..(186): n is a, c, g, or t
  misc_feature (190)..(190): n is a, c, g, or t
  misc_feature (198)..(198): n is a, c, g, or t
  misc_feature (204)..(204): n is a, c, g, or t
  misc_feature (206)..(206): n is a, c, g, or t
  misc_feature (209)..(209): n is a, c, g, or t
  misc_feature (214)..(215): n is a, c, g, or t
  misc_feature (218)..(219): n is a, c, g, or t
  misc_feature (223)..(227): n is a, c, g, or t
  misc_feature (234)..(235): n is a, c, g, or t
  misc_feature (280)..(280): n is a, c, g, or t
  misc_feature (282)..(282): n is a, c, g, or t
ggccttttacagatgtcagctttcacnggcctccaggcccaacctcccactaccacccaatcngcctgccacagcaaagngcaggcaccctgggccccctggnggatgcgggngggggnnacngggcatccggggggtggncgancttggtgaccagcccctggcgctttccngagangagcttcncatncccaaggnacgggncnaangggannttnncagnnnnncggcgcnnagcctcccccgcccggccttccgcccccgccccttgacctgggcntnccgctt

SEQ ID NO: 695618 - DNA, 612 bp, Homo sapiens
gccgggcgcggtggctcacgcctgtaatcccagctctcagggaggctaagaggcgggaggatagcttgagcccaggagttcgagacctgcctgggcaatatagcgagaccccggttctccagaaaaggggaaaacaacaaaaaaaaaaaaccaaaaacacaaaaaaaaaaaaaaaaaaaaaaaaaaaacttgtgtgggggcgcgcgctggggcctgggaaaaggtttttaagaccccattggcggtgaggggcgcgcgggggccacaagtagaggtcacgtgcgaaactgtgggcgccaaaagggtggccccaaagagggagaacccgggggcgcaaggagaaaaggggcgcggggagtctctctcacacacagataaaaaaaagagcgcgcggcgggggggacaccgcgagagagtgttctttgtgagacacaaattttctcaaaagagctgtgggggactctcgcgagaagggaggacacaataacacgggggggggaatttcttatataacacagaggaggaggggctaccaaaagagggagagagcgctatggatgaaaatatatacaaattttataaccccccgaaggattggggggggggggaagc

SEQ ID NO: 695619 - DNA, 542 bp, Homo sapiens
gttggagcaagctggtggaatgatggtggggggggtctggtcagtcacatggtcctcattgcaggtctgggattctgggtctggctctccctggtcccccggtactggttctcatcctcatcctggcccgtcgtctccaggctttcatcttccggttcatccaggtcggtcagggtgccgccttggactgggggccgactctgagtctttcttggtgtggactggttttggggaagggtcacctcttctacatgggggacgggtgagggctcgtccaggtccttggtcaggtcttctggctcctcttctcgggggccacgcttggacttagggtaaggggtggagggacctttcttagcatttttcttcttggcttcgggggtgggtgaaggagagggggagcgcttcctcttcttatagtttccccccttctggtcccgtcgatcggaatcggggcggttcacctcatcggtcagggtctgggctgaaatcttcttacggggggagacagggttcgggtcatcatttacttcatagtcttc

SEQ ID NO: 695620 - DNA, 1633 bp, Homo sapiens
agcgggtgcacgagggcccgggccgcgagcagccgcggcctgtcccggtcgccacccttagacagcggtcgctggtctggtgccgaatgcggtgttcccctgccttagcctgctgtgccgcctcccaatgatgagctgggactggtgcgtgccctcgtcctgtccaagtggccgtccgcgagcgccggagcgctcgcggttgggcccgcgccccttctcctgcttgcctccgcgccccaccgcctgctggcacgcctcgcgtgccccgatcgcacatgcagcattgcacccttgcacgagattacccggagcaccacactacaaagcgacttgcccccgcacgccaccacacatgcatgtccacagacacacacgcacaggacacacaccacccaccaacttcccgcacccacgaccattaccctgagccaccccctggcgcaacgccacgccacccgacagcacgcgcaccaactcgcttccgcgacgaaacaccccccactcctcccccacccattcttctaccccaaccccaacccgcaaacctggcctatttccacctcccacaccgccctcgtaccacccccctcttccctctatcacaacaccccccacctcggtcacttacaccactctcccacccgcccccactcccatctctcgacaacaaaattcgcgacccaacacccccgttacaacagccttccccctcgccctccacaccacacaccatctcagctcccatcctcccgtccatcacacccactgctccccatcccaccaccacaccctcgtccaaccaccatcatcaccactccactcaccccccttccaaccccccacactagctcctgcacccatcccactccctcatcgaccactctccccaaacatccacatcctacacactcgctctaccaacacacgcaccaaccacacacacactgagccactccccaaccacctctcgcgcccactatcctcactccaacacatcccacacatactcccaattcctccaccctcaatacactattcgacccactctcaacacaccaatcatcacaccctcactgcacacccctaacaactatcaagcgccttcatagactcctctcacccactcccctagcccacacatcaatctcgtccaccatcagccctcaccctaacaccatccaccagcccatcataacacaccatcatataacttacgtgctacaactcaaaacccaactatactcgacacgactcacaatcagtaaaccaatacactaacactacccctacttatcacaatcacatcagctatcacactacgcacttacgcacattaacctacttaactaccacccctctaaccgcatccgactcgactcacgactcctcagttctccccacacaaacccacatctatcccactgccctctgctactacccactcccacacaccatcgactcccatactcacatcaacatacccctactactatcgatcacacaacaccccataccaaccacaccctactacatcacccaacatactttattccagcaatctaaaaactctacttaaccacacgcaatctaccgactacgtcatacgaatcacccctcctagttccgccaccac

SEQ ID NO: 695621 - DNA, 230 bp, Homo sapiens
gacctccatttcccagaaagacgtgattatcctgtctcaccctctcaagaagctgaggaaagatcacttgaccctggaaagtcaaggccacagtgagccgtaattgcaccactgcactctagcctgtgttgaaaaagcaagcaaggaagaaaagaaggaaagaaagagaaagagaaagaaaagaagaaaatgttggccaggtatggtggctcatgcctataatcccagca

SEQ ID NO: 695622 - DNA, 278 bp, Homo sapiens
acagggatatatgtcccatttttcggctgagagattcaatgttggtgctatatagaacactaagcaggtactaaagactaggacaatttgcaggagaaaggctattgaaaaacttcacaataattctacaggaagccagataatacaacttctaataaatgccataacttagctataacctctatttgtaccttgcacaaggatctaggttcaaaataagctcgaaacacagcactcaccacttcgacagcagctcatagtcgaatgtgaggaacttg

SEQ ID NO: 695623 - DNA, 951 bp, Homo sapiens
gctgcttagaggctgtctgaggtcacagcgagtgtgctatgtgttgctggtgcacgtccacgcgcccgtggtgctgtctgctgtgggtcgtgcgttgaagtgaattgaatccattgtgttggtgaacttaagatacgtgaactcgggacatgctttgtgcttctcggggggggcttccgtggtctgatgcttatacgttatggagtcttgtaccttgcgcgtcttaggctcagcccctagtgtttaagcacgagttgagtccggtatagacgtttgatgccaggacccacgtgaagtttctccggttaaagatggggagtcgctcgaaatgtggtaggattctttataggagcaggaatccatttacgcgcccctttataaagggtagtaagttctccacagaaggtgcgcgaatatgggaaaattacagaaaggaaaagagtatgtgcaatgacagccattagagtaaggaaccatggaactgttagaggagtggctcttccaaacaagaaggaaaaattgtctctaggttcagtcagagctttcaacaagtaataactttctgtatcaaaatcagagtaaccctttctgtattgagtggaggtgttttgaaaatctttactcatgcaaatgtcaagttggagacaatgtctactagaattggtttgtacaataaatgcggaccaaataatttatggttatctcaaagtgaactgaatgggtaattaggtatgcgctggagtgtagaaattgagctaatgtgcatattaatggtaatagtataaatgcaatggtaattataatataaagtgaagaaatgggaagaaagcttttagaggacatgtcggtatacaagaggtgcccttgtttaaatatagcaaaaaaaaaatgaggggcagagaaaataggagagagaaaaaaaagttgagaagggaaaatagaacacataaa

SEQ ID NO: 695624 - DNA, 292 bp, Homo sapiens
  misc_feature (119)..(119): n is a, c, g, or t
  misc_feature (125)..(125): n is a, c, g, or t
  misc_feature (256)..(256): n is a, c, g, or t
  misc_feature (270)..(270): n is a, c, g, or t
gaactgagataaacaggcctttagtgtggcctagaggactatctggctaggagttaggctgtgtttactgtttgatgtagctttggtgtcagagattaaaatttcctctcgtgtaactncttttntctcctttgttgtctttgggtttccctaataactccttcataagtaggttccgaggcttgtagttatttaagctgtaagtccctgttattacacaggagccctattgatgtggtgtgtgtgtgtgtaaaantgttctataatctnatgattagctcttagtgagcct

SEQ ID NO: 695625 - DNA, 1253 bp, Homo sapiens
gctccgtctgctgggaccaggtcacaatagaccaggtaccaggtagttctgagccagaaaggcaggcccacaagaccatcctaatgggtcgcgtcgacacatgggctgatgcttgtgtgagccctgctaggcagatggaccccgttgcagaaagagcttgtgatggagctgatggtaacctgcgggtgtcgagtgcacgtgtccgtagaagacataggacgacgtcgtgaggtcagttcgctcacaggagaccatacctgaaggtgtgggactatgctagttcccgaaagtttctttgtaagatggacctgcagcgattgccggacctggagagaccgcagagagcacctaagctagaggtgcgcatgcatgtcgcgcaaggacccacaattggctatcatagtacgtccgcggacataatgaacggtcttagtgagactacgacgcaaagatcgggaggcctctaggcgcctaagggctatggtagtctccggaggcacaagtgaacaactttttaggcccgacaagaaagagatcgagggtgggaaacccgtggtggcctttctattattttgcgctttaagcgggcagacgtccgcaagctgggagtcgcgtcccatgagccccttacaattgggggaaagagtggaccttggtcagacttcaaggagttgcacgtttggggccccacaggcgcaatgaccggcgaaaggggtccgtacgtacgaacaggggcggatgcccaggaggaacctttactcaaagcctgcatgcttggaccagcttatatccacacctgtatttcctgtgcgtgaaacgaccacccagtccatgggtggtcctcattggaacacaaccgctagggattgtccccttgtgtagagcgcccttgggtgtcgcctttgacatatgggattggattcccagaacgggtccacccatatggccatccatgtgaacgggtcacttagggaaaggcacccacacgatgtgttacaccaaccagatgtcatacgttgggccatagtccaattggtacacacatcgcggggcgaaatttggacggggagcttagaagacaacaaacggagagaaggccaagaggctcggggcggttgccatcgggacttggactgtttcgttcccaacgggcctggccccttggtctattgccattgccttgtcgtgtggcactgcgcaaatcctgggggatataaaggccgccgtgtagggaactggaccaccccacaagc

SEQ ID NO: 695626 - DNA, 498 bp, Homo sapiens
tagatttgtgcccagatcagcatgcagacgagaacaaagccttcaatttcattggaaattttaaagagagtaggatcaagaccctgaagcagttcgtttgaagaactataacaggagatgaaacatggctttaccagatacaatcctagaagacaaagcacaaccaaagcaatggctaccaaaaggtggaagtggttcagtcaaagcaaaaacagactggtcaagagcaaaggtcatggcaacagtttttggggaagttcaaggcattctgctggttgactttctggagaaaccaaggaaaatactgcttattataagagggttttgagacagttaaccaaagcttttgcaggaaagcttcaccagagagtcctttctactgcaacaatgctcctgctcattcctctcatcaaacaagggtaaatttgaaagtttcagtgggaaatcattaggcattcatggtatttggtttcgtgtagtatatagtgtaaactgatt

SEQ ID NO: 695627 - DNA, 780 bp, Homo sapiens
tggggcttcagagataccatcttattctaaagaacgtactgaccaaaaagtaggggaggggcgggggtcttgcgaaatttaatataaataagaaagagggggtgtaaagaacttctctcgtgtggacccgagaaggcgcttcagtctctctcgggagttcacagtgcagtagaaggaatctcagttttttgggcaaaggtgtccagaccacaagacgagggggaagaaccagggcgagggcgctcagcataaaacacatggagcggggcgggtgcctccgcacccggagatactgaggccccaagggagaacacgaccatcgaacgggaacgggaccaccgtgcagcctacaagagaccagtcgaaaacaccgcggaggcggagggaagaaaagataaaacagaggacatacacaggcacgccagaatacaccgaaaattacgaggttggggaaaaaaggcggagacaagagtgagaagacgtacggaaacaacagcgacccccacaaacgaacccccaccacagacagcaaagcagcagacaaccacacataccacaaagaggtgcaccacagttgtaggatgacaaaaagaggaacatggagccgacaccgggatcgaatgcataaagaaaagaagaaccaccacaccccaaagggacggtacccacacaacaacaaaacagacaagagtgggtgtccgcagaagaaggaaccaaccaacacgagacacccaccaggggaggagtaaccgtctgacgaaagaacgaggaacaaaaagg

SEQ ID NO: 695628 - DNA, 890 bp, Homo sapiens
atttgggttttattgtttatgctaaataatactaaaaaataaacatttcattttgaaggcagggtttgaattattcaatttgatccatttatttaatataacgaaaaagaaaggagggggaatggagatcatggtccacagaacaatagtaacgttaaccccgtacaccaacccccaaacgctctatcctatgcatgtgaacatctccacacatcaccatgtcagtgccgtgatattcggatggatgtgcatacgtcatgcaccccatggagacgtgcgctgaatggcacagaggagacatagtgggtgccaagtttaattactctcagaaggtaatgtctagactcaatgacaaaactttgtgttggagcttaatagtccgatgaggagttgtactctctacccagggtgtgtcctcgcatcaatatggggctggatgcctatcgattactaaaagcagctcaataaaaaggccttgtgaaaatatctcttacagtgggaaggttagtggcgattggagtggcggtttaccgaatgcatagaaagtggactagtcaggcatgacatgatggaatatttaccggggtcttcactcaaaatttttgggtaccatggaccaacttagtgtgacttcgttggcattatgaggatttgacacagtagaggtcccaccgagtaaagttgtgcacttccgagggtaagtcgtaatgcaaagagcaaaactaatcccgtgcattggacggcaatctgaagattgtgtccaagcttagaagatttcttgcctgccagatggggccaggacaaaagggcaggtagaatctctccctgtgggagccacaaggcaaccgaaaggcttctcctaccatgcaagtcagacccggacaggggca

SEQ ID NO: 695629 - DNA, 390 bp, Homo sapiens
  misc_feature (292)..(292): n is a, c, g, or t
  misc_feature (360)..(360): n is a, c, g, or t
  misc_feature (381)..(381): n is a, c, g, or t
  misc_feature (387)..(387): n is a, c, g, or t
cgtgttgatcagtccacccagtctatggtgttttgtaacggtggccagagcagacaaagacagtatgaaaacataacttctccccacacgctgaagttataacggcaatgctttcaacaaattgggcaacgcttttgtggttcccactgggcgagggttgaagcttacaaaacacaaaggcatttttgaacgtctggtctttgaggtataatttctattcagcaaattcaccacttcaggatggatggttctgtgaattctgatgaatgtaaatggctgtgaccagacatanaactttggccgaatgtggtgcctcatgcctgtaatcccagcactttggacgtgtcttgttcataggangatccagaaattctcgagtantaatantcc

SEQ ID NO: 695630 - DNA, 752 bp, Homo sapiens
gtgtccctgtcataaggttagggtctcttcatagcgttgggtagctatcggactggggccatgcgtgtcacgacaggtgtgacttcgccacaagacagcccggaactgggctggttaatgcaggtgaggaaccagcggttgatatttgggcaaggcctggcggaaagaaggctgctagaacctgcttatagagccacaacagggtgcagacaactgtgatgtcagccaatgtcactcgttcgcccaccagaaaagtcctcgtcgttcaagtaagcatccagcagtccccagaattcgcctcacttcctcctttgcattctcagtggcctgtattgtctcgtgctgcatgagtgcccaaggtggggaacacccaggtactgtttctgggggcactatatcgggatcagcaaagctcagcccagcgtgcactcactctggtgctcgctggcctcgtggtagtacgttctccgcgcacgctcctgcatctgcatcagcatagatagtgcaataggcgttgctctcaaacacacagaatccatcatcaccctcaaatgctgggaccttgccggcaggaaatttgcggagaaattcaggggtgcggcatgctttggccaaaatggaagtaggggtggtgcggacgagcacgcaggacctgagccccgtctgtactgagcagcgatgagagccttgaaggccctccagttttcagatacgtgtaacagggtcccagccgccatctagttctagatcgc

SEQ ID NO: 695631 - DNA, 1061 bp, Homo sapiens
gtgtgggcaagtcttcggtctagacactcggctggatcagctctccgaacattccttacatatgagtgtgggctgcccggctgggcaggcaaggatccacatcaggcctccttcagttagctagctagctcacctactacatagcagctgctgtgcacatacggctacagcgagtcctgttgcattattcggtagaatagtccgcaaacttaaaggaagttgcaaggttagaattgtgctttgaagattcgtgagttgtgttccgtgtagtagattttcagtagaaaagtccgtgcaagtggagacatgccaggtttctacaggagagcctgagtggatgggctttgtatgcccaaggctagccatgcccgtactgactcagagagtgaccttcctgaagagcgctgggagattctgagtggttcccacagcttcacaggataatgcagctggctgtggttgtatcagaagtacttgagcaatggttcctcagtttgggtctgtttggaggaaggctggggccatcactgcacacgtgacatccctggttcagtttactcagtgatccctttgtataaggacactctgaaggcttccagcatgtcggtcgaacaagagtgagtccattcggtccccacactcccagtccagacagcagacaagtgcaccatcaaatgatcacgggcaacgcgaccgcccacagctcatctcacagaaccaacaacatgggatcaccagcgtacaagcacgacatccacgcattgcatctccgccgagtgacaagcgacgactcactaatccggtcgaagtaattgactacgtcggagaccccagaaaagaaaatacgcaactatagcgaacaggcaaagccacaaacgacgatctaacgagcagacgaacgtaagaacggaggaaaacgtgcacacagacaattgacatacatcaccgtctcccgttcggctagctcgctctgtgctgtgggacgtcatacaacaaccacaaaacacagacgagaaacacaaacacaaaagaccgagccaaaagacacacaccaacaaaaa

SEQ ID NO: 695632 - DNA, 374 bp, Homo sapiens
caagacattgaacaaaggccaaataataaacagcctttatttttaaagtaaaattcattttatttgcggggtagacttgtatggtagactgttaaagacaattttatgactatttatgcacattataatggttacatctgctttttgtctttaaaataaaaaaaaaaatcagagaaaagcccacctttgaatacgtggctgaagataacagccaagagggggtctttcctaaaaatgcaacagataatgctgctagattgttattttgtttgcactttttttgattggcattttaaaatcggtatttaaactgaagacattgtcatgttttattaatttaacaaagttgaaagtgactgctctgtacatcatga

SEQ ID NO: 695633 - DNA, 1041 bp, Homo sapiens
gtgtgtgccctgtgtgagccctgctgctgagcccactgcgccaccctgtcatctacttgctgctttgtggcctgcctacctgtcagcctgccatgtgtgggccaggtgttcctttatttccagtgggactccctgctgctagagacttggcttcctgtgcctgtgcttggtgtgcccctgcatgagtgccatgcctcccacctgcaatggacggccccaccatgggcatggcatggcatgggtgccctgccccactgaatgacctccccgttctgtgcttggtgcgatggctgcttgttccgcctcatgttcgcctcagtgcgtggtcaagctgaccagccgctgccctgcgtggtgggggctacatggcctcacctaccactacgagacccagtagcctagcccacgcccggacgcctggttcgcacaccacctgccggtctaggctgcacaagctcagcgtcggtgcgcaccttcctactttgcagatcgctgtgccgaccctgtaacttcgaccccattcgatgcctgcgcttggctgctttctactcgcaggtgctgctgcaggtcctgattatcatcaccggcaactacaagcttcttcacgcctgatgaccgctggtgcttaccactgcgctgctggacgagcagcaactggcttgtgagcctggccacggcaccgccaggaagacgggcaccttctggccaagggccctgctgggcaaccctgtcggttgttgctggaacctacccgttaaccgggctacataggcactattgcccgtgagccaacattggcctgtaagttacaggaacgacaaggagcataccgttgcaaaagcgcagtttagccttgtaccacgggatgtcagaggggatgagaaaacgttgagcttgccgcaggttttgtgtcgcttattgagcccattgcttgtaggtgggagacgtcacatcctccaccatgctccgtgcagactagtgacgtcgaggaaggtcagtctagtcacttacagtgatccggccacgataacagtatcaggg

SEQ ID NO: 695634 - DNA, 101 bp, Homo sapiens
  misc_feature (27)..(27): n is a, c, g, or t
tgaccctccaacatggcggcggcggtngattagggccgcgggtcggagcactcaccgccgctggaggaaaaagaagaaagcgtcggccgccggctgcctct

SEQ ID NO: 695635 - DNA, 1032 bp, Homo sapiens
  misc_feature (408)..(408): n is a, c, g, or t
agcggaggcggatacctagcccggaagggcggggcccggcggtcgtcgctgggggtgggcgcttctggcgggccgaggtgcacttcgaccgccgaaaggcccctggccacaggaggaatctggtgcgcgaaccgaggtctgctagacatatcgaggagacgcgcgcggactggaccggcggggaaagagcaaccagaggtgaagcgacggtgcgcgacctcacacggaactcgcgaatcacgctgcggcgctctccgacgtgcgagcgcgtgagacgacaacaccctgcctcgtggaagccgagcgtaagctcaatggtggcgccgcatccatggcaggcatggaccaggctgcatcgcacggaacgtcctgactggcatgtctgtgggatgcagccaagagctggcncggtcgctaggggctttcgcgtgcgggagaacatcgcgtcgggaacggtgcagcaaaacatcactgctggccgtgctttgcaagccaagcgctcaaagcactccgtggtgtctgtagggcccggggacgggacacccgtcgaggggccctgatgcctcgggttcgggccgtggtaaccggacatgtacaacgccaagctctggtgctagactaatcgctgtggcgcgatgggttgtagatggaagcctcctgaatggcgcggatcaaggaattatcgcctgggttgcagcgaagcacggcaaattgaccctgggaagcaaacgtgacgctctccgagaaaacttcccgaaatccatgttaatcgggggcacaaccatgtggcgagattcctgcgggcacaaagaccggctcggaaaaacttctaccttttaggaatcgggctcgtttgactggggagaagccggcccgtatttgagcccccggagtaaatgctcccgtcccctttgggtgccccgcggatgcccggtcggagcacacgttgagatagccgctcagggaagaaccgtagacaatctggccgaagacagcgaatcccaacaggggactagccgcccaggtagcggg

SEQ ID NO: 695636 - DNA, 767 bp, Homo sapiens
  misc_feature (568)..(568): n is a, c, g, or t
catgtctgttcttcatggatggatgtagtagtgcaattttggctcactgcaacctttgcctcctgggctccagtgatcctcccacttcagcctcccatatagcttggactacaggagtgcaccaccacacctggctaatttttatagttttttttttcatttgtttgtttgtttttggtagagacagaattctccatgttgaccaggctgtagaaggtcttttccgtagtaatttacagtctgacacttagctgcaatataatattcactctgttttttcacgtcaagcagtgtggaccaagaagcattatggcaatttactgacatcaaacaacctgaatctttaaaaagaattcctcaaaggtggtggttcaggttcccatagcaaaagctctcagtccagttcaaacaaaaccaaacactaataaattactcccgataaaaccaacaacaagccttagatagaaatcctaaattcctcagggaattaatgtagtaatctattcagtttcaattaagttaaacaacaaacaaacaaaaaaacctttagttggagctctacattgtnctagaggtgttagcactataagactatgtggtgagtttgcagggaaaaaaaacctgttaatcaaatcacaagggagatgtgattggtataataaagaactatccttggccgggcgcagtggctcacatctgtaatcccagcactttgggaggccgaggcgagtgaatcacgagtcaagagatcaagaccatcctgaaga

SEQ ID NO: 695637 - DNA, 413 bp, Homo sapiens
tgggaactgcttaggggaaatctgcctctcattctattcaaagtcatcccttgaggttcacttgagacaaatgagtatctgattgcttcctctcccctatcatttatgtaaaaatgcagattctctgagccagactacattgtgtattcagtggaaaacttatcgagggctcaaaagaatgcaaccttttgttgcttatctacttctaacctggaagtccccacttcttgttgtcccaccttactggaccaaaccaatgtacatgttacacatattgactgatgtctctgtaaactgtctaaatgcaaactgtacccccgaccacattgggcacatgtctcaggactccctgaggctttgtcatgggcacgttcttaaccttggcaaaatgaactttgtaaattgactgagaa

SEQ ID NO: 695638 - DNA, 425 bp, Homo sapiens
acatggcaaattacatggagtctcacactaagagaggccctaagcatatggacagaacaggtatttatagttcctcccaggtccgttacgcagttataccagctgggtcatttataccataagcagtgtatgcctagtaacatagctgacattctgcctgtatggttaccacgggaacagagctgatagctgggttaaactgaatccaagcccaatttctcatgctgaaagacaagagttttgctaacacttaagtcacgaatatagccagaggtttcccagcttctgtgcttctctgttagtttcagtagccggagtgattctttcaaatgtatggtggatcactttacctgctctccgccctgcagtgggtcccctccttaactcggagtgcagttgtctacaggccttacctgagcttggcc

SEQ ID NO: 695639 - DNA, 618 bp, Homo sapiens
ctgggtgataaaataatctgtacaggtcaggtgcgttggctcacgcctgtaataccagcacttgggaggccaaggcaggcagatcatctgaggtcaggagttcaagaccagcctggccaacgtggtgaaaccgcatttctactaaaaacaaaaaatacaaaaattagccataggtggtggcgcaagcctgtaatcccagctactcaggtggctgaggcaggagaataacttgaacctgggaggtggaggttgcagtgagccgcgatgcgccattgcactccagcctatgcaacgagtgaaactccgtcttaaaaaaaaaagaaaaaaaaaaaatcggtacaccaaacccccaccatgacaatgcaatttatctatataaacaaacctgaatatataccccttgaacctaaaatatgtttttttaagattaaataaaatacttaaaaaataaaactagtgaaaagggtatgaagaaaacttttttaaatgacatgagaggaaggatcgggtagctcaaaagaaggaagcttcctcagagctcaggagcgggctgtgagagctaaacccagaattttctatgattttcagatatagataataaattatgaacagaactag

SEQ ID NO: 695640 - DNA, 416 bp, Homo sapiens
  misc_feature (130)..(130): n is a, c, g, or t
  misc_feature (158)..(158): n is a, c, g, or t
aaaattggagccgaaccttaaaaaagccctaagataaagtccggtggtcccctgagagaagcccttggaaaaatcagatattgaaaagcggtcattccatttgcaacaaaatatccttgtgaaacaaganttttaacacttgtaattatcaaaaccanaaattaaatagacaatgtctacgatgacatgcatattgcgttgttgttttaaaatgtaggttttcatattatttaggtattgcaaggccaacagatcaggagatgactgccattgacaagacagttggttatattcacagatcccaagagaaggggatgcaccatgccatggggctgagggatgtttcattgtaagaacactggggtcagtcaggagggagagacgggaatacatgggcaagagccttttttggtctc

SEQ ID NO: 695641 - DNA, 440 bp, Homo sapiens
  misc_feature (10)..(10): n is a, c, g, or t
  misc_feature (25)..(25): n is a, c, g, or t
  misc_feature (45)..(45): n is a, c, g, or t
  misc_feature (75)..(75): n is a, c, g, or t
  misc_feature (93)..(93): n is a, c, g, or t
  misc_feature (106)..(106): n is a, c, g, or t
  misc_feature (120)..(120): n is a, c, g, or t
  misc_feature (275)..(276): n is a, c, g, or t
  misc_feature (282)..(283): n is a, c, g, or t
  misc_feature (291)..(291): n is a, c, g, or t
  misc_feature (346)..(346): n is a, c, g, or t
  misc_feature (395)..(395): n is a, c, g, or t
  misc_feature (412)..(412): n is a, c, g, or t
  misc_feature (426)..(426): n is a, c, g, or t
  misc_feature (431)..(431): n is a, c, g, or t
actcgcgaantggaaggcaaaaacngcgagcagttcacgcttganctgaccatgatgatctcaatggataaaganggtgacagcacaatcctnttccgcaacagcnaaggtattcctctngcagagatcacgtttaccctgtgtgaatatcaggggaaaagaacgatgtttattggcggactgcaggcgcaaaatgggaaattccacatcaggaaatccagaatgcgacgaaagcctgccacgggctatttcccaaacgcctcgtgatggaagcnncctgtnnttattgangattgagtaactgctggcgcacggatttaatcgttgccgccacatcgtcgtcagnttctgcttcccaggaagcagctgtgccatgacatgtcggtagtctttanggctttagctttcgccncagagtcggtcagnaaggnaccaggcca

SEQ ID NO: 695642 - DNA, 767 bp, Homo sapiens
  misc_feature (37)..(37): n is a, c, g, or t
  misc_feature (275)..(275): n is a, c, g, or t
  misc_feature (301)..(302): n is a, c, g, or t
  misc_feature (307)..(307): n is a, c, g, or t
  misc_feature (314)..(314): n is a, c, g, or t
  misc_feature (317)..(318): n is a, c, g, or t
  misc_feature (321)..(321): n is a, c, g, or t
  misc_feature (326)..(326): n is a, c, g, or t
  misc_feature (329)..(330): n is a, c, g, or t
  misc_feature (345)..(345): n is a, c, g, or t
  misc_feature (356)..(356): n is a, c, g, or t
  misc_feature (358)..(358): n is a, c, g, or t
  misc_feature (360)..(360): n is a, c, g, or t
  misc_feature (389)..(389): n is a, c, g, or t
  misc_feature (396)..(397): n is a, c, g, or t
  misc_feature (401)..(401): n is a, c, g, or t
  misc_feature (566)..(566): n is a, c, g, or t
  misc_feature (571)..(571): n is a, c, g, or t
  misc_feature (583)..(583): n is a, c, g, or t
  misc_feature (585)..(585): n is a, c, g, or t
  misc_feature (590)..(590): n is a, c, g, or t
  misc_feature (592)..(592): n is a, c, g, or t
  misc_feature (596)..(596): n is a, c, g, or t
  misc_feature (600)..(600): n is a, c, g, or t
  misc_feature (615)..(616): n is a, c, g, or t
  misc_feature (627)..(627): n is a, c, g, or t
  misc_feature (638)..(638): n is a, c, g, or t
  misc_feature (702)..(702): n is a, c, g, or t
  misc_feature (748)..(748): n is a, c, g, or t
acacgctcgtccttccgactttgggttcaaggggccncccggtcaaggcgggaaccccgcccccccgctttcttagtgcgccataggcgggtcccctgagggtggcagaatacccgggattaagggcgccttcacgcaagacaactgagggttacgcttctaagtttctggccaatgtttaaacttgtccggataaagtggctttaaaacatttccaaaaactttttccccatctcataaggaaagggaacatcttagaaactatgaacttgcanaaccaccagggggccggatcttcctnnaggantcaaaanacnngcntgttntgnntgggagagcgggctnaatccaatggngngngccttccctttggaaaaaaatgtgaatcngtccctnntggnattgcccaaattggcccctgccaaaaatgccccccctttgggggttttcttttagacccctttcctgaattggcgggtgaaacccctcaaaaaattgggggcccccgtgtccaccttgcccaaaatgggagggccccaatttggtttggggggaatttttttttnccaanccccccctgggngncagtntnaatnaaanttaacccccggggtnntttccccaaanccggggggggncttccctggtccccaaggcagggcatgcatgttggggtttcctttcccttttttttaagttggncccaaacccccccttaagtttttttttttggccccttccttcaaanaaaaaaatttggggcccca

SEQ ID NO: 695643 - DNA, 268 bp, Homo sapiens
tatagctcataacgccttgtctcaacacacccccacgggaaacagcagtgataaacttaagccatgaacgaaagtttgactaagttatattaattagagttggtacaatctcgtagcagccaccgcggtcatacgattaacccaaattaatagatccacggcgtaccgagtgtttaagaaaaaaaatcacaatagagttacaattatacactacagctgtaaaaagccctagttaaaataaaataaccacggtaacaccattttttcg

SEQ ID NO: 695644 - DNA, 314 bp, Homo sapiens
gtctcgtgatagtgagtgagttctcatgagatctggttgtttagaagtgtgtagctcttcccccttcctgtctctctttctcctgctctggccaggtgccttcttcctgttcaccttccaccatgattgtaatgtttcctgaggttccctagccatgcttcctgtactgcctgcagaaccatgagccaataaaataaaacttttttcctttatatattacccagctcaggtagctctttataacaatgtgaaaatgggattaatacaggggtcagtagcatagtctaaaggaatagttttaaaatagccaaggg

SEQ ID NO: 695645 - DNA, 229 bp, Homo sapiens
cttgcgttatctccccagaccagagacacgtggccaaaatacaatatcatggggctggaaatatcccaaatcaaccagcctcctggtgcttgaaggttccattcactattacctgcacaggatgtaaagaatagtcacagcatgcactctttatccagggaaaattcggcagtatttgaatcacgacgatatattctctttatctgcaacccctgatccgatgatctgt

SEQ ID NO: 695646 - DNA, 242 bp, Homo sapiens
ctggcgagggctcataaatgcactgtggcacttagtgtccgtggtctccagagtgtatgacagctggagtctgtcagtgtcctactgagacagccagactcacctagctagcaacattagttttattctgaacaatatatacttatggaagtacacgctcaccagatacaccagtctgcaaacaggctgtcatggtggtgcagtcctaccagttagttgctatggtttcagacataagacat

SEQ ID NO: 695647 - DNA, 286 bp, Homo sapiens
cggagcgacgcagagctaagaggtggctcccaagccaaataaagcagttccaagtaagaaccacagaatggtactttatggaaaacggggcaaccttggggaagcatgtgcgacattccaaggacacagcactgaaagctaacatccaccagttagccgaagaaagttttttttttttcccaatcacggccatggtggctgggttttccggtagagggctaaaactcttcaataagggaagtacttcagtgagggcctatatatggggcacccaagggaatggcca

SEQ ID NO: 695648 - DNA, 121 bp, Homo sapiens
gacgatcactgctggtggatatgctgtacgcgggatcaacccggcgatcgttatcaatgaggacgcggcatgattaagcattggcggcgcaacgccgcactgaaggcgatgccgcttatcg

SEQ ID NO: 695649 - DNA, 655 bp, Homo sapiens
ctctcccagaacataattttggaaaaggacttggtgtctccatcagtcagtttaagacagcctattattccttcaaaggtcaacatttttgaggtagaggtcaagaggccccatacaaatctccaacgcttttccaatgaaagtttggggcattctggtaagtgttttcttttccaatcacaaattttaaggcggcatcagatgataattctttttagggcaatatattgtccccggatggccccggggccattaggacagatgtgtcaaaaaaccacgtctttttgccaggagaggtaataacgagagtcacgcctctccatgtcttattctagaaggttcttttacagtcccgttcacatacaccatctagagatgagatgcttctccccgcgccagataaaaggttcacattgtctccaatatcccccctgtgttaaaggcatataaatgttagggcttggagcagtgcccatgtccaatgcatctgccagtccaaagcaggactagcccagtttaagtatcccgtcgcctgccgaatggtgcatgttaaagcattaatagaacgggcccatacctctggctgcatgaatgtgcatgctcaaataaagaaggggtgggtgaagaatgtaatacattattaaaatgtttcgag

SEQ ID NO: 695650 - DNA, 575 bp, Homo sapiens
gggattacagatgtgaggcaccgtatccaggctgtatggagtctttctaatcaggacataggcagacagtcctagcccagctttatgccttatgagacgcaacaacgttgaacagtcattgtttgagggacagaggttttacagatggatgataactagcatctgtggaacattatttgtgaaatatagaaatcagaaattccagcgtagcactgtccaaggggaacataatttgacctgcatatttgctggtccatttttagtagtcacattaaaaaagaaaaatgacacaggtgaaattaatttgaatatattttcttaattcagtatgcttaaatattatttaagtatgtactcaatataagcaattgttaatgaaatattttactctttttgaactatgtgtttgaaaccccggatgtattttttttttatcttcaccacacatttcaatttgggttggtcacatttcaagtgctcaggagtcacatgcagctaggggttacctattggacaggcaggcagatcttgagagctccaaagaactgtgtgtcattatattgtggaaaaaaaaa

SEQ ID NO: 695651 - DNA, 503 bp, Homo sapiens
cgtatgtcttgtcaacggaaaggggtccctatccagaccccaagagagcattcttggatctcttgcaagaaagaatctgaggcgaatccatagagtaagcttagtgatgtgtgtcagacctctgagcccaagcaaagccatcatatcccctgtgacctgcatgtatacatccagatggcctgaagcaagtgaagaatcacaaaagaagtgaaaagggccggttcctgccttaactgatgacattccaccattgtgatttgttcctgccccaccttaactgagcgattaacctgtgaacttccttctcctggctcagaagcttccccactgagcaccttgtgacccccgcccctgcctgccatagaacaaccccctttgattgtaattttcctttacctacccaaatcctataaaacggccccacccctatctcccttcgctgacactctctttggactcagcctgcctgcacctaggtgattaaaaagcttttatccacgcaa

SEQ ID NO: 695652 - DNA, 157 bp, Homo sapiens
aggacgtatgggatgaggaagtagtgggatgaggaagtactgggatgaggaacgtactgggatgaggaacgtactgggatgaggaacgtactgggatgaggaacgtcactgggatgaggaacgtcacttaatgcattattgtccggtctcaaatgct

SEQ ID NO: 695653 - DNA, 179 bp, Homo sapiens
gctggagtgcagagcctgaaaccatctagagcatgggggctggtgtgtgtcaggccagtgcctttcttggcttaatgttccaggtagaacttgcgaactgagaacgaatttgccaaaatctgacttgtgttgattcgatccagcggaagccacccgtctccgccagcgtggggtaggag

SEQ ID NO: 695654 - DNA, 805 bp, Homo sapiens
ttaaaaacgaggcactttgcatataatcacagttgtgccagagacactgtcagatacattctagatgaccagaactggtttaataaaaacgaaaatacaacccatggagaaggaatatcttaaagtgaagaaacgcatctcattgtaggcattatttgcctcatagtttctactgggccatgtatgtttccatggtactcatgtattagatattctttccagaatctctttccccaagttgctattgtaagagtattctgctgcgatgtggatgacagtatatacacattaaagcagatctggagtcgtgaaagataggctatacacagcagctatacaaagcagaaatacagtgcagtagcgtgcagaaagccatgaataggtagaggactttatctattaggatattggttaaggatatggaggtaatgagattatagggttgaataaggggtatttgtacaaggagaaagagcatttttgtagtatacgaagaggcaagagaacacattcccagggtgagcctctggtggcacgacacatgtcttgggcttgtgttaccgaacacagtcacgtacagacgcacaacacaacctttttaaccaaagggggtagctactacgggaacgatcaggcaacacaaacagggtttacttaaacagttcggccgaaacgtcttgtacagaatttggttacaaatttggaaccccacttggacggtggctcaacaaagtttctccttacagacagcccagcacagcttccacttctacgtgcccacattgcacaacattacaagagaaaa

SEQ ID NO: 695655 - DNA, 351 bp, Homo sapiens
  misc_feature (55)..(55): n is a, c, g, or t
  misc_feature (75)..(75): n is a, c, g, or t
  misc_feature (122)..(122): n is a, c, g, or t
  misc_feature (127)..(127): n is a, c, g, or t
  misc_feature (131)..(131): n is a, c, g, or t
  misc_feature (158)..(158): n is a, c, g, or t
ccaaaaaatattatccaagcataataacatgtagctaccccaccacatgacaccncagagccacatagacacaancacacaaatcatggccattttaccatgcacatacacatggtaccacncgtgncacntgcaacagacatgcatgccccacgtgngtgacacaggcacgcccagcctgcatgcaaatggacacatatgtacacatgtgaacacccccacaaatgtgaacacattcacctgcacacatacatgcacacatgtctgcattcatacatgaatatgcacatgcacactgacatccacatgtgtgcacacatgtacacccttatccccttctgtcgtcttctc

SEQ ID NO: 695656 - DNA, 381 bp, Homo sapiens
tccataagccagcattgatctgattataaacataagaacagagccgcaaaaaagaacacaggcattatcagccattctctcagacgaatagtaattcccgatgacttcatattgaatgttcacagctggcatgaagtttgtataagtcacttccacagtcagcaaaattgccatcaataggtttactaccatgtaccaggtccccagaatgatcgtcccggtgcgaacatgacaacagccgcagcaccgggttctgtagacccggtcactgcggttccgcttgaaactcatgcacaccttcgtaacaggcggccctcttctttgcccgggcccttgacaagcgttccccacccacacacaatctcaagcgtctgtttcgcg

SEQ ID NO: 695657 - DNA, 155 bp, Homo sapiens
tggtccttcacagtgccaccctcgcctcgccgtcgcgtcgcacacgccgcttcgcccttggcgtgtcctttcgccgtggcggctttttcgctgcggcgggcacccggttccgggttcgcccccctccccccctgtgccgcgcccttgcccactcg

SEQ ID NO: 695658 - DNA, 138 bp, Homo sapiens
aatcctgctgctgctgctgcacgtatcggaccacgagccccgaatgaagcagttcttcactgattacatgtgagggtatttctcaggttctgtgacactgatgtcagttagtctgaattctcgcgggagcagcaggaa

SEQ ID NO: 695659 - DNA, 264 bp, Homo sapiens
cagggagggagtgttcagatcagctcacatggtgaagaaagcggaaagaaaatatgcaccgagagggaatgtgtgcaatgaaatcatggtgacagctgcacaacacagtttgcgaaaaaccactgagctgtgtgctgtaaatggttttatgttatgtgacttatatcttgatgttttaaagaaggaatgcggtagaaaaagcaacaggtctggatgcacattggaggacagccgagaaagaaaggtgattgcagctgggcgtgg

SEQ ID NO: 695660 - DNA, 135 bp, Homo sapiens
  misc_feature (115)..(115): n is a, c, g, or t
  misc_feature (117)..(117): n is a, c, g, or t
cttcatcccccagtggggtcatcatccaccgcatgcaggcaacccagcgcagcaagccggcaacgccaggccacatcacttccctcatctctcacacccctcagtcagcgctccncntctccccctacactccat

SEQ ID NO: 695661 - DNA, 655 bp, Homo sapiens
  misc_feature (347)..(347): n is a, c, g, or t
  misc_feature (495)..(495): n is a, c, g, or t
gtcgcttcatacggggctactgcgtgagacgagacagtcggttcgactagacacatcgacgattacagtacgaatacagcttcaaggggccgtacctgatgcagagcgacagcaccgtgcccttcagggcctacacctggaatgctattgaaagagcggatcaggtctgagtagcacgcatcgataacaagccagagaggctcattcgtggcaaatactcgggcttatggaactgggaagttgaagtgacatttggagtgactggaagatgtctaattggaggtcagggcctggcgatttggtatgcgtgatgcatatgactatgatctgagggcagtggtgtaganagtagtactggtatattaatgataggccacaatggacagagcgattgtgaccatgagaattacgggactggtcaagcgtgggcaaggtgccatagggactatcgggcgaacactatcctgtgcgagcggagaatacctattgccaganctcactggctgtaaggaataggtgatggctttacaccgggatgagaatgattgtgaattgtgagccgaagttgaggatgtgagtatcgctgcacgagggcgtgttggaatatctgctgcgggtggaggtgttaggggagcatgagtgcggctgtgggtgg

SEQ ID NO: 695662 - DNA, 1277 bp, Homo sapiens
  misc_feature (1277)..(1277): n is a, c, g, or t
gagatgccgacaggaaagaaggccaagggaaagcaaggtggctccggacccagctgtcgtgaagaagcaggaggcttaagcaaagtggtgcaatccccgtgtttgagcaacaaggcctcaagcaatttttggcatttggacaaggcacatccagaccgacaagagcagcccgatcaccctgcatatagtagcaacattggccccagactatcatcgaaggttcgcaggatgtgacaggacagagcccaatcccatcgtataaaagaccgtgacttgcaacaaagtaggccactcccttgcggcagttaaacccaggatatcaaacaacatgtggccacttggtgaaccactggcacgacaaacactgccataacattccatgcattgcatatacacgagcttggtgaccactcaacgcaacaggttcagccaggaacacacaacggaaagcacccacacaccaggcacaaagggaaggaaacaggacaacaggcaaagtaagcgaaccatggctagtggcagacaccacaggaaggacacccaggacagcacaacggaacacacggtgaccctttggcattggggctagaacacaatggcgcgcgaaaccaggattcaaccacgaaaagaccgaacccaggcaaaggacagcccaaaacgacacttggcattcaccagttatcccggaaaaggcaaaaggaggcaagggtgtaaaaaccacaaccaaggaatacaaacacccgacccccagtattgaggagaatggagaaaggaaacagaccaagaagacaaaatagaaggccttaccaacaggagatggagataaggagcgtatgtgcacgttataggcaacaaacaacacacagaacaaacgagcataggaaagcaaaatcacgcaccccaaaattcacgagaaacgacccataagaaggacatatcggcaaccatatacacaattattgggacaccgattatggagcagaccacctttggaattaagagttacaggggtcacacagaagaaacagtattaggaggtatgatggctgagataaaacaaacatattaatataaggacactatatgagcgaagaattagaaaaagtaaccgaacagaaaacgatggtgaggaacaaaaataaatgagggcaggacgcataaatagggaaaaacaaattatgagtatgaggaaaaaatgatgagttcaacattaagaaagagtatacacacaaaaacgagacagtgtgatgaaaagactagaaaatcaacccgagttn

SEQ ID NO: 695663 - DNA, 122 bp, Homo sapiens
ttctgttctagacacccaagatctcacaattaagtgctagtgaaatgggacgtcaaacacgtagatctctgacttctatctactcaggtgggtcgagaacataagggtgggtcagaactaaa

SEQ ID NO: 695664 - DNA, 499 bp, Homo sapiens
tttttttttgtcgtccgctccttccttcggttcttccgccctttcgcccccccctttgtgcggctcccttcccttcgtccgcgccccccccgctcgccggtcgccctggcgctgcggcctcgctttgctttttggtcccctttgtgcgtcccccgctttctgctccctcttgcgctgctccgtcctctcctctttctctttttctgtgtcgccgctctccccttcctggtgtctgggcttccgccgcttcttcttcttgccgtccgcctccgtccgctgttttgggctttttcccttgctgctctcgcttttggttgccgtggccctgccccctttctggtgtgttcttcgtcgcggacctcgcttgcggccccgcgtaccgtcccccgttctccgaccctcgcccgctgcttccgggccacgtcgccgcggccgccctttcgtcgtcgtagtcgccccgggcttaccggccggccccgccgggtcccccttccctatg

SEQ ID NO: 695665 - DNA, 544 bp, Homo sapiens
ggtccccatgcacatgttaaacacatgcaaagacatcttaccagttaggggatggaggtgccaagttcctgatgtcagccaaatgccagccttgccagtatgcccttgtaaaagatggcagcctcgggcctgccgtggtaactgttttctgcacaggcacacaacccacaaacgacactaacatacttaagacacattttgcagcagcagtgtgtttttggagatggggtctcactctgtcacccaggttggagtgcaatggcacagtcatagctcattgcagcctcaaactcctgggctcaagcaatcctcccacctcagcctcccgagtagctgggaccacagacgcatgccaccacaactggccaattaaaaaaattttcgtttttgtagagacagtggtctcaatacgttgcccaagctagtcttgaactcctgggttcaagcgatcctcctgccttggcctcccaaagtgctgggattacaggcgtgagccaccactgcctggtgggtggaggaatttggatggcttgacagagatggt

SEQ ID NO: 695666 - DNA, 667 bp, Homo sapiens
gctctagatgatccccggtgtttatcggatgccacaatactatgtatattcaccgaatcaatttcctgagataaggttcgtgtgcgcaagtgaacgcctacgcaaggggaatcttcgtcaaggaaaagaaaaaaaatcttgttctactataatctacagataaatcaaagatacttatttttggcagtagtaaatcatatccctcatcttattctgtgaacagatacatctaccttcttgtctttccccataactattttcatttattgctcatttctattcagaatacttattaaaatatatttcaaaaaagttttaaagccgtattttttcttacaagggatccatttcactaaatatttttatacatgtatgtgtatgtagatatttactacgcctctgaggtgatttgcattgcagcatggccttcaacatacaaagactacttaggctttgaatgagacttttttctaactcttccacgtcaaaaccagggtatctcgaaaagccaacaaaaatcataacatccaccaaaagtcctgggcttcacgtgagtgaattacagaaagacagcatcttgcattgtcatctctccctcttgctctatagtccttgtccctacttgtagaaggcttccactctttgatataggatgtgtcggcctaag

SEQ ID NO: 695667 - DNA, 153 bp, Homo sapiens
caacaacccccctagcaatccccctcgcaatccccatattcgtaatcatcggattcactccactcgcgctagggaacacactcgcatcgcacacccacaacccttcacacccccaaactcttcccttctcatcaacagcgctattcccctccg

SEQ ID NO: 695668 - DNA, 788 bp, Homo sapiens
agtgactcacctgctatagtatgccagcgtggtttgaagggattctttgtataagatccatgcccaattatcgcaaacgttgcctccagatagttcggtttaacgatcgcttatgcacgtggacgattttttgtgaatatcggtcggtatataacggacatcactttgatccctgactttcgcgctgtgagtaactgcctttattggatgtctgtctggtctggcctctctgttaacctacagcacgaagttgtagtcaacaggaaattccttaagacagagtaggatcctggaatgggtgcaaccggctggaatgggattttgcgtatggcgagtgtggcaatgttctaactcctagactagtgcttttgacctcttatctaatgcaatctgttgacaggaagtcccaaggcagtgttcctcaccaataatttcagagaagtcagttggagaaaatgaagaaaaaggctggttctgaaaatcactagtaacacatcagattacatggtttcatgttgacaaaagtatataatggtttaactgctgtcaattgtgccatgcctaacagataatattattgttgtatttttgaataataatacatttgtacattcctgatactgggtaacaagagccatgtaccagtgtactgctttcaacgttaaatcactgaggcatttttactaactattctgcttaaaatcatggattttagtgcttgccaccaccagatgagaagttaagcagcctttctgtggagagtgagaatactccgcgggcaagtagac

SEQ ID NO: 695669 - DNA, 720 bp, Homo sapiens
ggagcgcgcgaggctctacagagtgaaggttgaaagtccgaaggtcatggcaaaacatctgaagttcatcgccaggactgtgatggtacaggaagggaacgtggaaagcgcatacaggaccctaaacagaatcctcactatggatgggctcattgaggacataaagcatcggcggtattatggagcaagccatgccgctcggcggacacgagggaaagctgatgaaacggtgccggcggatctgacgaacatggcagaatggtctcgcaagatcacatcgttgcttgcattgcgaagagaatcgggcagatccgtggcagggctgctgaggcctgtgggtgggagcacccagtgcgaaaccctcatccagttttctctccatctcttctctctttgtacagatcccaatttccctatgtagccacttctcgttgcaagtagaactgcaacatcagcatgtctgcaagaaacaatacaagaatagaaaaaaccaactgcgacgggggatacaatgtagcggggggcgggcaagaaaaggggagtgatgcgacaaggaggctcagctggggaccgaagcctgggtcttgccggagaacccgatcctaccaggggggaccagacgcggggggaaacaaacgggccgggcgcgccccactagggaagggcaggcggccagggaatgggcagaagaaaggccggggtttacgccggactttaaat

SEQ ID NO: 695670 - DNA, 600 bp, Homo sapiens
  misc_feature (555)..(555): n is a, c, g, or t
  misc_feature (589)..(589): n is a, c, g, or t
ccccggccggaaagatggcggttgggttcaaaaccggggaacctttgagggtttccaggagatttttgaaggagaactgccgtcctgatggaggaaaactgggggaattcagacccacaattgtcaacatgggttcaattagtcccgaaaatggttctgttttagggaagttggaaaatcctacagtaatctggggagttaaggcagaattggcagcaccatcaacagatgcccttgataaaggatccgtggttcctaagggggatctaccacccttgtgttaatcgagattccggcctgaacctcctgaagaagaggcccaagtggttagccaattcattgcagatgtcattgaaaattcacggttatttcagaaggaggactaatgcatttttccaggaaagctggcctgggttctatactgtgatctcatttgcctggactccgatggaaccattttgaatgccttgacatttgctttgctagccgttttttgtccagttgcctgaagtactataaatgaagaaactgtttaaccggaggttaattaaagangtgatgacacttttgcttagtgacccttactganaggaggctctg

SEQ ID NO: 695671 - DNA, 438 bp, Homo sapiens
  misc_feature (358)..(358): n is a, c, g, or t
  misc_feature (401)..(401): n is a, c, g, or t
  misc_feature (407)..(407): n is a, c, g, or t
aagccttcttcatatgattgtgtgatttgttctctacacaaaacaactcagcttagagaataagaggtggccgaatgtcaatctatactctggctatattcttgcacagggctgtattctaccagaatacagcaagccactgagcctttgctaagcagttcgcctatggacataagtgcccagaaggaacaactttttataaagtgtctatgtaccttttaaagatgtcttccttgacagaaaaaagtcaagactagcgcaatgaaaagttgtgcaaggcagacccgaataccatgaaacaatggaatgcatatgcatgaggcacacaagaacagtagtgacatttaattattggttntcatttgatcttattatacattgctgaagaatataggcatcangaatangaagtcatcttttatatgtatattcctttgg

SEQ ID NO: 695672 - DNA, 117 bp, Homo sapiens
aagaggccccacagtgtcccagcagtggcacagtagcaacagcagtgaggaagaggccagagtaggctgggtcccctgcacaggagttcaagtatcagaagtccctttcgtcccccg

SEQ ID NO: 695673 - DNA, 130 bp, Homo sapiens
  misc_feature (4)..(4): n is a, c, g, or t
tctntatcagctcgtaccgatatgcagagaacccagagggagagctgtaaggacacagggatccaatacgtaagtactaaagagaaaaagaaaacagagacccggagagacagggacggagacccggaga

SEQ ID NO: 695674 - DNA, 229 bp, Homo sapiens
  misc_feature (134)..(134): n is a, c, g, or t
  misc_feature (154)..(154): n is a, c, g, or t
gcccgacggtctttacctaggccagtggttcttaatggatattacagatcagacttctctgtggagtgtagaaatatacagatatgtaggcactgctttggacttcgtgcaatctctttgcttcgatattcttnggtattaacacaattatgtnctgagagattattatcgttatatccgtaaaaatttttctgggcatagaaatttgtccagtttactctttatagta

SEQ ID NO: 695675 - DNA, 114 bp, Homo sapiens
cccattgagccccgtggatgctcagtcctgatatgaaaatgatgcatagcatttgcatattactgacagacattctcccttattcattatatcattttcaggttccttataata

SEQ ID NO: 695676 - DNA, 903 bp, Homo sapiens
  misc_feature (222)..(222): n is a, c, g, or t
  misc_feature (271)..(271): n is a, c, g, or t
  misc_feature (307)..(307): n is a, c, g, or t
  misc_feature (569)..(569): n is a, c, g, or t
ggtagtagccatggcggccatgagtttgttgcggcgggtttcggttactgcggtggcagctctgtctggccggccccttggcactcgcctcggatttgggggcttcctcactcgtggctttccgaaggctgctgctcctgttcgacacagtggagaccatgggaaaagactatttgtcatcagaccttctagattctatgacagggcgtttcttggaagttnttggagattctacattggcattgactggggattccacgtagcaattttntcataactctggtgaatgtacttcattgtggtcaangctgaactaggcagaaattccagaacggctatgtcccagaacactgggaatattataagcatccccatatcaacgatggatttgcccgtaatttctatgatagtcctgaaaagataatatgaacagaacaatggccgtccttcagattgaacgctgaaaaggctgaattacgggtaaaggagctggaagtgcgaaacattgatgcatgtgcagaggagatggaccctggtattactatgagacaattgacaaggaacttatngatcattctccgaaagcaatcctgacaattaagcattttttctccaaatacaaagtatattctctttattggaaaactaaatttcataaatatattctgtgatctcttgctctccggtgaaatatccaagggagcctgtgacatttactgtctctcagtgttggtccagatttgaggcttctgttggaggaagtttggcatcccagatcccaaagaagggttacaatgtacgtagttaaactggcagacatgggaattgtaactcctaaattgtagcacttggaagggtagagtctattagctgacaagggagtctaaagcttaataggtagcc

SEQ ID NO: 695677 - DNA, 151 bp, Homo sapiens
atccaccaaaagggctccctgagggtttgggcaaggggcctgcttttattagcccttttccatggccctgccatgctctccaaacccctttttgcagctttttttagttcaagttccccagactctataaataaaacctggcaggccctga

SEQ ID NO: 695678 - DNA, 516 bp, Homo sapiens
ttctagaggatccctggtatttgctacaccatgaaagaagatagtgagtccgacgtgggggtccgctctgtaacaatgcacagaattactgcgcctgtagaaagatctgctgatcttagaaacttaattgtacgcttagaatttccatgcctgtactaggaggccttgctgtagagtaggtttactggagatgaggaccaactatatgagggtagagagagcctttctctttcagcgtcaacatttttccctgtctcacttggtgcctctcaatgaagatagtgtgtccagggacttgtaggagtgtaattaaagtaggaccatagcatagaatgggatagtgacagtagcaagagctgtgagatgtagactctagttttgggatagacatccttcaggatcattgagagtgtgataggtgtaaacattgaacgttcaatttctacagctcactcatgtagaaacctatcgggaaaagaattcgcatccaagcctgcatgcttgtaagaaattgaa

SEQ ID NO: 695679 - DNA, 192 bp, Homo sapiens
gcactctagaggatctccaaacacgcaatcttcagaatactaacttaaaaatagctgccaggctgggcaccgtggctcacgtgtgtaatcccaacaatttgggaggctgaggcaggaggatcacctgaggtcagaagttcaagaccaacctggccaacgtgatgaaaccctgtctctactaaaaatacaaaa

SEQ ID NO: 695680 - DNA, 158 bp, Homo sapiens
tgcgccgtggtgtctgcgcttagcatcgtttgacaccttgcggtggccagcaggtgcgggcgtcttcagcacgaagtccttgatggccgagtcctgggtggagccctgctggacgtccatcatgtggctccggggctcatactttgactggaatatct

SEQ ID NO: 695681 - DNA, 205 bp, Homo sapiens
accatcccctcccccgcggcctccgctctccactcccgcttaccctcaactcttcgaaatccgccattttataccacccgcgggcgccgccgccgctgccgccgcacccactcccgctgccgccaacgacgctgccgccaccacggccgccgccgccgcctccagcaccatcctgcactgggcgccgcttaagacgccgcggccg

SEQ ID NO: 695682 - DNA, 279 bp, Homo sapiens
cccccctcgttttagcccttacgttttaaaaacttgttccaaacccctggggttatttcccaaaaaaaaaactgggaaagataaatcccccaaagcccaggggttagggggtttttagggggtaaactgggaaggggggggaaaattagggggtgctttcctgctttggaagggtgaagggtcctgggcccttttcatgtgggggttgaaaagctcccattttgtactcccgggtaaaaagctgtgggaccaaaacaaaatgaaaaaagttttttgtta

SEQ ID NO: 695683 - DNA, 330 bp, Homo sapiens
tgatcagaggatcctcttatccgggagagagaaaaaaggtttatgatgttgggggctgtattagtctgttttcatgccactgacaaagacataaccgagattgggaaaacaaagaggtttaattggacttacagttctacatggctggggaggcctcagaatcacggaggaaggcagaaggcacttcttacatggcagcggcaagagaaaaatgaggaagaagcaaaagtggaaacgctgataaacccatcaggtcttgtgagacacaatcactatcataagaatagcacaggaaagactggccccccgggtacagctccccggatacag

SEQ ID NO: 695684 - DNA, 384 bp, Homo sapiens
  misc_feature (245)..(245): n is a, c, g, or t
  misc_feature (317)..(317): n is a, c, g, or t
  misc_feature (345)..(345): n is a, c, g, or t
  misc_feature (366)..(366): n is a, c, g, or t
aacgggtgatgcggttgggaagaggcgctcatcacttcctagatgggatggcggccgggcggagacgctcctcactttccagactgggcagccaggcagaggggctcctcacatcccagacgatgggcggccaggcagagatactcctcacttcccaaacggggtggcagccgggcagaggctgcaatctcggcactttgggaggccaaggcaggcggctgctccttgccctcgggccccgcggngcccgtccgctcctccagccccacatcccatctctcaacactggtgcattagggattacatttacaacacanaactttgtgggatacattcaactcatangcattgcataatttatgaagntaaaaaaatcaatcaacc

SEQ ID NO: 695685 - DNA, 119 bp, Homo sapiens
  misc_feature (8)..(8): n is a, c, g, or t
  misc_feature (38)..(38): n is a, c, g, or t
  misc_feature (91)..(91): n is a, c, g, or t
tgagcggncacctggggtcggcttgggagacctgaagnatggcaccaagctctgctgggaaatgggcaggcgtgtcactgtggtctccganctctgctgggaatgggcggctgtggctc

SEQ ID NO: 695686 - DNA, 844 bp, Homo sapiens
tgctattaaatggtaaatgaaccaagtgtgtggttttggttttgttttggagacagagtctcactgtggcccaggctggagtgcaggggtgcaatctcggctcactgcaagctctgcttcccaggttcaccgccattctccgggttcagcctcccaagtagctgggactacggggcacccgccacagggcctggctaatttttggtattttaagtagagacagggtttcaccatgtgagccaggagggtctcaatctcctgacctgttgtgaaccaccggtctcggcctcccaaagtgcggggattacaggtgtgagccagcacgctgggcccagtgaaccaagggtttttaaggaaacaaaactattttttgaatcatcagatttatactagctatatggatattagcatatcgggtaattatgaatctagaaattttttacatatttttataatacggtgtagctcagttatgggatgagtgaaagataatcatgggggtcttgaatagtgtcaattttgttacagatacaacattaaattcaaatcgtttactttataaatgtgtccatagggcgacactttagatatcacattataagggaggacggtcttcattgctcgtgggtaatgggtgttgtcgtcacaagtatatgggactcctgagtgtagggtgaacaggcttacatggtgtggccggtaaaggccgttggtcccttggtgtatgaaaatgggtcaggttttaggcaaaactaggggagtccaacccgataggtaaaatgtgtactggaggaaatagttttgtccattgggccaatttttgcaacaaattggagttacgagg

SEQ ID NO: 695687 - DNA, 758 bp, Homo sapiens
ttgctgccacctactggtttcatagagccattgtttgtttgtataatatggtgggtatacggtacataattgggcccaacttgtcttgtttttttgtgggttcttttaaaagatgtgctctcaaaagaggtatacgtgtggtcgtagatcactcgcctaatttactagtttggggggcgacaacagtctaaatctgcttgggccgcccaaaagctaggtttggtcccaatatctttgttctcaccactagatgccggacgatgaaggacatatcttgcgggggtttacaaagattcgggcaagactctccaccaacttgttctccattgtcaagtgtgtacaagtgccagctttcgagcttcttgcttctggttacgccctctaatcccgagtcacactcaggggctacctggcaatctgtcttccagcaaccctgttgcaccttagaaagctgctcattgatggctggtatcgatgactgctacacctctagccctggggctgcatcttccaccctgggcaaacttcggccaaggccacactttgaagcaatgttgtggagaccttgacagctacctgacccccgaccttctggaatggagactgtattcgcccagtctccctatcaggagttccctgacacctcgtcaagacccacaccagagtctcccgcaccggactcaggctccagctgtggtacaaaatagggtttttaaacaagaaaattaagtgaattaagcgtgaaaaaaaaaaaataa

SEQ ID NO: 695688 - DNA, 172 bp, Homo sapiens
tctcgctttactccagagtcacattgactccggaacgtgagggtactagggctgatggagatccccagtgcgatccctgaacctcctgcctcaaataccagtaccaccagagtaaccaccctactgccactgatccctagctctgaccctggggatcctactagatgtctga

SEQ ID NO: 695689 - DNA, 173 bp, Homo sapiens
gcaagtaaagcacacttttttttctcctaaaatgtttttccctgtgtatcctattatggatactggctttgttaattatgattctgtattttctctcctctttttaggatatagcagtaatgctattactgagatgaatttcctctgtctgagatgtaatcattgatgcttga

SEQ ID NO: 695690 - DNA, 630 bp, Homo sapiens
agttaaccgtgtagcaactgttcatacagcatctatgtcatacagatgcctgtggtaaggaatctagagatgaattaaagtgcatggtgtcgggggccggcctcagtggctcaggcctgttatcccaatactttgggaggtcaaggcaggcggattccctgaggtcaggagcttgaaaccagcctagccaacatggcaaaaccccatctccactaaaaatacaaaaattagccaggtgtggtggcaggcgcctatagtcccagctgctcgggaggctgaggcaggagactcgcttgaacccaggaggcggaggttgcagggagccgagatcacgccattgcactccagcctgggcaaaagagagagaatccgtctcaaaaaataaaaaaaataaaaaattaagtgtacaggcggatgctgtgggttatgtaccaatgccacgccgtttcatatctgggactgggcatccttggattttggcgtcctccgcggtcctggaaccgaccccctgtgggcaacaagggaccactgtgtgtttcagtgtgagtatgagatgggtgtgagtgggacttgcgtatgtagaggtgtgtgtgagtggagtgagtggagagtgtgtgtaggcgataatca

SEQ ID NO: 695691 - DNA, 318 bp, Homo sapiens
aggtcactctagaggactccccctgcgggtctcatactctgtatggccaacggtttaaaatggtcaagcataaaaaaaaatgacatttggataataaatactgctcttggggctgtaataaataaaaagtttattaaccaagggaatgcacttatcccagcccacaagttatcttcaaaatgtgaatgaaaaactaattatatagtggccataagtacacagcttacgcagaccaaaaagctgctccagattacagccgtttaaacgaacagtgggagctccgcgtccctttgctccctccccgttcgaggaagttat

SEQ ID NO: 695692 - DNA, 100 bp, Homo sapiens
gtacaacattcgggtgaaaataatggtggtatcgacatttacaattttggtggcgaagatggataatcatctttgaaaagcatccgtagtttaaacaagc

SEQ ID NO: 695693 - DNA, 151 bp, Homo sapiens
aatgaatataatcgatgagggacatttatctagaagatataaaggactcctgaaactcaatataaaaaggcaatctaatgaaagaatgggcaaaggggctgagcaaggcggctcacgcctgtactccccacactttgggaggccaaggcag

SEQ ID NO: 695694 - DNA, 1035 bp, Homo sapiens
ggctgctcgtggaactgccccacatcactctccttacccagcatggacctcatggtccattcatggtaatgctggccttcagtctggagctactacacacaggttctggatgctctcctagctgcttgcatccggcctggctgtctgagccctttgcttcgcggccacgtaaccggaccgcgtgtctgttgggacaggctcagatgcagacatctatcggaaagaactatagccctgtggtcctccctctctatcccatcgtctacagcgatcccaggcgtacgagacgcgagaggctatcgcacgcgcacgtccgtggcgagggctgatgcgtagttacacaaggcccaaatggtggatatcgtggtcttgcagcagaccccacagcacgcaggcgcataggcctgtggggaaacgcccactggatggttctcgtgcagctggtgaagaacgccgagcgttccagtgttcctcgttgcgataatccgttgcgccagcgttcactggtcacactatgcagagagggggtgataacatggtggagcttccaatgaatgggcgcaacacgtaggtctggcgaggatcatcaaaccctctggtgggaatgaatccaaattttctctcttgttccgttcatggttcaatgtttgcttgcacaacgagaagacttgggtctcttcttgtgtcctaatgccggcgcaatgggattttggcgcttggggctactttgctgcaaatgtccctctttgtagccatttcttccctacccccgggtgcacccccctccgtttccttggtcgccccctgtgctcctgtattgcctggtgcaagtggggccaccagaggaggaccgccctgctggaagattggttcttgtcttacaagggcgaggccgggggagcccccgaggggcttgggacagcggggctggttggcctgtgcccagatgttctcaacccacccggttcttttggtggttgccatgacgacggggggtgccctttagttggccctatgatccgagggcctgtttgg

SEQ ID NO: 695695 - DNA, 175 bp, Homo sapiens
taacggatgtggggtttcctttcggagtgataggaaagttctggaatgagatagtggtgatggttgcagaacaatgtgaatgtacttaatgacgctgaattgtacactattaaatggttacaatggtcaattttatgtgtatttgatcataataaaaagaaatctaggctgggaa

SEQ ID NO: 695696 - DNA, 250 bp, Homo sapiens
ctccccgcaatccaggcgcacttctgaaacagaaacggagtcatcagattgctcacagtggccaatcttgccctaagtcaaagctctgaagcactgcactaaaagagctcttggaacacctatggataccccaggaaaggaatggataaagttaagccatgatgacctagttgaatccagcccttctgcaagtgcctagttttgacttctgggatggaagtccttccaggcatgccaagagggaaggaaa

SEQ ID NO: 695697 - DNA, 888 bp, Homo sapiens
attatcctaccatgaaccatctcctgtctagagaatagtagtatatcggctcaaactcaatatcgtcaccctagatatgccttgaagagaataatgaggtatcgggtgtgaccaatatgaaatagctgacatcatcgataatcgtcaaataccactcgctcctttaaacgcaactatggtgctctatgggcctgtactagtctttgacggctgcgaccgtacggatgggactagccctactagtctcaatctccaagcacatatggcctagactacgtacataactaaactatccaatgctaaaactaatcgtcccaacaattatattactaccatgacatgactttccaggaaaacacataagtttgaatcaacacaaccaccaagcctaggttattagcatcatccctctactatttttaaccaaatcaacaacaacctattgagctgttccccaagcttttcctccgaccccctaaaaaaccccctccttaatagtaaatactgatcctacccctcacaatcatggaagcaaagcattatccaagtgaacactatcagaaaaaatctactctctatataatctcctaacaatctcttaattataacattcacaggcacagaataataatatttatatctctttgaaacaaattatcccactgggtataataccgatgaggacagcagaagctgaagaagggcctatcgatttaactagatggtctccctaaatgatattatcaaaacctagtcaaaaattatatccctctgcagaaataagcgggcaaattatagagttcaacttaaaattggacctgcaagtggccggaatgtcccaagagaaagccatcccaaatgttgaaggcaataacccacaccctctct

SEQ ID NO: 695698 - DNA, 118 bp, Homo sapiens
tcatgcactttatttaaccatttaatattctgtcatggtacctgattcataggtaggattttgaatattaatgtatgttaatatgtttctgaagtacttacaatcattcttcagcacg

SEQ ID NO: 695699 - DNA, 157 bp, Homo sapiens
cctcttcactgtgccgagctctaaacaaaaatgagaataagtttgtaaatgacatgaaaaagcttggaaatattgtgtaattaaagttgcaggaaatcagacaaaaaatgtatttctaaacacatatagaatgccttgtaaatttcaggttccatat

SEQ ID NO: 695700 - DNA, 711 bp, Homo sapiens
gagacgcccaccgtgtccctggcactctgcagcaataaaaggctagagaagggcagggatggtgcagaggagaaagggatgaacttgctccgaggacaaaggaagaaataaaacctgaatggagttttgaaagtcgaaatcttgcaagccaggaagggaggagaaaatgtgaagacataataagctaatacaggtgggagaggagggtgtcaaccaagacatgaaatggcgtcatgtgttttaggaacgtataagcagctgctggaatataacatgctgggagagaaatgaaagagatgcatctggagacagaggaaggggctgggtcctatggagccatcggcgatgtcctgagttgttcttgagcacactttgtgggtatcaaaacacttacctagggcctgggactttgtatgaccagagtcgtgagaagtcaacatcaccacaatggccatttctctgctgcgatgggttatgggtagaagtacgtgttttctgatcaccagccagttttttaaaataacagaggttttgttccgtatgacacatcaaaataggttctatgggggctaggtaataccatttaaacattatatctgaaaagtcagacctctattcaggtgaccgaatgcaggactctgccagttgacccttagaaccaaggtacattgaggggatggcaacggcatgccgtgaaacaccctgattcac

SEQ ID NO: 695701 - DNA, 1055 bp, Homo sapiens
gagcagaagaagaagcggaccttccgcaagttcaccataccgacggacgtggacctcgaccagctgctggacatgtcctacgagcagcctgatgcagactgtacagatgcgcgccagcggcggcggctgaaccggggacctgcggccggaagcagcactccctgcctgaagcgcctgcgcaaggcccacgaccgaggcgccagccatggccgaagccggacagtgcgctcgcagacgcacctgccggcgaccatgcatcatcctacccgagcatggtgggccgccatggtggcgcgctctacacaccgcgcacacgacctatcaaccacggctggcacgatcaagcccgagcatgatcggcccactaccctgcgcgccgcacttctcccactcgacctaccaagccccgctccccgccatggcccggacccgcgccatcggcggcccaccccaactccctacccgaatatacaatcccgtcctcaagctacactggcctcaagggctaaactaacacagcgcgccaccactgcacatccagacacaccccccgcacaccaccgacccagccacacacccgccgccgctcacgcatcccacaacacaaacacagcggcgagcgaagccgcgcgcgtacttcgaggagagagcgcatacaacacagctgtgccgtgggcgatgcccaacacaaaacgctagcgaagcgggatagtcttaccagcagaccgactaccgcgctcacgccacaccaccaagagcgcgggccacgcgactacactgcgccgcacagccagcaacaatagatgatagacgccctgctagaaacaaacgcgattgggacgcgcagcacaaccaagaaattaccaccaacagaaagacagtgatgcagtcggtcgcaccatagtggggcagaacgcagagctgacggggagaaactaccgtagcaggcagagaaacctcccctcatgcgcgtctgcctactagacggaacaaacgaaactagcgctcatctactcgctacggcgtcggtcctcagcaccacaagcccacccgac

SEQ ID NO: 695702 - DNA, 667 bp, Homo sapiens
gctggttggccaccgtgcatcgggatgccagtggagaagaggtacaacagtgtcctgttcggaggtctcatggctcggcattctctgtcctggcaggtttctgtgtgcgccacggtcagctggggccacctctgactgcttggggaggcgcccggtgatgtctgctgtgcctgtatgggtgtggcgcgcctcatatgcagtctgggccacctctcggagcttggcggtgcttcctggcctccaggctgagttgggggcgatcagcacagggaacgtcagcctctccacggccagtcgttgcgtgacctgggctcgcctctggcccgcaggtcgaggcatggcggtcattgtgggtggttcttctcactggggcttcaccctgggccctatgctcgcgagcctccctgcccctggagaactggcaccctggttggccctggtcttcgcacgcctccgatcgctgctgttcatgcttctgcttcgctgcctagagacgctgcccctggagaaacgggcgccctctatcgccctggggttccgtgatgcggtgatctgctcagctcccctggccctgtctgcgcttctcggctgtcgcgtcgtggccaggacccaccctctggagagaggttcagcagcctgcgccgctgggctatgtctacttcctcta

SEQ ID NO: 695703 - DNA, 91 bp, Homo sapiens
gtactgttccatcccaacagtggagctgctggagagtatgggggcctgcagactgtccgcctggaccatcacaaggccttctacattactg

SEQ ID NO: 695704 - DNA, 1038 bp, Homo sapiens
  misc_feature (202)..(202): n is a, c, g, or t
  misc_feature (249)..(250): n is a, c, g, or t
  misc_feature (607)..(607): n is a, c, g, or t
agccgattatctcagtgcatgctacttacaagatgtgctaagatataagcagaacaaagcatacagattgaccttgaatcataggattaggagatgaatgattgaataatagtatgaatcaatgagtgaacatatggctgcaaataaacacccaatcgaacctaccacccagcatcgcttcgtctataaccatgtatctagnatgtgactggctaagaaacatctcatctaggattttcttgggccagnnccgcgttgcaagcaaaaggagctgtggactggtatccctgggtaagcaagactactcaagtcagtgcatacagttagtaatgagcctgaccataagagcgttagctataaaaccagtacagaacgctgaacttcgccatacttgccataaaaagacccttagactacaggttctcacagaatcgatagtctactagtattacgtaaacgccacatagaatctcttagatgctatgggcacaagatatcaacacgactcataaagtattataggcatacgataatagctagctctcatcctaatacgaggctcgatactaatttaggataatacgctgcactctctcggtaacattantattgaattagccacagtatttactgacaaccctaaaccgcgtaaatgcatagcacattgggttgcacactcgggaacatctcagcacttgcaaggacacgcatcgtaagatattccgcgcaggtacatttgatgaaggaaaaaatgggccgtagagaatctgttaagcatcgtaggacaaataggtagtgaaggaacaatggaagacctctcaaataaggggatagttccctagcaaattctcggattcacacctgggtgtctatagctgcaaattgtttgggatcttgcctccacggtgcataatgcgttccagggaaacatcgaatgaacccgtaatcctggaaagcctcttggaataggatatttaaacgtgacagttactcagaattgctggtccagcctcatgagttatgtcttaagcaatttag

SEQ ID NO: 695705 - DNA, 381 bp, Homo sapiens
tccagtaaggtgtgccaggtgtgccgtggttcacgtatgcgggctctgagtgggggtggggtacaagttggaatgtatctgtgtgatgttcgtgagagtgtgggtgtactgaatagggagttgcataagtgtggagggcctgtgcgtgtaagtgcatttgagatgcgtgtatatgagaacgggagtatttagatgggattcgtgtgagagggtgtgggtgtatcagtgtagggtatatgtatgaaagtaggtgtattagaggagaatgtgggcacatctgagtaggagtatgtgagagcgtggggtatatctaagaccgcgaagacctataggatgtgagcagggctcagcctatgtctgaacgtctacatggctatgaat

SEQ ID NO: 695706 - DNA, 512 bp, Homo sapiens
ctggtgaaccgtgccgggagatcgtgtaagatcttccgatgagagtgagtcaccgtgtctccaggctcgaggttaaagagaaccgcgcatagagtttctagtagttctctgtatcttccgcagcatcagtaaagagttctacgcatataatgagcaaatacttcctgataacttacgaaatatctgcttctgtggcaacatctcacgggatatgtttcgagggagatcctccgagtataccacccctctaatgcagttcagatacttcagggattagctcctcacagttctccctgattgaaaactctgcgtacatacactgtgatctcgttcttttacttactgtttgcaaacagatcaaaaggagcccgtcgtgggaccaatagacgggctctgacttccaactgtccttcaactgacaaattgcttcagtgccaagtgatcttcccagtcattggtccagctcttatagacatactccgggactcctcattagtaatatcgtcggggat

SEQ ID NO: 695707 - DNA, 148 bp, Homo sapiens
  misc_feature (3)..(4): n is a, c, g, or t
tannggtgaaggatctaaggctggagactgtcacaccagtcaaaggatcgcattactattaacttttataattcggtgtagccctctagtaacctagtgaaatggttcacagagactcccagtctgataatttccggaaagatggttt

SEQ ID NO: 695708 - DNA, 539 bp, Homo sapiens
gcatcatctagtgttataaagccgcaaccggcagttctcgtacctgattgagaacagtggtccagtgactgagtggaggtggcccacactcgctacttcaggggcggcatgctgaccaacgcgcgcctcctcttgggccccacggtccgtctgccggacctcatcatcttcctgcacacgctcaacaacatctttgagccacacgtggccgtgagagacgcagccaagatgaacatccccacagtgggcatcgtggacaccaactgcaacccctgcctcatcacctaccctgtacccggcaatgacgactctccgctgctgtgcacctctactgcaggctcttccagacggccatcacccgggccaaggagaagcggcagcaggttgaggctctctatcgcctgcagggccagaaggagcccggggaccaggggccagcccaccctcctggggctgacatgagccattccctgtgatgttcactctcctcccaaagcaaaccacagccaagcctgtctgagctgggagtccccttcccc

SEQ ID NO: 695709 - DNA, 851 bp, Homo sapiens
ggaggctcagaatcatggcgggaggtgaaaggcacttcttacatggcagcaagagaaaatgaggaagaagcaaaagtggaaacccctgataagccatcagatcttgtgaaacttattcactatcacaagaatagcatgggaaagactggcccccatgattcaattacctccccttgggtctctcccacaacacgtgggaattctggtagatacaatttcaagttgagatttgggtggggacatagccaaaccatatcattctacccctggcccctccaaatctcatgtcctcactattcagaaccaatcatgccttcctaacagtcccccaaagtcttaactcttttcagcattaacgcaataaatccacagtgccaaagtctcatctgagacaaggcaagtcccttccacctatgagcctgtaaaagtctagagagcaagctagttacttcctagatagccaacaggggtacaggtatcgattaaagacggcgtgtctccaaatgggagaaattgggcaacaatagaggggttacatgaggcccatgcaagtccgaaatccagcagggcttgtcaaattttaaagttccacgaataatctccctttgactccaggtctcacatccaggtcatacgtgatgcaaagaagtggggtgccccatggtccttgggcgagtctgcccctgagggcttagtagggtacaggcttcccttcactggctagcttgcaacggctggttgatcagtagcctgcgggctttggcacggtgcacccggggaaaagcatgctggaggatccaaccgatctggggaccgagaagaggggggcctattttacaaaatcacctagg

SEQ ID NO: 695710 - DNA, 327 bp, Homo sapiens
tgcggtggctcacgtctgtaatcccagcactttgggaggccgaggcgggtggattacttgaggtcaggagttcgagaccagcctggccaacatgaaaccctgtctctactaaaaatacaaaaatcagccagacatggtggtgggcacctgtaatgccaactactagggaggctgaggcaggagaatcgcttgaacccaggaggcagaggttgcagtgagctgagatcgtgccactcgactccagcctgggagacaagagcaaaactctgtctcgggggaaaagaagaaaagaaagaaaaacacataggtacctgtgatatatcagtt

SEQ ID NO: 695711 - DNA, 497 bp, Homo sapiens
ggcctgagaaatttctttctaacaacttagttattgatccagaacccagctttgggaactgccactttattatttcataaacttcactggaagagagattgtgcctatgtatccaccattctatcacctgtgcctagtatgtttatggcatgaatgaatctcttttggatgaaaaagtgatggtgaaaccctgtctcattcatagtgaaaacacatacagaacattggaaaccttcacccagctcattaaagataatgcttgccaatgaaccacaacaaataacattggtttagggatctctgctactatagaccctagagtatctggggcatttctcatgaaagttctgattagtttttcctgaggcactactttatggtaataaaattggcattccatcaacaggttgatcgactgttcaggcttcccttcaaggtggcttgaaatagcagaagcaatagtctcttttaaataaataaaatttttttaatacata

SEQ ID NO: 695712 - DNA, 301 bp, Homo sapiens
aaggagctccacaatggcaaaggaaagcagatgagaaactggctgcggccaggtgaccagaccccattcaggagtccacgggagaagaggaggaagtcagccagaggtctaagccacaaatggccaggaagccaggccaaggagtctaaaatagtcaggattgagagacgtgggcaccacgggtgagaaggacacctgtgcctttgcaggcagtgtttcctcctgggcttccttcctacccaaaaccagaacggggcttggctgggtctgtgcacacagttggaaacagtggacaagtgct

SEQ ID NO: 695713 - DNA, 833 bp, Homo sapiens
ctgcagtcgatcagaggatcccccgctaacctggatagtcacggccaattcgcccagcgccattacccccgaaaggataccgagagcaaagtcaggaataagaaagcagctatcagataacttgctgtgcattctatgcactgcattttggacgatattacttatctcattggttataacttttttgagccgggttccgatgcaatcccctgtcgtaaagatcaatctctatgaggcttgcgcgatcaagtcgtgggccgcatactgtttttttatacagttatcattgcgtagctagctccaatgctggtagctaacgatagttgagctactaatttgacgtctggacgtcaatttattttgacgtctggacgtcaagtggttatagttttttcgaataaaatttaggtgaagattgaatgtcattagctcctggtgtcatacgtgacgcgatcatctctttcctacacgcgttaggcagtgatgcttcgtccaccgaaatagtcgctgggatttcttgcacgctcggtcaagtttccccttcttcggttcgttcgtacctagccctcaacacgccaaaaatttttgaacgtacagaacgaggccgctatcgcttgcaggggcttcctctgattcatttatctggcgtgggtgatttcacaaacacgaagatcggacaggctagcttgtaccgtgctgattgcttcgactggttagcgtcgcaggaagctagttcggtacacgccatagtgactgatccgccttatggcctagttgaatacaccgctaaagaaacaacaaagcttcgcagtgggaaaggggtaccgagctcg

SEQ ID NO: 695714 - DNA, 451 bp, Homo sapiens
  misc_feature (447)..(447): n is a, c, g, or t
gaggggaaaaagtcaaaagaaggacaagacacagtaggatcagagggctacggtctaagagcgggagctacagagctggaaattaccacggaaaacacggaaaggtggggcccttcacggcttcctcataaggataccagaggcaaccgggcatattaagctggacactgggcagatcacggtgtaaatggttttccaggaatacaagtggggacacttctgttcattggaccttggagtggacccttaaattttattatggttttttttcccctcagtcttcagctcacggcttcacttctagttccacccacttaccaaatatgatggactcatgcaggtgaattaaaccattatggcacactttttccctctcctctctctcagtattactcttaactggaatattttaaccggaacaatttaaataggctggacattcccagntggg

SEQ ID NO: 695715 - DNA, 151 bp, Homo sapiens
tcccccccccccaagggcttcccgttttcccggaggacgtggattttttttaaacaaaagggggctccccaccctgggtttccttttgcccccccagtgggggtggcccagggccctgggggccaataaaaacctttttgggtagccccta

SEQ ID NO: 695716 - DNA, 194 bp, Homo sapiens
ctgcagtcgatcagaggatcccccgctaacctggatagtcacggccaattcgcccagcgccattacccccgaaaggataccgagagcaaagtcaagatttcaatgcttcggcaagattcgcgagtttgccgcgaatcgagccatcgataaccaggtcgccggcgcgaatgatgacaccaccaatcagggtggca

SEQ ID NO: 695717 - DNA, 623 bp, Homo sapiens
ctgcagtcgatcagaggatcccccgctaacctggatagtcacggccaattcgcccagcgccattacccccgaaaggataccgagagcaaagtcaggaataagaaagcagctatcagataacttgctgtgcattctatgcactgcattttggacgatattacttatctcattggttataacttttttgagccgggttccgatgcaatcccctgttgtgtcatacaaaggctgtaccgccgtcacgtatttctgattggtcaggttcttcacatccagcgacaccttccagtccttgctcggcgtttcataccccacgttcgccccgaagattgtgtaggagggcgcatagaagctgttcgcataatccaccgccgtacgcgaagccgattgcacgttcaccccggtatagaagcccgccgggtgctgatactgcacttcgccctgatagatatgcttcggaattcccggcagttggttgtcgccgaaggtcgggtcgtgccggtagtagaagtcgttgtaggtgtacacctggcgcagggtgattttttcacccgaggtgttttcccacaggcgcgtattcaagccgcctcgatcccttgatggatcgtcgttggcgttgaatg

SEQ ID NO: 695718 - DNA, 121 bp, Homo sapiens
  misc_feature (68)..(68): n is a, c, g, or t
agcaggcccaggccccagaagtatggaaaaaatgagcttgactaccccacacaaatgaatccactcanatgttggcaagtggagcagagtcccaggacaggtacagaaacaccccccagtt

SEQ ID NO: 695719 - DNA, 246 bp, Homo sapiens
tcccaggggccccgcccaagtttttttttaaaagggggggggggatgggccctcccataggccagtccccccccggatttaggccttccccgcttggggtgatggaagggaaattaaaaaacttgccccttcaaaatgtttttttccgggggccgccccctggttttgggcccccgcctttccaggaacttggggatgttagggttcctttttttttttaatttttaaagataaggccccccttta

SEQ ID NO: 695720 - DNA, 905 bp, Homo sapiens
  misc_feature (905)..(905): n is a, c, g, or t
gtcagatgttgagatgacatgatggcacccctgtgacatgagactgtgaatgcacttgaataaactagatcagatatgactgacaaaagccccatgagccacgatgtggatggagtgattgacgactgatgacgctggcacagcaatgctcaacttataatgcctcctaccacatgacgtccctggaaggagctgcacggacaatggaccaaacgactgactgacgacgtctaacttacacgtacaatgaacaacgcttgcatgggacgactgagtcctgatgtgtgaccacgactccgaacacgcccaccaaatgtcgatatgtcaaccctggactcaccactgtgttctgtcgcagagtgcccctggagaccatatcaaccagtgtgaccattcacttggcagactctgtgaatgcacctctaaacaagcgacaaccacttgctgatcaacacggcacaggatactgaaatatagcagatcaaaacttcacattcaaagctgaaacaggtgatcatagatgtcagggccatgacaaatacgatacacgcacaccatacaagtgatatggagatgacaagatgtgataacagcaaacaatatatgagaaagagcagactactgtgaccctcgtgacatgagagacgtactgaagcttactcaaatcacaagaatgaacgaggtgctacccaatgggacaatgattggaaccacaattggtcacagttacccacaaaaaacaaacgtccctatccttcacacccggaccgacttggcaccaatccaaacagaaccaaatcgtatcacacctttgagcaaattggaacaaccatatcgctcaagcattaacgaaaacacagaacattcgacaccccaacacatcagacgttgcacatatcacacgn

SEQ ID NO: 695721 - DNA, 235 bp, Homo sapiens
  misc_feature (196)..(196): n is a, c, g, or t
  misc_feature (215)..(215): n is a, c, g, or t
  misc_feature (230)..(230): n is a, c, g, or t
ggaccacttaggaacagagtgtgttatagaagatggaaaatgttgtagcttcataatcttgcaacttcattcttcttccacaagattctttcatctttctccttccgagacatctttctattatcacgcttcacgagagttttcgatgtcactctctttggagaacagcatctctccctcttctgtgctactttgntgcttccaggtcgaacggngtaccgcagctcgcnaattc

SEQ ID NO: 695722 - DNA, 281 bp, Homo sapiens
gcccgctgcagaaccagactgtctgagactgccctgggcagcggggtgagcagctgagctgggcttccgcgagccggagaaggcacaggccatgtcccgggtcccggcaggtctgcgcagtctgttcccagcgctcatgcgaggcctaaaaaggaggagcaaccatgtccagaatccctgcaggacaggaaaagtgaggggaaatctcgacatggaacaaccctacaataaaaactgcaaggaaacctggaaaacgagggaacagccagacacgatgaacg

SEQ ID NO: 695723 - DNA, 188 bp, Homo sapiens
cagaaagactcatataacaagctgaagttgtgtctagagaactagaaaacaagaaccaactccaaagcaagaagaaaagatataactaaaaccagagcagaaatgaatgaaactgaaacccaaaaaaatccataccaaggatcaataaaaaaaggttggttatttgaaaggataaacaagatctataa

SEQ ID NO: 695724 - DNA, 132 bp, Homo sapiens
aagtagtcacggcagaaaagaaacgcgaacactaatgcccaggagaaaaagacaggtacaatacacagacgacacgacaacgtgaacaacaaacaaacaacagccataacaacaccaaactaacagacacgc

SEQ ID NO: 695725 - DNA, 588 bp, Homo sapiens
aattagtggcggctggcagcgccgctgtagcgcccgcgctggcccaggtggaggtgggttcggcctcgcccctgcgcaagctggtgcctgccgagacactggagcgctcggccgctcagcaataccagcagatgctggagcaggcccgcgccaagcgcgccctggcgccgcccgaacacccccagctgcagcggctgcacgccattgccaagcggctcatcccgttcaccgccccctggaacgagcgcgctggccagtggcgctgggaggtgaacctgattggtagccagcagatcaacgccttttgcatgcccggcggcaagatcgccttctacaccggcatcctcgacaaactgaagctcaccgacgacgaagccgccatgatcatgggccacgaaatggcccacgccctgcgcgagcatgcccgcgaacggctggccaaaacgcaggccaccaacctgggcgtgcgcttgggcgcacagctgctgggtttgggcgacctgggcaacgcggcggccagcctgggcgcgcagctgctcacgctcaagttcagccgatccgatgaaaccgatgtcgatctggtggggc

SEQ ID NO: 695726 - DNA, 294 bp, Homo sapiens
cccacgcgtccgcccgattgaagccccccttcgtataataattacatccccagacgtcttgcactcatgagctgtccccaccattaggcttaaaaaccagatgccattcccggacgtctaaacccaaccactttcaccgctacacgaccgcggggtatactacggtccatgctctgaaatttgtggagccaacccccgtttcatgcccctcgtcctagaattaattctcctaaaatctttgaaatagggcccgtatttaccctatagcaccccctctaccccctttagagccca

SEQ ID NO: 695727 - DNA, 626 bp, Homo sapiens
  misc_feature (285)..(285): n is a, c, g, or t
  misc_feature (307)..(307): n is a, c, g, or t
  misc_feature (380)..(380): n is a, c, g, or t
  misc_feature (387)..(387): n is a, c, g, or t
  misc_feature (399)..(399): n is a, c, g, or t
  misc_feature (418)..(418): n is a, c, g, or t
  misc_feature (429)..(429): n is a, c, g, or t
  misc_feature (444)..(445): n is a, c, g, or t
  misc_feature (509)..(509): n is a, c, g, or t
  misc_feature (525)..(525): n is a, c, g, or t
  misc_feature (558)..(558): n is a, c, g, or t
  misc_feature (564)..(564): n is a, c, g, or t
  misc_feature (607)..(607): n is a, c, g, or t
  misc_feature (610)..(610): n is a, c, g, or t
tcggtacccacggtgtcataaacgtgatattgggtctatccagtgccgccgttaaatggcttaaccccgtatccaccgacactacaaatttagccccggcagcacgcgggcaacgccttccagactcatcttcggcaatacttcaacataagcaaatccttccgccagtcgtttcgcccgttcttcctcatgcggcgcgcccacggaagtttaatccgtattcctgaatcagccagtaaaccaatcaattctcgccagtgttcttccggccagtgtttatcatcnacgggtcgtcgcatgaaagaantacggcatattcgcccagcatcctgtaggcaggttcgtctagaaaaatgctgtgcgatagcataatcgccctngggtttntgcggtttgctnataggcccaaaccttttgngcaaaacagtntcgcggggtgcgttnnctactggcggtggcctgcttggtttttgccaatatggatggcttacgatttgtaaaaaactagngcttggctaagaggtntccgcgagcggtctttgcccagtccatgctcanatgctnttaatgccaatggcggcctagtatcgccgttctaccccaagcngcngcgccttttttaccta

SEQ ID NO: 695728 - DNA, 146 bp, Homo sapiens
gaacaaaggttgatcactgacaacaactggattcttattggctaaagatgatactagaagaatctatgatatggtttggatgtttgtcctctccaaatctcacactaaatgtattcccagcgttggaggtggggcaggatagcaga

SEQ ID NO: 695729 - DNA, 1219 bp, Homo sapiens
  misc_feature (990)..(990): n is a, c, g, or t
  misc_feature (992)..(992): n is a, c, g, or t
ggggtgattagcccggaaggggcccccctccgggggtttgtggccggagaatatttttccgcgggccccccccgaagtgggggccccccccccgggggcgtcccaccgggtgtccccccggcggatcttttgttcgccgcctttgccgctgattaatctttctcctgctgtgtggcgtgcgtccccctcttcttcgcgggttttctccgccgccttgtttttttcctcctcctctctctcgctcgcaaccccacgcagactggtgttctcttgaccccacaatccccccccggagattatattggcgccctgtgagagagtttcctcgagaagagagatattttcctcgagtatattatagtgctcctcgagagaaccctctggaagagaagagatagccgcccctcgagagaccccccccccacagaggagacaataaatactctcccccttcgcgctctctcccccacagagagaaccactcgacgattgtgagacacccacgcgggagagatcgccaccgcacacgcgcgcgagatatctcgtatatattagagcggccgctttgcgcgcccgcggcacacatatatgtcgcacgcgcgtgtatcacacactgttctcacacacacacgcacacgtgtgccccctctcgtatatatttgtgtataccgtctctctctatatatgagctctctgctgtttatgacacctcttttgtgtgatgagagagagtgcccacacacagagagagtgtgtgagaggtctcaccacagtggtgtgatgaagagagaggactctgtgtgctctcgccgctctctcgtgtcacacactctcacacagagagacaactctctctgcagcccacacgaatagcgcctcgcgcgccctcgtcgccttttctccacacatctctgttctctatatctctatatctctcggcgctcgcgccaaggagagaagagagaaagagacacttcgcgaatatgtgtngnggtgagaagagaagaaagatgggggtgggaagaaatatgggggtggggacccaccacatggaaatatttagagagattaacaccccaactgggcccccgagtgtccccccagggccgttaaacccacatttaatcaccgagagatccccctttttttttgttccaatgattttaattattggaaagccaccatttttttaataacccaaattaaaagttttaaaacc

SEQ ID NO: 695730 - DNA, 165 bp, Homo sapiens
aagattcatttctttcggcagtagatgtagattcatcttttaacgtttcttcaaatttgtttctgtcaggctttgtgttatttaaatggtttttaaaattatcttctatgttatcaataacctaaggcataggtaataggtttcttaaggtagatttacctcata

SEQ ID NO: 695731 - DNA, 774 bp, Homo sapiens
gtttatgttttgtttttgggttttttttttttccttgaaacagggtttcactctctcaaactccgtgggctcaatcctccaccaaacccggccagtatttctggttaatggtagataactgggattctcatgttggctgggccattcagtctggtggcaatatgttggtttgggctcagggatatataaaggaagtccagcctcacagagatagttagaaaagggagcaatattttggacagccttctcaaataatggtggatatatttatctgatagcataccagaattcaaaaagagaaagttggtaagtgttatgtgcaatatagaatctaaatcctatcaatgaatgtttcatactctcttacattgaaattcattgggttggtcttacactttggtgatcatggtatctccccttgccaggtaagtatgtcttatactttggaagggatcttttattacccatacttgtttggtaacatcatgcgtcagtcattgggaaaatatggcttcatggagtaacgtaaatcttccacagggtggacccaattcattatataatatcttaaaaatcatgtttattatcaccagcataacaatggtttttatggaaactgtgcagttctctgtgaacatatgacttctatcagtgcaccccaaactgctttataactttgtgtgactgaggatcgtggtcgtaaccgtactgtgactttactttaggacaacttactactttggatgtcctgtggcccagaatgtccggatacca

SEQ ID NO: 695732 - DNA, 339 bp, Homo sapiens
  misc_feature (291)..(291): n is a, c, g, or t
gacgtcaaggaaggtgagtggtgaagggtttttacatatatacaagaattcatgggctgggcatggtgtcttatgcctgtaatcccagcactttgggaggctgaggctggaggatcacatgaacccaggagtttgagactagtctgggcaacatagtgacaccctgtctctacagaaaattaaaataaaatcaggtgggtgtggtagtgcctgcctgttgtcccagctattctggaggctgagatgggaggatcgcttgggcccaggaggtcgaggatgcgttgactggtngaccatgccaccacattccagcctgggcgacacaaagtcctttgtctt

SEQ ID NO: 695733 - DNA, 516 bp, Homo sapiens
tacacgtcacagtattgatgtgatttaaaatgtttcagtgaaaactttggagacagttttaacggatcgcgaattaaccatagaacatgcaagagcggatgtatattgctttaagcaatcactcattaccaccaatctgtgaaagtaaagcaaaaaataataataataaatgccaagggggagagagacacaatatccgcagccttacaccttaactagctgctgcattattttattttattttatttttttggtatttattcatcaggaataaaaaaaacaaagtgttattaaagattgaaaatttgatacattttacagaaactaattgtgaagtacatataaggggtgacatattattacttttttggggactgaagaatgggtgtggctaacaaatttttggattttgaaaaaccctgctgggaggagttaataaaaaattcatggtaaaatgaatgtatcataatcaatattttgttggttgaagaggttgctaatacattttaatgaggt

SEQ ID NO: 695734 - DNA, 311 bp, Homo sapiens
tgctggcgtatgtgtactgagttttgtctgaacacctgtgttcacggcttgggggcatcatacctagcgagtgcaatttctgggttaaactgggaatttaactttttctcctttttctcaaacactttgaacgtatacctgactttgcagctggcacgggcttagcttctcagcgctgctacacgccacagcccaattcgcgcttgctgctgctgctgctgctgctaattcctctctcttcacgcactctacttctccctcctctactactcctctactctactacacacgctagatagaacgctgctacg

SEQ ID NO: 695735 - DNA, 1660 bp, Homo sapiens
ggacgagggggtggccgcggaggctttaacaaaggccaagaccaatggacctccagaacgtgtagtcttattaggagagttcctgtcatccctgtgaaggatgacatagttgtgtaaatgtaccagagatgaaaataaggtgccttatttcaatgctcggtgtttacttagaaatacaaagaacaaattggaaggagtggatgaagtatttggacaagctcagagatcttgatttgtcagttaagttgtcagaaaacatgaaggcttcatcctttaaaaaatacagaagttttatatagacccatataagctgctgccactgcagaggtttttacctcgacctccaggtgagaaaggacctccaagaggtggtggcaggggaggccgaggacggaggaacgaggaggaggtggcagaggtggtggcagaggcgggggttcaagacggtggcacgaggagatggccggtggggcgctcagagggaggaagaggtggtggttcagagggagaggaccttaacgtgaaaccatgttgacagacatcacagttgatttcttgattaactgatgatctgtcctactatgggatgggaaacttgttcttgaacacgtttggagatctgggcatttattgacctggtccacaaggtcggtcttgcaaggtgcacggaatatagatttggctaaaaaaatggaagtttaatgggtgagggcggcgcctggggggcaccaaaggacaggtcctggggaatagctgcaataggggttttcgtcaaaaaaaaaattggtcggtgcattcattaggtggtaactttttctttgttccttcctcttgctccttcctcatgtcgtaaacggcagtaaaactagccagatgaaggatacagatagatgactaggagagtagaacgtatagagatacgaggctgagctaagtgtagcgataaatgcaacgcaatactggacagagcgagaaacgaagaacaccgagaaaaggaagaagaaagaagagatcagcagacgaagacacacgcgaacgaagcgagacacaccgacaagaaagagagcgcagaacacggagaagagacaagaaaccagaagacacagagaagacaaaaagaagagacgaacccgacatagacaacacaacaagagcagagcagacacggagacggagcacgaacgcagagggacgaccgccagagacaggacgaaacgagaaagacgacgagacacagcgagaacacaccaaagacgacgtcgagagaaaggcagcagggagacagaagagcaagaagacacgagcaaacacacacagcagacacaatcgcaagcacagagcgaaagcagacaaacaagaaaggacacagaacaagacagagaaggaagaacgagaagagacagaaggcgaagaacaagaggaaagaaagaacaaaaaaatgagccccacaagaagaagcggaaaacaaaaagaaaagacagagaagaagccagagaacagagaaacaagaagaaggacaacaagaaagaaagaaagacagaggaaccgaaagaaggacaaccagaaaagaaaagaaggagaggaagaaagacgaacgacaaaagcagaaaacaaaagaaaaacacacagaagcaaacgacacgacagacaaacaacgaca

SEQ ID NO: 695736 - DNA, 586 bp, Homo sapiens
  misc_feature (79)..(79): n is a, c, g, or t
  misc_feature (218)..(218): n is a, c, g, or t
  misc_feature (284)..(284): n is a, c, g, or t
  misc_feature (336)..(336): n is a, c, g, or t
  misc_feature (340)..(340): n is a, c, g, or t
  misc_feature (389)..(390): n is a, c, g, or t
  misc_feature (395)..(395): n is a, c, g, or t
  misc_feature (425)..(425): n is a, c, g, or t
  misc_feature (430)..(430): n is a, c, g, or t
  misc_feature (440)..(440): n is a, c, g, or t
  misc_feature (457)..(457): n is a, c, g, or t
  misc_feature (464)..(464): n is a, c, g, or t
  misc_feature (471)..(471): n is a, c, g, or t
  misc_feature (512)..(512): n is a, c, g, or t
aggaaagggcaagaggaaagtgggagggcagggggtcccggcagcacccccaggggggcagcacattgctcctggcccnggcccacctgtggccgcgccaacccgcttggactgagtctgacctggcaggaactgcatgacagaaaccacagtaacaagtggcaaactctgaggacaggccacccatcaccaccaacaccactagtggtgttggtggngatgcctatgtgagtgatctcccaataaaaaccctggacatctaggcccaggccagcttccctggnagacaacatttcacacaagtgttgcacaattcattgctgaagtaattatttnctgnatgactccatgactccactaggaaaggactcttggaaacttatgactgnnttctncaggttttgctccatgctccttttcccttnctgantttgttttgngccatttcctttgctgncccaatnttctggnggctttcaaataaacttttcaactctcatataataattttntcactttaacattccatttttaaatataggtttcattatatgctaaaaatcttcataccaccaacaccactggg

SEQ ID NO: 695737 - DNA, 155 bp, Homo sapiens
tcccctagcggatacatatatagagtaaagctctaagactcctgagccaactttactgtacctagtcttacctaggctgggacatgaactaagtaaagaagccaaggcagtacagatctaagcatagcagagaagtacgtctacatactaaaaca

SEQ ID NO: 695738 - DNA, 709 bp, Homo sapiens
  misc_feature (87)..(87): n is a, c, g, or t
  misc_feature (183)..(183): n is a, c, g, or t
  misc_feature (196)..(196): n is a, c, g, or t
  misc_feature (226)..(226): n is a, c, g, or t
cccaagattttgtttttaattttcttgcaaaaatggtccagcttttccccgagtgctccaagaggtcggccggggcatccctcgccnaccaataatggattgagaatgcttccagcttctagccaaacgtgtaaaagtaggaatgctccaaagtcaccggtgttctggtgttgtctctaactnccagcgagcggcntatttgagtgtgttccattccctagattcncgcatgtatgtcccatggcacgcacgcatatcagtctgtcactttcgcgaacatgggatagaagtcaacacactggtacgttatgactgacgtggcccatgagcatgagtgcatttgctcatcaggcacagacttggcagggtcagagaaccctctgtgggcagacacaggcccatgcatgacctgtagtgggcggcataggaccagacactcggaaaggagtgtcgagtactgaggagacgcactcgttggctcaaccgctctcgctgcatggaaagtaccgatacagttttagtcatgcctaagctcacaaggaccaggtgcgtcatgagaattcataagaattgatgtaggttcctggagtctcaatatcccgatcggcttgattgtatgtacaaggccctcttctgttaaaaataagatggtatgtagaccatgtatgacctcagtcaatcataaccatgggtgcaagtaataattcta

SEQ ID NO: 695739 - DNA, 625 bp, Homo sapiens
gttggtcatggacgggcaggcgtgtagaggcgatgtgacttcgttggtgctggagcagtgtggtgacccatcaccgcctgatactgcccgccagccagccctcagacggagagcgagtatcagtgcgtcgctggagataagtgtgcctacatcactgtcatccaacacagacgtctcctcgtggatcgagtatcccagcggccaggtgtatgtggcagccgtgcgcctgcagcgtgtggtgccgacctgtgagctatgccggacctgggcagaggtgcgctggaccacggatggagaggaggtggtggagagcgccgcgctgctcctgcagaagggaagacactgtccgacgactgatgctgaccgatggtcagctcgaggaactccggcaagtacttgtgtaaaattgacgatgagtcggactccttcactgtcaccgtacacaaaagtctaaacaaatcagggacagttcaaataaaattccgggaagtatgcgtcctcttgaaaaagccgaaaaccgggagatctggtcccgcttcccccagggacctctgatattctggcctctggtcccctgtctgctggaagaggctcgtggctcgtgtgacagtcagtgccgactgag

SEQ ID NO: 695740 - DNA, 433 bp, Homo sapiens
taacagaaagtgggtgataaacactgagtatctcaaacaaatttatctactcaaaacatggggtatgtggctcttatagtagaaaaccacggtggtcttatctcaaggccagagtgagatgtgagaaatgacctctggcattttggtgggtaccaacataaagagaacagggaatctgaggagagcaaaggacaacttctctgcagaacgaaatcactgtcattggtgaggtgtgattctacttcatttcttcatcttcctgtccctgtccctcttacttcaaatacttctcttttctccctggttatttcctctactccctccttcctcttttttatccctctccttgtttatttttcatccctccagcctcagcaacagaacaaggccctgtctcaaaacaaagaagaaaaaaaagagaatactatgactc

SEQ ID NO: 695741 - DNA, 221 bp, Homo sapiens
cggtacacccataattaaatatctcccatgaaaagatgctcagcatcactaaccattaaaaaatgcaaatcaaaaccataatgagatactacttctcacccattaggaaagcttattttcctcttttttttttttttttttattggaggcagggttaccccaggcggggaaagaggctcagcgtggggggaactctctagagtcacccgtgcaggcttgca

SEQ ID NO: 695742 - DNA, 978 bp, Homo sapiens
ctcaagcgttacgggtccgcctccgcgatcgcagtagccgtacgtgaccgtagtgacgatacggagaaccagttgcagcatgacgacgcggacaggctcgagcacatggactagattgattgagtccgctcgtcggctcggtccgtgcgagcaatgggggtccgtgcattgatgctagtgggctacacttcgcaggtacgatgaagccgcccggtgtcccttcttcgcgcttcatgcgatagagtgctccaccaatgatatccaaggtactaagtattgcagtgcgagtagtgggttctctcacatggacctaccgtattgatggggctgatgcacgtgcgggaagacatagataagaagggacagtcgcatacatcgcctttgaaggccaaaacctcacacacgggaaaccgcagggcaggtcggatacgaacccagactgtgaagggagcgaaacccataggagaaccaaggacagcgtgggaatacacaactcggccgttgtcgtacaaaagagagacgagtacgatgcatgccgactcgactggaaaagcaaacgccctagcgagagaggcttgacaaaagaacacgaatgagaccgacacgcatggaaaaggcgcccctcatgtgcgacacaaaccaggcgaaccgaatccagggacggcgcaagccactcaaaggagaatagcagagacaccgggccctagcgagggcacccaagaggcaaaagatgaagaattgaggactaagaacccaggtgacaaggaagctaactccacccaatgtatagcgaccactccggtgggacccgaaaaacacaccatgggagtcaaatcgaacgaaataggaagataccagagatacaatggtgaaagaaaaacaccaaacaacactgcaagccacagaacaaaaacaacaaaacacaagaacagcacacggaccaccaaccaagggacaacaccaatgcacaaatcatgg

SEQ ID NO: 695743 - DNA, 178 bp, Homo sapiens
tttttttttttaacccctttcccaggtttttggaaagggaaaacccctggcccccggggaaaaaggggggggtttccctttttttttgcctgccccacccctgcccccattgggtttggcccccccggggtgtaatttctttcccccccctaaaaaagtgccttttttccgggtccca

SEQ ID NO: 695744 - DNA, 465 bp, Homo sapiens
  misc_feature (185)..(185): n is a, c, g, or t
  misc_feature (357)..(357): n is a, c, g, or t
  misc_feature (418)..(418): n is a, c, g, or t
  misc_feature (438)..(438): n is a, c, g, or t
  misc_feature (454)..(454): n is a, c, g, or t
cttgcttctttaacctcttagtaaagtttgtgtattctagattaccacagttccagagacaatgctggcacaaggcttccagcccatcctgtccactgacacggagaatgaaatcgtcctgcctctgggctccttagatcaggtatccagagatttttactcctccagtgccaggcagggcctancgtccataaactcagcaggaagtagttacggaaaacagatctccgcccttctgcagcccccttaagattaaggaggagtatctaatctctgaagggggaatgaggtaggaggtgggactcaactctgggaagtgggggctcaggcactcagaccaaactgagcacttagctnaaaataggtccaggggcagatgctagttttccatagggacacaccgacctgtgttcaagtncagtttcaccatgggctctnggcagcaccccagaantttacccaccc

SEQ ID NO: 695745 - DNA, 267 bp, Homo sapiens
ggcacggcctctacacctggcgataccttcctcgataaaagcagcaagagctaccgcgcggtggagttcttcgactggcaaggtgaccccacggtttggcgggcagatcgaggccgtttaccagaaggatattcgcccgggcagccaggaccagacctggatgtcgctgggcgtgcgcccggcctatgccatctccgaacagttcaaactggtcaccgaacttggccatgatcaggtcgaggccaccggtggtacgcgcaagctgag

SEQ ID NO: 695746 - DNA, 682 bp, Homo sapiens
ctaggcacgcacttggccccggcgccacccgtaccccttccgccagagcatgtgacacggatcccgggtacctcgggacgatggacgagaagctgtcgaataccaagatcatctttgtggtgtgtgggcctgggctctaggtaagggcacccagtgtgagaagatcgtgcaaagtatggctgcacccacctctccaccgcgggacctcctgcggtccgacggtcacggctcaggctcggtcaggggcaagaatgctgtcggaaatcatggagaaggggcagctggttccattctggagacatgagtcggacatgctccgggatgctcatggtggccatagacgtcaaatacttccatagaggcttcctgattgatggctacccgctggaaggtgcacgcaaggagacaggagctttgagcagacggattggacacgtccagcacatgctgctgtagtgtggacgcgggccctgagcacctatgacgccagcgggctcttgatagacgtgtgatgccgaccagcgagcggcgtgtggagcggacaactgaggagaccactcaatttaagcggctggagacctattacaaggccacagaaacccgtcactcggcttctatgagaaacgtggcattgtgcgcaaggtcaatgctgagggctccgtggacagtgttttctcccagg

SEQ ID NO: 695747 - DNA, 165 bp, Homo sapiens
tggtccgacgacaaggggcgacttcctccgactcttccttggcttcaactagctggggctgcagctagcagtcaggagcagctgtggtggcagcagccacaggggcagtagccacaaaggcagatggattcagccatagcaaggccttgcactcttttcagcaag

SEQ ID NO: 695748 - DNA, 242 bp, Homo sapiens
gacagtcagacctgggctgactggaagtatcttactttggtatttttggtaggatgcttagccactgcgaacatctatattcattacatgtacaacagacatatgaagtgatgacgcctacacatctcacactgaacatgttgaaagcagaacggctgctcttactgcacacatgtggtcttactgtgggcttccccattatactcgatggtacctccatcctttcacttagccagtcgata

SEQ ID NO: 695749 - DNA, 341 bp, Homo sapiens
  misc_feature (312)..(312): n is a, c, g, or t
gtagaaactaatgagaaatgaaggttgtgatcgtcctgttcctgcctgctgctctctccctaagttgggcttgagaaacagtttctataggagagggaggagtcctaatgtaaataccacctacacccaaggctgtatgtatttagcttaatctgatgaatcaggttgaactcgtaccttagcagtctaagcctgaacgccataaagcctttaagtccattcctggtgttcaagtgagaaggttctgggtcaggcgtggcactggttggtaaatatgtgtcaatattttgttcctttggaggtgaagctggngccattcattaatgagcccacactgctga

SEQ ID NO: 695750 - DNA, 993 bp, Homo sapiens
ggttcgctcaggtcctttagaccagagtctttatgagcagacaagctttgtatgagcggtcagtctggtggcatggataacagtctggcgtccacatcggccaatgtacatagagggacgccgagctggtgtgatctctgtcgctggatgtggtcaccggagagcgagtgcagatagactgatgactgtcgtgacagggggcatgtcgcagtgtgagcccattcaactgggtcgcgccgggcagcagggctcgtggtaattgggcaacattctcccgtgtatgcagcaacgatcgctgacgaacgaaataccccatgtatcgacttcataggaaatacgcctctcagcttgttgagttgcgccttcacgcgcagatagatgttgctcgtagcgaacctgtggatcagagacacctaacaactggcacatccccttctcacgatctcactccagcttgcggtagtagcatattactggtgagtgaagaagcgtaatctgcaattggaactgactgcaaggtccttcatgatgatatctagctttctcgccagtcctgtagagctgcaaccaccacctgaattctcacgggggatctgcacaacgacatctgtgtccagcacgacacgatgaggtggtgtcgacacaacactggcctccgatgacccatggccaagtcttcaaatgcctgtaccatccgcaaaggttggatagatcaatatggtccctccattgtccacgtctccattgctttatggcctgggttaggcccgtctcaacgcagcgtggaagtgaaggagtatcgagctctcacagtggcggaactcacccagcagggctttcgatgcaaagaacatgatggtgcctgtgaacccccgcaggcgataactcaacggtggtgctgtctttccggggtcggatgtcccttgcaagggaggggcgatgagcaaattgcttaacgtgccgaccaggaccgccgtccctttttgggactgg

SEQ ID NO: 695751 - DNA, 157 bp, Homo sapiens
ccgcgcctagaggatccccaagcacaatgtacagctttcttcggtccgtccatgcagagatgtaaaagcttaagggtcaaacaataccaattgtataggcaacaagtgatctggaacactatgacaagactcgtcatgaagaatttaaaaaatatga

SEQ ID NO: 695752 - DNA, 422 bp, Homo sapiens
  misc_feature (78)..(78): n is a, c, g, or t
gggcgctaagactcggtctcccttcggtctgagatctgctaggccggcatacctgctcatgtgctaatatagatgtgnatgaacctctttacaacggatttgtgtttgtcgttgctcacagacatagaaatctggcatatctatttgggtgatgccaccatctttgctccagtgctgtgggcatggtgtcatggttgtactagggggacaagaaaaacttaagaagagagtagtgctgatatacagtaaacttgcaatgatgcgtgctcatggaggcacagatcacatggatgacataaatacaccattaatactcaaattctatatttaaaatttgataagaaaagccatttgaaaaaaacattatttttaataactaggaactgaatgaactgatttagagctgacttactctgtgtttt

SEQ ID NO: 695753 - DNA, 309 bp, Homo sapiens
cgggaggattgcatgagaccaggagttcgagaccagcctgaggccaggagttcaggaccagcctgggcaacatagcgagaccctgtctctacaaaaaaatcaaatcaaatcaaataattagctgggcatggtggtgctgcctgtagtcccagctactcggcaggcagagacaggacgattgtttaagcccaggaagttgaggcggcagtgagccgtgatcacaccactgcactccagactgggtgacagagccagaccctgtaaaaggaaagtcaacaaaatttatgtaaggccagaacaccgtcgaag

SEQ ID NO: 695754 - DNA, 1648 bp, Homo sapiens
  misc_feature (326)..(326): n is a, c, g, or t
agcaggtctactcgggccaccgcaatcacggctgcgtagctgctgggtgtgctagggagaatctggataataagacagcattgttgaatcaaggatgtaggtatccgtggcgagtgttgtgaagtggggtttacatgggagagcagtgagagaggctaatcgaagagtgcgaggacgagtcaaaagactaactctgaggagaagagcgggattgtaggtaccctattggttgggctcggtccgagtgaaggcaatagctcgtggagttggacacgcgcgcacggtcgggtaggacatagagtcgcaagaacgcgcacgggaagaanagcaccaagttctccaggaatgctgggcatcgttaccatgtccttggatgtggttgcaatggtaagcagctgcctcgtagtagcgttattagcacacttgtttctccttaccctccgaatatatctccctaagtaggatggctaaatcgtcgcgagaagggaccgtgcataagcgtggggagcacgggtaagtgaaagggtgaaggataggccgttggcccctagttcttagcgaaacaccgccttccccaaatcgggaggcttaaccgagggcgtctgagtctcgacacgtagtgttgccccaatggtatagcctttcgctatcgcggaaccagatagaatctcagatccggtgagaatctagatgctacgggggcatcgaacgttaagtggtagccccgatggctgaatcggaggcgaacgcatggcgggttcgggcttgtgtccccgtggtcccggtggacccatatctctgggaacgactcctttgtcgatgaccgctacaagatttcccatggggatgcggtagccagaaagggctccaacgttctcaccagccatctgggtttgggaaaccggttgcgcgtttggggacccaggaacgcccgtactatgaaacgcgggccctgcccacaaggttgcgaattcgcaatgtctgggcgtgttcggaagccggcactcggttgggacaccgggggtccggagtcccacttccgtttaccggcttgggggaggaggccccaagggcaagacgaggctcttaacacaactcaattgggggttccaattccccccgcgggaacgggaacccagaacgccacatgtaactcccacactgcgggggccttgtggtccagcggaacgggctctcgtggaaatacctttgacgttacaaagggacaggccatttggtgggggaacagaaggcaggcattgggggcattaggacggcaaaacagaatgtatagctatggggggaaattccctttgagttatacaccttgcgagatctaaaagagcgcacagcgcatcacgtcgggattccacggctccggagaggcaacataggtgtcgcctatggccctggcgggacaaacaacccaggaggagacacctcggaagggggaaacgacacagtgtcccaccaagaggagggggggcaccgtagaaaattgaaatctcccgtgaacagctgtgtagacacaccagagaagccccgggagagagagagaggcacaaagaagaggaagcccaggaggcacacacggaccacacatccacacaaaagacacgacgcggagaggagacagcctccggccagg

SEQ ID NO: 695755 - DNA, 144 bp, Homo sapiens
gtcgtcagttacacagcgcactgaagccctgaactcccgggcccaaaccatcctcctgcctcagcccaccaagtagatgaagccacaggcacgcaccacttttcctggctactgatgtatagtatcttaatattttatgtttta

SEQ ID NO: 695756 - DNA, 361 bp, Homo sapiens
  misc_feature (321)..(321): n is a, c, g, or t
ggtggagatggggttttaacatgttggccgggctggtctcagactcctgacttcggatgattctcctgccttggcctcccagggtgctgggattgcaggtgggagccactgtgtccggcccatttttgttcactttaaaacttataccaggcttggtggctcctgcctgtagtcccggcattttggggggccgagccgggtggatcacttgaggtcgggagtttcagaccagtctggccggcatggtgaggccctgtctttaccaaaaaatacaacaattagccgggtgtggtggtgcgcgcctgtggtcccagctgcttnggaggctgacacagggggatcgctttgaactcttgtctca

SEQ ID NO: 695757 - DNA, 316 bp, Homo sapiens
aatcaccacgacatatatatgtgttcaactcagagcacacgcactctcaacaagctgtcgagtataccccggaaggccacgagctatgcatccaagactccgggcctggttcagcacggggacatgggcagtatctcctcctgaggacataaactaccctcggggctacacatgagtaagcttcacctatactgagggtgcacagaagcatcaacttgcctacaaattccagcatgaaccatggctccacaacagctggccacacagaagccacatccagggactgggctaacactggagaaggggcccggaaaag

SEQ ID NO: 695758 - DNA, 197 bp, Homo sapiens
gctgagagcaagatgggtcaccagcagctgtactggagccaccgcgaaaattcggccaaggttctcgtctcttgtcgtgtctgttcaaaccggcacggtctgtataccggcaaatatagcctcaatatgtgcccgccagatgtttacgctcagatacgcgaaggatatcggtttcattaagttcgactaaatgctct

SEQ ID NO: 695759 - DNA, 222 bp, Homo sapiens
cgggcataatgtagagctcttgcgcccaaagtgcccagaattattcactgacagtgtaagacttccaaggctctgagtatcaaaaagtctgcctattgcttccgcagctcattcttgagcatcgctgccacctcatggtcattgaagatcgggtggggaggctcgttatgaacaaaaaataccattttggtgctctgctccgtgtacggctgactcttttga

SEQ ID NO: 695760 - DNA, 192 bp, Homo sapiens
  misc_feature (125)..(125): n is a, c, g, or t
gagcggtctcagctcatggtacccagatcggatttgtttccactgtgccagaatgggaactccttacatggagttctgtgatatggaaaaaaagaaactactccgtgcaaaaccaaccataaagntagaacgttcttttcagaccgttttctttatcatcgttttgtcctatttaggggccacacgccacag

SEQ ID NO: 695761 - DNA, 757 bp, Homo sapiens
gcggcccagcgtggggcaacaggtcaggacccccagcgtgcgaaagggaaagggtgttgaagaaatgaggaagagagggtttgtggagagaaccccgagagtgagtgagagagagtgtggcagtattatctggcatagactgttatatatgacataattattggtgaaagacgcgaacacaatatgtatccctaccgtatagtgaaataggggccctctttccgtaagctgctgtacaccccgccactccgagtgaactcaggagaattcttcacgagccaaaacacgcccattcttgaaacacatacactgtagcacggattccactttaatgtaacacttggtgaaataaatgtaaattatagagatgggaaaccacgaattaaaaggttacacggggtttaaggttaagggattggtgaagggggtggttcactacgagggagtcctcgtggtgttgaaaacccactctgtcacgcctcgactggtggttaccccacgggctatacactgaagttataaattgtgtagagttaggtacacccaaggagtacacgatgtaaactggggagaactgagtatgttctgtagaactgtagcccatgtccattttctgcgtcctgatgctgtgctgtagtgtataaggtgttaaccttgggggaggctggggcacagggtaccccggacctccctagaccacctcctatgccacctcctgtgaatctataattacttccaaattaaaagttgaaaacca

SEQ ID NO: 695762 - DNA, 107 bp, Homo sapiens
ctctcgtgtgtgtaaagcctggctaactcaaatccacatagtcgagaaagaacctcataattaatgatgatgtcctatcacacagtccactagacacccacgtacta

SEQ ID NO: 695763 - DNA, 1688 bp, Homo sapiens
  misc_feature (1)..(1): n is a, c, g, or t
  misc_feature (669)..(669): n is a, c, g, or t
  misc_feature (1079)..(1079): n is a, c, g, or t
  misc_feature (1424)..(1424): n is a, c, g, or t
ngcagtgtgcgtgcctgtgtatcggcagcctgctccgtctgtgcatatgctcccccccgctggtgtggttgtggcaccaagaccgactgtgcgtcgtcttttggggggccaccgcctttgtgttgagaccctttcgtcaagggggtgtcccccacacgacgggtgtgtgctccgccgagcaagtgctcctggtcgtgttgttgttaaacacgctgctctccggtcctctcagcttggactctgtttaccccgcggtttctctccttcaaggggtttacttctgcgaggcggccccctttggtggttgtgggcccgacatatgttttccgcgcaccagaaaagccctccccgagacgaattattatgtggatgtgtgtgggatatgccctcctggtcttacacccaaaaaagtgtttgggggccccgcgcgatttggggtgtctagaagggaaaccccacttgtgggataggaattccaatagggtgcccgccctcttgtgaacgagggagggatgtctctagatgctgtcttgtttgtgttgctccccgctgccccgcgcgttgtattacggggggagtttctccaagagaggagtgcccatactttggagatgtttgcttttgttctcctctagaggggggggccccactccttttctgtttctaaanagggaagttgtaaggggtttttgtggacagagaagttttatatgccgcaacaagaggtggcccagcggtgatgtctcaggaaccacccgcggtggccccacgtggcgcatcagacgcgcgcacacccaagggggtttctcaaagagccgcaacattgtgtgttgccctatgatctcgggggggagcagtcacacacagatggtggcccacacacactcacgggtttctcggtgcggtgtttatagagagggccctcccacacagagagaggtgtggcgcgcaccctcccgcgacacaattctacccgtgtgggcgcacactcactatcctctctggcgcacacagcggtctgtctcgacgagtcgtgtgtctctcccgggtgtcgcgacacagagaggctttatactctngtggcggggggacaacacacagaagttcccgcgccacaagacgcctctcacacacacttgtgtgtccccctcattgaccacagcagaggtgtgacacacacggcgccgtctttgtcgcggtctctctctgtggcgtctggtataccgcgcgttcactgtcctctccgcacactcacacagggggcgacactctgcgcacattgtttctccgcgcacacctcggtgtgcgctatagagacactctgtgtgttcacatgatatgtggcgtgtgtatatcgcaatgagcactcggctatacacacctcacgcgcccgcggggctgtcacctcgtgccacaccctcggnggcacaacatttcgcccaaaggccacacctcttgaaacccacttttctatagagacctatcacaggtaacctcgaacccccgagccttctggaaaggaagactgtattttcacacccagttttccctataacaggaagttcacctgaaccacacctctcaaaaacccacacccccgagtttccctgcagcggactcaggctccccctgtggctcaccaacatagggtttttaaaccagaaaaattaagtgaatttagccgtgaa

SEQ ID NO: 695764 - DNA, 308 bp, Homo sapiens
gtggcaacaacagtagagagagtccaaaaaaaaagttaaagtgatgagtaataaccatgttactttatgcatgcattttattgggggaggggaggtcagaataattcacccaaatctagtggtcttatttcataggctaatctgggtttatatttgcattaaagatacgggagggcaatatttacagagtttagtttttcttaattaaaaacagtcctctattaatatagtgtgaaatatctttcaaaatttagagtttaggtttaagatgtctactagatatctttaagattttcctgtaaactcac

SEQ ID NO: 695765 - DNA, 1376 bp, Homo sapiens
  misc_feature (572)..(572): n is a, c, g, or t
  misc_feature (601)..(601): n is a, c, g, or t
  misc_feature (616)..(616): n is a, c, g, or t
  misc_feature (631)..(631): n is a, c, g, or t
  misc_feature (713)..(713): n is a, c, g, or t
  misc_feature (931)..(932): n is a, c, g, or t
  misc_feature (952)..(952): n is a, c, g, or t
  misc_feature (961)..(961): n is a, c, g, or t
  misc_feature (967)..(967): n is a, c, g, or t
  misc_feature (1003)..(1003): n is a, c, g, or t
tggcgtgtccctccagaggatttgacgggacaggttctggtagggggctcttcctgcctagcaccgcgaggaagaaagaggtaggggctggtctggtcaccagaggggtggggcggtaccgctgtgcgctctggctggctgcggaatcagggggagagcgaggcacgcgtggcaggctgagggaagtcagctatggcagcctgtgcgggctggggtgagctagacatgtgagtccgttcgggcttgacgtggcttgtggccagcggcacgcgggccccgggtgctcgcgtgctatgcaggcaggcttgctggtggcgtcgtgactgtggagggcgtggcgggcgtcgttgccgcaaacggcagcccgagattacggttcagcgggtttcgcgaagagtcctgtattccacgtgggtctattgatgggattgcgggcaagcctggcctcgggtgcttgtgcggggcaagccttgagttgcggtgctacgcgactgggtcggtcggaggagtcgccctagatcattggccgtcgcccgagcccctcgggcacttactttctttcgagccccggntatccctctgttgaccgactggtactgcnttggcgccggggcgnaggggccatttaccnttgtgtgagcagctgcctagtggttgtggttgcgttgccaaccggtgtggccctgcggtgccgtcggcgtccttggcaccgnttgttcgccagagtgcgcgtgtgaggtgccggatcgtagccgctggtgtgcaaccttggacctaggaaggtacgcttggcgtcgcattccgacgattggtacgcacgcgtgtacgctagctgcagcagtggtcttgcgtgcgaggtgcagcccaagagcgcatgttaatcgcattgcacccgcgatatagatgcgccgcgtgaaggggtcaccttcanngacattcgccggattttgangaagacacncagagnaggtgcttctggatgaaagccttcgctggaagactntaagactccatcgacgtcacgcgaagggtccttacggtgcgcaaagttggggccccgggagaaaaccaatccgcggtttacggtaggttctccagttttcaacacataagagcgtttttaaaaagttgtcctggcccttctaaaggcagagtatattggcggttacgcgcaatatccgggaagtgtcccggtaatagtcagtggagaactattacgctcctaagagcagggttttacaggagaaaaaacgcggtgtgagggtaacaggggtgggggaatatgtgcaggagagaacaacgactaggggcaaataatgtgggagctatatagagagcaccacacccgaagaagtgcgtcttaacacatgtgtacg

SEQ ID NO: 695766 - DNA, 392 bp, Homo sapiens
  misc_feature (338)..(338): n is a, c, g, or t
  misc_feature (342)..(342): n is a, c, g, or t
  misc_feature (370)..(370): n is a, c, g, or t
  misc_feature (374)..(374): n is a, c, g, or t
acccaaatgttaatatactattttttcagaaccagagatttctttctttatgctttttgttttaaaatggcatgtgttgcttttaaagccagaaaaagggggcaaagtttttaaggcagctgccttgcttgtcaatgaaattctcaactccaggcttctcttagggaaagaggcctccccaggatcccccgtcctaccccgggcggtcgggttgagttctggagagactgctccaatccccgaggcggaaggaggcaaccgatttggcgcagcactcagccagggggtagaagctcaggggaggagccgagcctttctcctgtccaagagcgagatcntggntacgccgggcgcccggagccctagtccnagcncacagccatcgcggtcgc

SEQ ID NO: 695767 - DNA, 319 bp, Homo sapiens
gatagtatcaatcatacctatctaataaagacctccacaagatggccaaaaaggacaggtttcacgaggagctagaatacgatggaagatatcttggagagtggtacatcacagagaggacagagaagctccatgcccctttccatgacctaccctattcatctcttccatctggctgttcatctatatttcttaaaatatgctgttgaataaatgggcaaacataagtgaagtgtttccctaagttctatgagctgctctagcaaattatctgaacccaagaaggtggtcatgggaaccccccctgaggcatgacaaa

SEQ ID NO: 695768 - DNA, 1592 bp, Homo sapiens
acctccacgtgtggataccacaaaggggagttgatgttcttaactatatgtgtgggttgggtaatatgtgactcgcacttctggttagacacatgtgtgtggtgaaccaacagtttttttttgtggggggaacacgagggcgcagtgttttttcgcgttatttaaaaacaagcacgaagggcgttgctgctgttttcgttagaataggcagcaatattttcccacacgcgcctttaataatcctgtataacgcgggtttatttaggagacaccacggttcgtcagacaagaataagtgggtcgcccacataagtcgccctgtgtggcccaccagggaagcttctctatagtaggtgaactagtattcccagcgacaatattttggggggggaataaacaccgtgggtcgctaacttgtctgaaggggcgaaacaagtgccgccttcctcaacacccttgtatcacccaaatgcttgttccacgttgtcccccactgcgctgtgtaaggaaattggtttgtccagaacacgccgtgttacttcagagagtatctttcgggacagttttaattttgtgttctcaaaaaggggtcgcactaatttgtattatacgacaaggttgacgccttctggtgggtaattaagccctccccaagacctttaaaggcgttcaacccaaaatggcggcaacagtgtcctaaaattagaggccccgtcaaaagtagcttttgaatatatggtgggtttcctccgctctctcaataatagtatggcccctctcccccctgatgtggtcttcttggtgcaagaccacctcgtgttgttggaatccccctgcggtgaaatcaacggcgggttcgaacccacgctaataaacagcggtggccccaacgcacacggagacgcatggggtctgttatattgcccctcctcggctgtatttatatagattacacggggattatccccactgccgacccacactttctctcgtagatattatgtagtctcgttctcctatcttgtgtattagtggcacgtgcacacttgtcccacaagaaatcccacacatatatattcacacacccacacataacacaaagctcgtgttacacacatttttacaacaccttcatacactaacatattatatgattgcacgcccactcttttctaaaacctctctttgatgttcccttcggtacaataattatatgagttgcaatagaggagtgtacccatcggaaccgtgtattcactgtgtcaccgcgcgtccagtaacgaccatgagcaccacttattgaggcacagaatgaaacttactcttcacgtcgtataactctggggattagtgggatttttctgagtttggttttgagctttgggggagaggggttggctcataaaatacagagctacatacatctaatgagaacccactcaccatatacccccactacctagttaaataaaattaatttattaactggcactcttgtaaatgcttttcatgaaagtttattttaaggcgagtgcataccttctgtaagcccatccttgtcttgtgataatcaagtgaaattgtttttctta

SEQ ID NO: 695769 - DNA, 561 bp, Homo sapiens
  misc_feature (498)..(498): n is a, c, g, or t
gctcctcctcgcccgtcgcgaggtccatcccgggccagccagcatgtccatccgacttcagctaccccggatattcacctcgctgctcagccggcttctcgggccgcggcgcccgaggtgcgctctgagctcctgctcgccccggcggcttggcagcagcagctctctacggcctcggcgcctcgtcgggcgctgcgtggccgtgcgctctgcctatgggggccctggtggagcgtccggcaatcacgcgcagcgtgcaccgatgtaatccatgatgcctgtctgggtgcccgactgacgggatggacgaccagacctccgtccctccagcgggtgcgccaggaggaggagcgagcagatcaagatcctcaacaatgaagtttgcctccttcatcgacaaggtgcaggtttgctggagcagctagaacaagcatggtggagatccaagtggacagctgcgtggcaggagtcgagaagtcggtccaagagacagtccgncatccgcagatcatgcttgtgagcgcccaggattggctgggaccttccggggtcagctctgag

SEQ ID NO: 695770 - DNA, 675 bp, Homo sapiens
cctccaaaggttaccaactgtccagctgagaagaggaagcccatccgagtgctgtctctctttgaaggaatcgctacaggggctcttggtgctgaaatacttggggattcaggttgaccgctaaattgcctcgggaaggtgtgtgaagactccatcacggtgggcatggtgcggcaccagggggaagatcatgtacgtcggggacgtccgcagcgtcacacagaagcatatccaggagtggggcccattcgatctggtgattgggggcagtccctgtaatgacctctccatcgtcaaccctgactcgcaagggcctctacgagggcattggccggctcttcaaagagttctaccgcctcctgcatgatgcgcggcccaaggagggagatgatcgccccttcttctggctctttgagaatgtggtggccatgggcgttagtgacaagagggacatctcgcgatttctcgagttcaaccctgtgatgatagatgacaaagaaaggtcagctgcacacagggcccggtacttctggggtaaccttcccggtatgaacaggccaatggcatacaatgggaatgataagctagagctgcaggagtgttggaacaagggaggatagcaaattcacaaaggagacattatacgaggcattccatgcaaagaacaagtcatcg

SEQ ID NO: 695771 - DNA, 364 bp, Homo sapiens
gagcacccagtaatgcgctgtcactgaagtaagaggactgagatgccatctgtggggcccgacagggagtcacgtctcaagagaagtgtgacccataattcccgcaaagctgtgaaagagacctctaattccagtgacctaaaagtttcacacaagcctttatgcaaatccttcggcattagtctatcctggccccagcaggatgaccctcacatttaaaaggatcaaaatctcaaacattgtgggaggaaaacgccaggcctgctggggagagggagaaggcaggcctcaggattgtgcggagaaccatgttgccatctgcataacgcccaaacccaatccaagtgccaggaagggaagcact

SEQ ID NO: 695772 - DNA, 212 bp, Homo sapiens
  misc_feature (162)..(162): n is a, c, g, or t
  misc_feature (170)..(170): n is a, c, g, or t
catgtgctgtaggccagcgctttggtgaggccaatggtgggaggatcacgttgagcccaggagtctgagacctggcctaagcaacatagcaatgacccccatctctaccaaaaagaaaaaaaaaattagccaggtgtggtggtgcacaccttgtagtcccangctactcngggaggctcaaagtgatcctccgtacctcagcctccctgagt

SEQ ID NO: 695773 - DNA, 282 bp, Homo sapiens
tgtcacattgcttctcataggactttttgtaccatgtattagtccattctcatgctactataaagaactgccaaagactgggtagtttataaaggaaagagatttaattgactcaaagttttgcagggctagggaggcctcaggaaacttaacaaccatggtggaaggggaagcaaacatgtccttctttacatggcagcaggaaggagaaaaatgagaagtgaacaaagcgggaagccccttataaaacaatcgtgtcttgtaagaaccaattatcatgag

SEQ ID NO: 695774 - DNA, 280 bp, Homo sapiens
gagccggcgtccaaagctggacccgcccgccggggcaccttgctgggactcctggcgcgccttgcacccagccagggccctccctttgccagcctgggctgtgcctggggaaaggggtcggcccctcttagctaggcctgggccggtggagtctgctccctccacaaccctaaactcagaccccacggtccagtggggaacctccctttctctccaagggtgcttgggctccaatcgctgcttgaagagttcaggacacacacacacaccccacgggccc

SEQ ID NO: 695775 - DNA, 582 bp, Homo sapiens
cagtgggatggctataatggatttggtaatgatggagcaattttggaggtggtggaagctacaatgattttgggaatcccaccaatcagtcttcaaattttggacccatgaagggaggaaattttggaggcagaagctttggcccctatggcggtggaggccaattctttgcaaacccccgaaaccaaggtggctatggcggttccaccaccaccagtagctatggcagtggcagaagattttaattaggaaccaaagcttagcaggagaggagagccaaagaagtgccagggaagctccaggttccaccaaatttgtgaactcaccccagcccagtggtggcagggcctagctgctacaaagaagacatgttttagacaaaatctcctggggaaggggcaaaaaacccgaggccggtatttgtgcctaattgtaaacccggttattttagtttctgttctgtggaaagggtaaagcattcccccaaagggttttaatgtagatttttttttttgccccccccgctgttgattgctaaatgtacccgtctgttcgggccgctgaataaatgtctttttttta

SEQ ID NO: 695776 - DNA, 764 bp, Homo sapiens
  misc_feature (764)..(764): n is a, c, g, or t
cctccatatatccattgatcagctcattcaacttcctcaagtctttactgaaacttcacattctcgatgaggcctattcagtatttcaaactgcctcccagctgcagcattccaaaaccccttactcttctgtgtatttttgaaaggatttattgagatataatttacatagtgtagagtgcacacattaatgtctacaagtcagtggcttttagtatatgcacagataagtggagccatcatcacaatgaattttagagcattttcatcacttcaaaaagaaaccccaccttccctagctgttaacctcctatgcacccatcccctactcaatcctaagcaaccacaaatctgttttctgtctctatagattttcctagtctgttttcatctaaatagaatcatacaataggtggccttttctgcctggcttctttcagttggcataatgctatcaaggttcatgtacgtatggtactttatttctttttataactgtataacattcaatttcttggatataacatttgtttatccaataatatttttattgacatttgagttgtgttcagcctttggctattttaaatactgctgctaaaaatacttgtgtacaatttgtgtttgaacacctctttccaataatctgggtgtatacctaggaataaaatttctgggtcatatgacaattctatgtttcatatatttagaagccatcaaattattttccaaggtggcagttctacccatagagtatctaacgn

SEQ ID NO: 695777 - DNA, 159 bp, Homo sapiens
ggagttcaccactgaagtgagctgtgattgtgccactacactccagccagggtgatagaacaagatcctgtctctaaaaaaataaaaaataaaaatacttttattgcaaataatacaattcatcactgaactagattctagtcattgtacataagacaa

SEQ ID NO: 695778 - DNA, 873 bp, Homo sapiens
ctgcgctgcctgaggtgaggatgtgaacctgccctggtcactttagtgtgtcctgggccctggcctgggccatggattcaatgcctgatgccctgctgtccctgctgtcttctgcttcttcccttgctgctgctgctgctgctgctgctgcctggcccctgtgagcttgggccctgagccatgtgccggagctgacgtgagaacgactgggttcgcctgcccagcaaaatgcgaacgggacattgcgtgttaactctgaacgtcactgcagaccactttgcaatgacggctcctgtgattatagccttgcacaatggcagcagtgaccgtgcagcaatctgattttgccaatggtgcatgtcagagacctttgcagacattacacaacctggtacacaaagtgggtcaaggtggtgcatggacatcccctatgagctgtggaactgagacttctgcagaggtggctgacctcaagaacgcagtgtgatgtgctggtggaacgagtatgacggaggtgatcgacgactggtacaggaaccaccagcgagcgacgacctgactgactccctctgcgccaaccacgtgctgaccggaaacgacaccagttggcctggcaccgcagtggtccggcaagaaggcgcgacacagccggcctgcgacgggacgacgtccaagaagaacagcagcacgcgcccacggcagcatgccccaagcagtaccaccagcaattcacagtaacgtgagatggagtcggccctgcaaaggataacaccaaccacctagcgaccgactcacgggaacccagaaacgcaataccctacttccacatccagcacccctgtttaatcctcctatccccacacaggaactacc

SEQ ID NO: 695779 - DNA, 305 bp, Homo sapiens
gccagcctgcctgggttacatgacaggactttgttattaaagaaagtagggcagcatatacagagatctaagttcaacatgaaggacattaaagctcccatttaggcaaatgttctccacacagaatctcctcatgacccccaccttctccactacatatctaagctcagacaaaacaagcctgcagacaggacacaactgtctattcaactgaaaccttgatggacaagcctgactccatcttaaggtgagaagctatctgagtacaaggtcaaattaatgagctggagagatggcgtcgacgc

SEQ ID NO: 695780 - DNA, 348 bp, Homo sapiens
tgtcacgttatagagtaatcacagtgttctttgagcatcaacctacctcccctgtcagctcttcataggtaattttgcacactctggaagcgtcttgacagccatacatctgtctttgtattaaggcatgtcgttcaccagcttttccatttctgcgaagcttgcttccggtacagactgagctaacgctctcatggttatgtattcaagacgatattgtatgcgtttgtcagtactcttagtgtactctatagcgtgaggctgtgtgctcagggttacggatacagtcaaaaagccctagagggacctcagcggagtaagttctagtagttccatatctgtagatgc

SEQ ID NO: 695781 - DNA, 373 bp, Homo sapiens
aattgagggggtgatggaaatgttccatagcttgattgtggttatgtagcaggacatattcgggtagattttattgtatctcaataaaagtttattttaaatatttttaaatggcacataaaagaaaaataaacaaactggtcaataagccaaagttcaaaaacatttagtcacataatagttctactacagggaagaaattctacttacttctcaaaaaaaatcactgtttatgagattttgctttgaatcttctcaatgtgtggaaatacaattactactgcatcagaattactttcatctctgcacaacatggttaaaaactactgacaggcaagaatcatgacagatacccgtttttacccaatgcaag

SEQ ID NO: 695782 - DNA, 1085 bp, Homo sapiens
  misc_feature (133)..(133): n is a, c, g, or t
  misc_feature (433)..(433): n is a, c, g, or t
  misc_feature (661)..(661): n is a, c, g, or t
  misc_feature (709)..(709): n is a, c, g, or t
  misc_feature (720)..(720): n is a, c, g, or t
  misc_feature (723)..(723): n is a, c, g, or t
gcactgtgcgtggcctattcgggtcagtgctacatttctcatgcgcaaacagggcgtagcgccaaccgtggcgattgctcgcaggcgtgccgtttgccatacacattgaaagacgatcaggggcgggtggttncctatgaaaaacatctgctgtcgatgaaagataacgatcagactgccaacctcggcgcgctgattgatgctggtgtacgctccttcaagattgaagggcgttacaaagatatgagctacgtgaagaatatcaccgcccattatcgccagatgcttgatgccattattgaagaacgtggcgatctggcgcgcgcttcatcaggtcgtactgaacatttctttgttccatcgacggaaaagactttccaccgtggtagcacagattatttgtgaatgcccgtaaaggcgatattggcgcgtncgattcgccgaaatttatcggcctgccggtaggcgaagtagtgaaagtggcgaaagatcatctcgatgttgccgttaccgagccactggcaaaatggcgatggcctgaacgtgttgattaaacgtgaagtcgtcggtttccgtgccacatacggtcgagcacaaccggagaaacatcagtaccgcgtctggcccaatggaaatgcccagacagattgggcacaaaatncgtccacatcaaccactaaaccgtaagtcttgatcataactggcagcnaggcactgacnaanaactacacgcgaacgttcgagtgagcggtaacattgaactgggcggctggcaggaacaacggattctgaccattaacagtgcagacggtgtaagaatcacgcatacgctggcaggagcagtcgcaaaagcaaataaggcggaaaaagcaaggaccaacctgcagacggctgggacaacgtgagcaaccgtaaaacgccggagtgaaaaacatcggggacacataaggccaaagctggacagagtgacggaaagcgacgaaacgagaatagacgaacgaacacgagacagcaaggggtaactgcgataacaacgataaacgagaacaaaggaatcaaggaggagcgaacaagaggcacagctt

SEQ ID NO: 695783 - DNA, 1290 bp, Homo sapiens
ctgcactccagacctgtgtggcagagccagaccctgtctcaaaaaaaaaggccttgtggctgggcgaagtgtgctcactcacacctggtaatcccagcgattttggtgaggttagatggtgtggctggatctacgaggtcagtgagatcaagacgcatcctggactaacgatggtgaaaccccgttctctactaaaaatactaatagaaaaaattacgctggatgtgcgtgacacgcacctgtagtcccaactactcagaaggctgaggcaggagaatcacttgaaccctgggaggcggatggttgcagtggatgccaagatcgcgtcattggcactccggcctggctgaccagggagaataaaaaacaaaaaaagccatttaatggggtgtgacagggaccgtggatgtaatgcttcaggggatgccagggtatggtgaagtggtcactaagtgggcacaaatgctgttttttacaaaagaggtcaaattgggctttcgctcatattcctcaggggacaaaatgtgggcgcccttcctgagccataagagtagagaaaagcataccaacgtggggggcatcatccaaccagagataaacacggccattgggcacacgggagaaagccctggtggagcacttggcggaacacggggtagcccaagtgggggctaccgatgcgaccagtgaagtatggcgttttcgcgtgctaaacattcgcgttggaagccatcgttttttcacatcgtagttccccacaggcaaaacacaccttgtggtccgatgaaacatggtggcggttgggttgcccaaaataattcccacatcacattttggcggagaccgcctggatttgtggtaaactgagcccgtttgtcacaaccaaaaggggtaggccacccccgtgtgattataccaacaaaatctaataaggagagacagcggccaccatggtgcctcccaacccgtgataagatggcacacccgtggggccgggcccaaacggacgacaggcgaaatcaccatgacgggcaacgcgatcacaccccacacctgggcacactgggtgcacacacacacgttcgctaaagacacccaccaactatcgggacagtgtggagatcgtcaaatacaccccacatggacggctgcacacgcggcatcttctgaacctgagccgaaacactcgcagatcgaaaatacccatgcaccacgctccaccgcgtgagaccacctaagaaccagacgataccacaaccacgatatttcagtggcaagcatagcagcgat

SEQ ID NO: 695784 - DNA, 674 bp, Homo sapiens
  misc_feature (674)..(674): n is a, c, g, or t
ctcccggctgcctttttcacctctgacagagcccagacaccatgaacgcaagtgaattccgaaggagagggaaggagatggtggattacgtgcgccaactacatggaaggcattgagggacgccatggttcttaccctgcacgtggagcccggtgtacctgcgtgccgctgatccctgccgcttgcccctcaggagccagacacgtttgaggacatcatcaacgacgttgagaagataatctatgcctggggtgacgcactggcaacagcccctacttcttcgcctacttccccactgccagctcgtacccggccatgcttgcggacatgctgtgcggggccattggctgccactcggcttctcctggcgtcgtgccagcccacggcatgcacccgagctggagactgtgatgatggactggctcgggaagatgctgcgaactaccaaaggcattttcgcaatgataacacgctggcagaaggcggcacggcagtgatccacggccaagtgccaggtgaagccaccctggtggccctgactggcccgctcggaccaaagtgatccatcggctgcaggcacgcgtcccagagctcacacaggccgctatcatggagaagctggtggcttactcatccgatcaggcacactcctcagtggcacacagctggctacn

SEQ ID NO: 695785 - DNA, 175 bp, Homo sapiens
tctagaggatcccttgctttggacgcgtgaggtgataattcaagacaagcgcggagagcagtacacagcacgtacgtgtgtcagcgtctcacgtctgcacagactggcttgattgcaggggtacaagttcaggtctcccaacaaaggccctcccaggcccccattcgagaaaaac

SEQ ID NO: 695786 - DNA, 905 bp, Homo sapiens
cctggcgtcgcgtaggagggaggatggagagcggcgacgaagcggcatcgagaggcacctgtgtccacttgcgctccgccacattgcgcgacgccgtacccgccacactgcatctgctgccctgcgatgtgttgagtgtggactgggccctgcccctggtgtgggcgcttcttcactgccctgccatcctgccagtggcccctgatgtggactctgaacgtgtctgtttcggtggcctgctgtctactgtgtgtgagatgtgatgtgttggctggttgcctgactgtggcctcgttgggatactgtgatgtgtgacagaagagaagtgtgtctgatgtggtgaagcctaggacccctatgctgggattcctggtgactagactgacgcaacgaggagtgagccgcctggagctgttgactatcgacactgctatccatatgtgcagccaactgccaaactttcaaagctctgcgtttcaacccctgatgaggagatctcggagacctcagttcctcttgagcaccagtaaattgccgaaaatagtatcatgtagagtggccattacaactatggggccaaagcctatgtcgtgcaaagctgagtatcagacggcaccaatgtgttgccccatggaggagaagctcgatgtcaagtgctccaggtcgatggccgtttgtaaaaacaactttttgccatgaatatgacccgcgccgcaagttccgcctgtttactgagctaactgtcatagtgttacaaagaaccctaagtgctatccattatatggcggcaacacctgtaagtatacacccagttcgaaccacgcgaaagtttaatactggtgaagtgcttctaatacgacgtagggccacccgtggttttaagcgttctgggcgtgctgaccgtt

SEQ ID NO: 695787 - DNA, 393 bp, Homo sapiens
ctcaaacccttgctgtgcttttaaagctcaagacccagttcgaaagatactaccctcttcctgagctcctcatcacgccacagaaagacagatcccgccgggtaaggggacagccagtggcgcgaacctggctgtcctggttcctcgtacagtagccgaggccattctgctgggatccacgggatgcctcagtgaccttcccagattcaggtcacctccacgcatactcccgacaggcctacctcctgggacagctcctcctgtctggagagtcctcttcctggtgctttgggcacggcgctgctttgatggcaggtcttccctggagcctgtgagacctcagtgtggcttcgaaccctctccgtgttcagcttgctgagtggcattggcccg

SEQ ID NO: 695788 - DNA, 458 bp, Homo sapiens
  misc_feature (289)..(289): n is a, c, g, or t
gaagcctccccatcagcaccatgaacccaagtgctgccgtcattttctgcctcatcctgctgggtctgagtgggactcaagggatccctctcgcaaggacggtccgctgcaactgcatccatatcgatgacgggccagtgagaatgagggccatagggaagcttgaaatcatccctgcgagcctatcctgcccacgtgttgagatcattgccacgatgaaaaagaatgatgagcagagatgtctgaatccggaatctaagaccatcaagaatttaatgaaagcgtttancaaaaaaggtctaaaagggctccttaactggagtgaagccacgcacacaccccggtgctgcgatggatggacagcagagagcctctctccatcactcccctttacccagtggatgggctagtcctaattgcccttggtcttctgaaaggttaccagccgtggtcacatc

SEQ ID NO: 695789 - DNA, 318 bp, Homo sapiens
gtcgaccctttgtttcactaccatacatgcaatatgtatgatgttcaggatcccacatacaatgcctgtagtgggctcttaacccatttaccagccaagaatatgctaaagtcacaaatggtaaacatgtatactgtgcgagtgagcagcggctggaaagttggggttgatgcttaatctgtatgttaactttgactggatttagaatataaatccagatggacctatagcaatagccaccccttggaatcattgtttttcttctgactgctttcttgctgctgtgaccaaagaccagacagacaagaagcgtcgacg

SEQ ID NO: 695790 - DNA, 130 bp, Homo sapiens
gtgtgtacggaagtgttaaggaaaggttgggaccaggcattgtggctcacgcctgtaatcccagcactctgagaggctgaggcgggtggatcacttgaggtcaggagttcaacaaatacttactcgtaca

SEQ ID NO: 695791 - DNA, 179 bp, Homo sapiens
gaaggccaacttaaaggatccctctgttagaaaagaattttgccgagcaaacatctcgtccagcagcttgtttgtgcgcgtttcttcgaaattatccaaaaaggtcttgttagagcttgtattgttagcagggcccgtagtagtggaattattcatatttgctcttgaacgttttctag

SEQ ID NO: 695792 - DNA, 282 bp, Homo sapiens
tgacccagtcctctctctgacggggtgtcatttggccttaagcaacaccaagtccactgtggacagatgcagtggctagtggctctccccattaccttctcaagacctcagtgggagcaccagccaatggtaccatcggctgggctgccaggtaccctgggcctggcgctgcagacctgagctggcttggacccatttgaggactgaactaggcagtgcatggctccagtgccctccctctgttccctattttacaccaacccctgttcggttgagcggaga

SEQ ID NO: 695793 - DNA, 578 bp, Homo sapiens
acgcatgcataaagaaatgctaggagccagcctttatacttcgatggacggtgtgtcctggatggtgctccacgtatgaactacaaaaccatttggcttgccagattgaaacaattggcaggaaaggtgtcttcaaagagaattccatatgctccttctggtgaaattccgaagctttagtcttcaagatccagcctaacaagaaacctaaagtgtagagattgccattgtttatttgtgatttattaattattttgggaacttccaggatagcaacagtactctatctgtgcctactaaccagtggttcaacagtgtaaaccaacggtggtatcctatatcagagtctttgaattctttgaaaaacagaaggtcatccacctgttgtgaccccccggccggcaaatgggacaggaggaggacaccctgaaggctacaactgagaagaagacaccgcgctacaccacagctgcaacgccctatacaacaccaagaggctaccaaccaccaccaaataaatgaggaaaaaacggggacacccggaaaaaagcggcctggcaaacacatagagaatacca

SEQ ID NO: 695794 - DNA, 186 bp, Homo sapiens
atgaggtctctcctctttctacatgggccgctcccgagggtcgggtcacaatataccaccacagtggggacaaatcaccttcctattcgggcagggggcaaagcttcagttacaaggaccaccacgatggcgtacccataccgtgcaactagcataagcctctcgatacccagaatatacccatcc

SEQ ID NO: 695795 - DNA, 866 bp, Homo sapiens
agcgggcgcagccaggtctgcgctggcgcggccccggctcccgcccgctcccagccgggccccccagcggtcggcgggacggctcccggctgcatgtctgcccgtccgccccgcgcgggggccgagtcgcgaagcgcgcctgcgacccggcgtccgggcgcgctggagaggacgcgaggagccatgaggcgccagcctgcgaaggtggcggcgctgctgctcgggctgcccttggagtgcacagaagcccaaaaagcatgcgggtattcgacggactctatccaacctattatatatgccgctcatacgaggacctgctgtggctcccaggtgcttgtgttgctgggccctctagcatactgatggctgtggtacttctggttccttctgatgatgggcgtgctttctgctgcggagccggagttcttcatccggagtgcgcatgtaccccccgtcgctgatcgaggaggccagccttcaatgtgtccatacaccatggcagcccccgagatctcgggccaggagccccagcaagccggggccgcccgtattacaccgacccaggaggaccgggatgagccctgtcagggaataccatggcaattggttccaggtcccacccaaatcaccccaggggagtgtggcctgccagcgcctcagcctagtgcaacagcctcggccccgtcgaatcgtgtagtgacgggccagtgactggagtactgcccacgttcgacatggagaagacgttttcacgcgccgtttccccgtgtggctttcaggctcgcgatgaagtgggccttacgggtactggtgctcgtgggtgctaagggaagtacctatgaattactccaaagataccccccgtc

SEQ ID NO: 695796 - DNA, 147 bp, Homo sapiens
cttttaaaatttgaaaaaaactgaattttgaaacagctttggtcccaggggtaaagaatttgggcttttcctgaacctggccccatttggaatcccccaaaaaaaaaggttgataatcctttccggtttttttttttagagaaaaag

SEQ ID NO: 695797 - DNA, 1039 bp, Homo sapiens
cgtaccgcgtgggtcgcccacgcgtcttggttaacatagtaacgaagatacgtatgccctattgagatcgcgagtggcgaatgcaccttggttgctccttgctctttcaaggaagtttctagatcacctgttgaccaaaggtggcagttatttttggtggggacgaggtcttgcgtgcggctcatgagatgatctgctctttgccatgcctagtggagctggatggaagggtttggcagaaagggacacagggggatctgccaaaccaagttggaacgatgagcgtcaggaatggctatgaaggaatgcacagtggtacctccgggaatgcgactagtcaaagtcaccaactggtcaatgcgcgtccatgtcgttggaattaacattactgcggacataacagcttggggtgggaggacggtctaaccccctcactgtgtagagtcctctggtgtgtgttggaccgagcctcgatgtggtgctggactttgatgcatttagtgacgacgtgtgcgtcttggcccatccggtgtttaccagtgatccttagcagatagggagatcattgggccagagcaggaggctagtgtacaagttgatccaggagggaaactattcttccatctggcttcagtaactgtgaatgacttctacaggctgacacgtagcctgaacacaggcctggttccaccctggaatggtagagaatgccttgcgatcgtctgggtcagtcagtacctctgctgtgctgattgaggactggtctctagccttggtctgtcgtcacataagaagcgggtgcatcagcttggtgcctcagagacctccgtgccgcaggggcgggatattgttgaaggcaagtggacgggcgttgacgtacgggcagtaatggtatcagacgggcggtggccccacgagggtcacgacaggggccagggggccagaaaaaggcgcatggaagtctcccggtgggcccaaggcccagggggggcagcgcagcaggcctggagacaggtgcaattgaaccccaaggcggaaa

SEQ ID NO: 695798 - DNA, 84 bp, Homo sapiens
caggaataacaaatgtttattcagaaatggataagtaatacataatcacccttcatctcttaatgccccttctgtcgtcttctc

SEQ ID NO: 695799 - DNA, 143 bp, Homo sapiens
ttccggggtgtagggtggaatttgtactgccacctgatggtattatgataccagttgatataaatcttataaagcttaaacatatgtgtaggtaaggcaacgaatccccagataactctcttgaatttgagaggtatatacca

SEQ ID NO: 695800 - DNA, 104 bp, Homo sapiens
agagggccctgttaggggtcatgggctgggttttactaatatataggcatgtgattggtgggtcataagcttgcgttgattaagtcccagccattgcactccgg

SEQ ID NO: 695801 - DNA, 169 bp, Homo sapiens
tggtcccctccaggataagtgagttggagaggatttaaaaaccaaccctgccaggcatgggggttcatgcctgtaatcccagcacttagggcagcaaaggcaggaggattggttgagctcaggagtttgaggccagccttggcaacatagtgagaccccagtttttcca

SEQ ID NO: 695802 - DNA, 437 bp, Homo sapiens
gactctagtcaggaagaaaagagggcaggaggaagtaacccaatgcctttaaatacaaaacagatgacagacaaaatactcatttatcctataactatggtgggttaggggagccaaaccaagtgtgactgtgagcacgttcactgagaggcatgacaacattatagaagaggtctttccattatgtctggttctcttattttcttaagtcaagccttaactatgaacatactttaagatgatacgggtctgtcaccataaacctgtaaaagggcatcgacagcttttcagataatccaggaatgttgagacatggctaagtttctagctgatacttagtcattccctcttgatattgttgggatgggtagccaaaaggcaggcttgtgggagttaagagccaatgatacctggaaacataggatacagtagggaga

SEQ ID NO: 695803 - DNA, 315 bp, Homo sapiens
ccattcacatgcctagtcatatagtacaccccagtcccatgaccccctaacaggggcccgctcagccctcctaatgacctccggcctagccatgtcatttcgacttccactccgtaccgctctctcatactaggcctactaacccgacacactaaccagtataccaatgatgcgtcgcgatgtaacacgagaaagcgcattccatggcctccacacactcacctgtcccttataggccttcgatacggtataatcctctttattacctctgacgtttgtttcttcgcgcgatctttctgagccttttaccactcc

SEQ ID NO: 695804 - DNA, 531 bp, Homo sapiens
gaaatgatgatatcatgcaacatgcagggaaagtgttatctatacgatactttacactatacatgaagaactatcagataaaagatgagtaaatgattgacgcctattcatagataaactagaaaaggtggctgtgagaggaggagctaaaacactaaaacctgaatctagatctaatgtgcaaagtaaaatcctgggttcatagatcaaaagcacacctgttcgcttctatcatgcattggcatgcacaaaagagattgaagtgttgaataaacacttacttttgactatcaaaaccaatggtctacctggttaatctttctgaaaaagactacattagaaaagaaaaacaaatggttgataaaaattacagagtgggtggacaagtatgacccaggtgctttggtcattccttttaggtggggccttggcactcaagtttgcaagacttgagtgctgaggagagacagaagtatctggaaggaccataacacaagtgctttgccaagatcattaggctggattgcagcc

SEQ ID NO: 695805 - DNA, 759 bp, Homo sapiens
acagaagaaccagagtggggaagcatggttatataaatgtatgcaagagggttttctgtagatgggacggaagcaatggatgcttgtggtccaataaagtgcttgatgtctgaaaggtgtcgattatggtaatatactgagctaagatcctgtttagataccatggttatgtggctggtagcaaggagaactcgctgttattcggtaacatccttggtgagttggcgtaggctagtgtttctacaggaagcataatttgtctctatagagggctattcttatgatcagggttctcaatggagtacaactcttgctttcttagcgcttacttgaatctatgccgtagtaataaaggtgagatgcaacacacattgaagagcttctgtatcaccggtccgtgaaattttcagtctggcaatgtctttgtattaagactgaatcttgttttagagctaacaggagatcataatggttccatgatgagcggtgtaagtcctgcaaggaatgtctatgtgatgaagcaaggtgtgaatctgtatttagtcttcaagacagtggtcagagtgacttaatattgtatcatggcattgatccccttcatcctgaaaatgagttttatggtatgtcattttacttattttattcattagctaacttggtctatgtatattctagattttggctagtgtactcgattataaaggatattcatccatccagggattgattttggattttaatatttcttgtgaagtttca

SEQ ID NO: 695806 - DNA, 405 bp, Homo sapiens
gtctagagcttagtgatgggagatacccgtgggcacatgatacagtagaccattctcctcccttggttctgggaagcctcccaccctgcctactactaggcttaccccttgttgtgctgaagggtcttccacagtggcctccttggggacccagaacccggaggaaggggcatagaggcaggaagtgaggccgatgtctgcaacccagaccacttcgtgtaatgggctcttgaccaaatcccttttttttgcgatgtacccgttcaagcaaaacaacgttttggttaactaaggattgtgctaaagccgataccaggtacttccggtgtttggacaaataacttaatgcatgcggggctgaaaacctacataatgggtagatgggtgcagctgaccaccatggca

SEQ ID NO: 695807 - DNA, 698 bp, Homo sapiens
ggcgggctctccccgcagtggacaagctggacccaacttcagagcgaccagcagagcaagcgcacgcccctgatgcagcgccagaaggctccgtggagatctgccatgtgctgctgcaggtcagcacgggcccggcccatgcctcattcaccaggcccttagggccctcccctgcccatgctccctggtgccagcctcctgcccctcaaggctggagccaacataaatgcagtggacaaacagcagcggacgccactgatggaggccgtggtgaacaaccacctggaggtagcccgttacatggtgcagcgtggtggctgtgtctatagcaaggaggaggacggttccacctggctccagcacgcagccaaaatcgggaacttggagatggtcagcctgctgcctgagcacacggacaggtggacgtcaaacgcccaagggacagtgcggggtggacgcccatcatcttgggcttgcaagcagtcacaagcacatctgacgtgatccgcatgctacttgacacggggcgcctacgtcaccctccactgacaacgcaggagaacatcctgcctgcactgggcctcctttcacgggcagcgtccggccatcggcgacagtccttctgcaatgcgcgctgtgaccctccatgctgtcaactaaccatggggacacccccctgcacatcgcagtcggcgcaa

SEQ ID NO: 695808 - DNA, 1057 bp, Homo sapiens
gctgggtttcatgctgagtgagacccctctggacctacaaaacgtgacaagcgtgtggacgataatggtacgacatgaagctgagccggtacgtaactggtgctgagagtgtttctgagggtgaaggaatagatgctaatgtcaggctccgatagataggtctctggtgatggggtcacagtatcgcatttagaccagaatcctggaaccctactgatattgaaggtaagaagcagctgatgacaggggagttgtctcgctggacttccagttcagtggcctgcactagtagtacgaaacaacgctagagggcctggccctcctgatcgatgggatgtggttgcttgacaatgatcgaagcctagagctccagaattgccgaaatgctgaaacgtctggattcgctctgaatttatgctctcagagggaaccaagagctttaggcaaccagaccattggagctgactctttggagacggcaggaccaccgcgtgggtgggaaagaaggggcgatacccattgtgtgtgaactgatgtgggatacaacggacagacttcttcaaacctggggccaaaagacatgaagaaacccaagggacgaagaatccagtcaacacgagttcacaggctacagaacgaacggaatgtaacaaccgtggacagacaacgtgccaggaagagaaatgccgtggaccaggcccacgaggccaaaaagacggagggacgcagggcaacgcgcccgactgagtgcccccgaaagaacaacagtggtatagtgacacccgcaagggcgaaaggcttttgtcttctacagaaagccaaagtgacgggaagacgggctcaatccgtttcaaggcgttaaaatcttggggtccatcacaaagcagcagcaaattggttcccaacggttccaaccgccttcggactggacaagggcgacatgcatggatccaatggggaacctttctagccttggttacgggaaccacacacatggaatggcggcatcgccgcggccttggcaacacaacagcaagggtttacatggggaccccct

SEQ ID NO: 695809 - DNA, 339 bp, Homo sapiens
gtggttgccagggcctgggacgtgggggaaatagggagatgtttggtgtctgttaggaagaatgaataagctctggagagctaatgtacagcatagtgactatagttaatagaaccgtattatatacttgaaatttgtgaagagagtagatgttaaatgttttcacaacaacaacaacaaagataattgtgaggtggtggatatattaacttgattgtggtactcatttcacagtgtatacatatgtcaaaacatcatgttgcatactgtagatatataccatttttgtcaatcattcctcaataaagcaggaaaaattattgcattttccacatcaaa

SEQ ID NO: 695810 - DNA, 101 bp, Homo sapiens
tgtattgtcggtgctgcctgtattggcgttgctgcccgctgattctgacccaacagtatcaccagctcagagcagtagatccagaagaagtagaatcgcgt

SEQ ID NO: 695811 - DNA, 588 bp, Homo sapiens
  misc_feature (507)..(507): n is a, c, g, or t
tgggagacgggggtctcactcatccatgaggatggtacgggttggcgacgttgggggcctggacggggctgcctcctccgcgggtatgaccaggacgcctacgagggcaaggattacttcgcccgtgaacgaggacctgagctccgggaccgcggcggacaccgcggctcagatcacccagcgcaagtgggaggcggcccggtgtggcggagcagctgagagcctaccgggagggcctgtgcgtggagtcgctccgcagataccgggagaaggggaaggagacgctgcagcgcgcggacccccaaaagacacatgtgacccaccaccccatctctgaccatgaggtcaccctgagggtgcggggcccgtgggcttctaccggggggagatcacatggaccgggaagggggatggcgaggaccaaagtcaggacaccgagctggtggagaccagaccagcaggagatagaaccttccagaagtgggcagctgtggtggtgccttctgnagaagagcagagatacacatgccatgtacagcatgaggggctgccgaagcccctcacctgagatgggagccgtcttcccag

SEQ ID NO: 695812 - DNA, 423 bp, Homo sapiens
ccagaaaaggcctgtctgttcagacttttcttggcccctctgtgtagcattccttcctttagggtatgggggaggactctctgtaatgagtgttttgattcacaatcagattagagtcctgcttgggcaggtaaaggaaggacaggaggtcagagaggtttcctgaggcctaaagtgctccagcattataacaaggactatgaaagttgggagccaggaaatgtggatgaaaaacaatatataattatcgtgataccacatccattgacaatgttttgtctgcatattcctttgacttttgcctgatttgatttgtcaggatagttaaaatgttaggtgagatagtctaatttcttctttttaaaaagattttcaaaatttattttcaagacagcctgggcgacagagcgagactccgtctca

SEQ ID NO: 695813 - DNA, 219 bp, Homo sapiens
ctctacacggatccccggcatgatgcgctttcataataatctatgctatggggatcaggggtgtaggtgtgccttgtgcgctaagacgtgcgctagggcatttttaatcttagagcgaaagcctataatcactgcgcccgctcataaggggacggccagggctattggttgaatgagtaggctgattggtttcgataattactagtatggggataaggg

SEQ ID NO: 695814 - DNA, 276 bp, Homo sapiens
  misc_feature (46)..(46): n is a, c, g, or t
aggatcactggcgtcgttttatatcgttcgtgatgtaggcgtacanacctagcgtgcactcaagcctgggcgacagagcaagaagaaaaaaaaaaaggccaggcacagtggctcaggcgtgtaaccccagcactttgggaggccaaagcaggtggatcacctgaggtcaggagttcgagaccatccaatatggtgaaaccctgtccctactaaaaatataaaagttagccgggcatggtggtacatacctgtaatcccaaacatataactgaactc

SEQ ID NO: 695815 - DNA, 176 bp, Homo sapiens
tccggtcgactgctcgaggttgcgcgatcaccaccgtgcgccgttctcgacgggggctgggtcttcacgtgcttggtgttgaccgcgatgcggcaggggtggtctcgccgcgggtgtcgttgttgatgtccacgtcgaggatgttgttgacctccgtggtgatctgcgtcgttact

SEQ ID NO: 695816 - DNA, 541 bp, Homo sapiens
  misc_feature (541)..(541): n is a, c, g, or t
ggccgggcgcggtggctcacgcctgtaatcccagctctcagggaggctaagaggcgggaggatagcttgagcccaggagttcgagacctgcctgggcaatatagcgagaccccggtctccagaaaaggaaacaaaaaaaaccaaacgccaaaaaaaaaaaaaaaaaaaaaaaaaaaaatttttgtggggccgcgccgggggcccggaaaaaagttttcaacaccacctcgcgtcggggggcggccggcgccgcccatgtgggttacaggtggcacacgtggggcgcaaagaggctgtttgctcaagcggagacaatcccgtggtcatacgacatagggtgcggggggtttcctccccaccaaattagaaagaaagagcgcgcccggggggggcgacacacccgaggggtgttccgtgaaacaaacatccacagagagggagtctcgcggaggcgccacaacagcgggccctacagcagcacggggggtcccaaagcggcgacgccggatatattaaaattgacgccgccgagaggggggan

SEQ ID NO: 695817 - DNA, 224 bp, Homo sapiens
accgtggaccatggagcactcgggggactttttcgatggaacttcggccttcatgctgacacagatgggatacagaaggagcgccggcctgaactgcagcttcctgctcgaaaccaggctttttaacaccagagtgagcatactgatagccggagtcaagaaccgagataagtacctgctgcgcttactgtacctgcaaatcaaggactaactgcagcgtctgc

SEQ ID NO: 695818 - DNA, 382 bp, Homo sapiens
ctgatatgtctgacttgttaaaggtgttggtaatagttaatctcttcagagattgggagggcctggaagaaaaagatctagctatgtaagtagagattcttcacagacgcagattttcccacacaaaggatggctttgcagggccatttcaagatatggcagaaaaacgtgtttaggggtaaaatatttggattttcttccttgtgttgtacgtgtctatgccacagtccgataggcacgctacgtcacgccatatagaattacataaaacccatctgatgagaatgtatagtaggtagggcactactctccagaccccttagacaggaatctgggcaagattaaaaaatagagcttagccctctcctcaacaaggccagac

SEQ ID NO: 695819 - DNA, 1584 bp, Homo sapiens
cgtctttctgttttctccttcatgtttgattcgttcgttggtttctatgttgttgtgcctgcggtcgttcgttgtgttctgtttggtgtttcttctgttgtttttccttcttttttctgtcttctgtttttgagcttttctatttctgttatttgttgttggccttgtagttttccttttgtttggccggttgtttgtgtgttctgttttttgtcgcttctggtggctctcctgctccctgttcttttctgtagctactctctttgtcgtctgttgtttccttgtgccttggtcgttcctctttcttgtgtctagtttgtgtggtgcttctcttgttgtttatcccactcgcgtgtgcgggtggtcttgtgtctgtttttttttctttgcttgctattagtggttcctctcgtttttttatgtttttcgttgtgtcgctgtcttttcttttttgtgcttttttttgtcttccgcttcgtgctcttttttcttttctttctctgttttttggttgttttgatcgtggtttctgttgttttccttgtctctgtgtaggtttgttttttttgtacttggattgcttttttgctttgtcccggctatgtctgcttgctttttgggcgtgtgtattcttcttggcttctgtgtttcttttggttacacatggtgctctgttgttcttctgtgatgctctttgtttgtccctatttgttagttgtgtgttttcggctgcttgctcttgtctatggtcttgctctttgtttgctcggttggcgatggtccccttgttggatcgctggctgttgtgtgcttgtctttttgtgcccttggttccattggaggtgtgggtgctgtggtacttgagattttgtcgcacgttgggttgttttgcgagtggttccatcggggttgtttcgtctaccgctagtatgtgttgggcgggcgcgttctacgcgtgtttatatcgctcgttcctctgtattcccctttgtggtccccttattcgtgcccctttccgcgtcctccatgtcggcatatgttgtttttatcccctatgtatccccgtttggtccgcgctgtctccaaggggttcctctcgtggtgtatctggtctgcttccttgttcccattgatgcttattgttgtaccggcattttgctattggttctcggcgtcggtctaaagagtcacgatgctgtgttccgtgttgatgggtgttcctttcgcgtgttgatgtcttactgtttaacatgaacatcatgttggtgcccaataagttaaccttacctgtcggtttgcgttaggtttctagtcatcaggactatctcactcctctccagctcactgttttgtaaaactcagaattctgttcctaagagcccttcagagcaaagcgtgccgaaggttagttgtcttctgatgtgctggtcctttcttatgtcctcataataagctcagatgatggtatctgtgagtatgtatttgcaaattcaaaatatagttcggtaagtttcttttttcacagttgattctttaaaatagaactgctgtacagagcttgtattacgtccatggttatacgat

SEQ ID NO: 695820 - DNA, 553 bp, Homo sapiens
tcaagggtgtggtcatgtagccatcataacatagggatttggaagattgaggtatgcggaagggccagttccaggaatagagctcatgcttggtccaaggactagggcagggccttcaggagctcgtggctttgaggagggataaaggagaaggattggtagcaaatggcccagagattcttacaaatccaccttcatccataaggaggttggagggtgtatgatgatcctctcttctaaaaggctccctttcaaattacagaaccattgggtaattcttctattacccagggaatcagtgccagctccccaggcactgagtcccaggaggaagacagctcatcttcattcgtgggaacctgtcctatatgtgattgtgcccttgggtaaagtggactttacaagttcgttattgctgttgtttgagcagaggtcatgttttttgtgttactgttgttttttttttttttttttcaaattataaacctcatatatatgttaaagcttaaattcaatctgatgtagagatttaactgtggaagtgaaacctctc

SEQ ID NO: 695821 - DNA, 1175 bp, Homo sapiens
  misc_feature (173)..(173): n is a, c, g, or t
  misc_feature (176)..(176): n is a, c, g, or t
  misc_feature (181)..(181): n is a, c, g, or t
  misc_feature (187)..(188): n is a, c, g, or t
  misc_feature (198)..(198): n is a, c, g, or t
  misc_feature (206)..(206): n is a, c, g, or t
  misc_feature (226)..(226): n is a, c, g, or t
  misc_feature (241)..(241): n is a, c, g, or t
  misc_feature (251)..(251): n is a, c, g, or t
  misc_feature (255)..(255): n is a, c, g, or t
  misc_feature (262)..(262): n is a, c, g, or t
  misc_feature (283)..(283): n is a, c, g, or t
  misc_feature (287)..(287): n is a, c, g, or t
  misc_feature (295)..(297): n is a, c, g, or t
  misc_feature (317)..(317): n is a, c, g, or t
  misc_feature (332)..(332): n is a, c, g, or t
  misc_feature (341)..(341): n is a, c, g, or t
  misc_feature (344)..(344): n is a, c, g, or t
  misc_feature (347)..(347): n is a, c, g, or t
  misc_feature (362)..(362): n is a, c, g, or t
  misc_feature (391)..(391): n is a, c, g, or t
tctctctctctcctctgtagcgctgagcgcgctgatgactatatgaggatgagggagtggttggacaagatgctggatcagagcacggactgttgaagagcggaagctcatccgggtctgcactgtcgtgagctccgacaaaggaagagagaccagcgggacaaggagcgggnacngcggntgcagnnggcacggggncggccagnggaggggcgcggaacacagngactgagaccaccangaggcacagncagngggcagntgatggctctgctgtcagcantgtnaccaagannngagcggctcgtccactccantgatggcacacgganggcccgcancancanagtggagtcgagttncgtgaggcgctcggagaatggcagtggcngcaccatgatgcaaaccaagaccttctcctcttcctcctcatccaagaagatgggcagcatcttcgagcgcgaggaccaggccagcccaggggccggcagtctggcggcgctcgagaaacggcaggccgagaagaagagcagagctgatgagggcgcagagtgtgcccaagatctcagtctcacaggcgcgcaaggccatgactagagaacgctggagaacggagggcgcgggcgagagccctggcggaccccgcgcagccgtgcagagatacaacagatttcggggtccccaacgccaacagtatcaagcagatgctggctggactggtggtcgagccaagactcgcgggtaacgagcacgttgacactccagaaattctactacagactggagtggatgggatgggcatgtgtgccctggtgcacaaattacttcacaggacgcttagactatgggccagttaaggccctaaagaaccgacggcagacacatagagggtggccatactaatcggagggagaacccaatgcggactgggccggacgaccgagaaacaacaagacacatggtgcaggttacaacgaacgtactgagaagagtggttaaacggtaccatgagaagaataaccgcaggacgcacacagagcggggggtaacaacagagttacaaccggtgtggggccaaccattatgatggagcaccacagcgtggcagtagcaatagtgacacaacccacacagtacattagtataagcaaccagcacagaagcgtaggatgaca

SEQ ID NO: 695822 - DNA, 199 bp, Homo sapiens
acgttgcccgctgagatcagatgggtcaccagcagctgtactggacgccacccgcgaaacatcggccaggtttctcgctcttgtcgtgtctgatcacaccggcacggtctgctccggcaatctggcctcaatctgtgccgccagtgtttccgtcagtacgcgaaggatatcggtttcattaagttggtctccctgaact

SEQ ID NO: 695823 - DNA, 283 bp, Homo sapiens
ttagcaatttctccaacttggaatggctgtactttacccaattgtatctaggaagtaactaactcgctatcgattttacaggctcataggcagaagggacttgccttgtctcagatgagacttaggactgtggacttttgagttaatgttgaaatgagttaagactttgggggactgtgggaaggcatgatttttttgaaagtgtgaggacatgagatttgggaggggccaggggctggaatgatctggattggctgtgtccccacacaaattctaccgtggg

SEQ ID NO: 695824 - DNA, 217 bp, Homo sapiens
atgatacgaatcgagccggtacccctcaatttcaggccttttatggtctattcagagatcaacttcttccgggtttagtctggggagggtgtatgtgtcgaggaatttatccatttctttgagattttcttctagggtttttatggttttaggtctaacattaagtctttaatcaatcttgaattaattttggtataaagtctggttagggatgtgt

SEQ ID NO: 695825 - DNA, 246 bp, Homo sapiens
gctagagtctctagcctagggtgttcatgaagtcagactgtcacaccaactgtcgaggaacttctgagtataaagactggcgagaactttatagaactacaatgggatgttgcccaggagggtggattgctattagagaagcaacccacagataccagactgtacttctggtgccattttccccttcttagtccacttgataacttaaccaatcctctgcctttgtaccacttggcccttatcgag

SEQ ID NO: 695826 - DNA, 145 bp, Homo sapiens
cccgtcacgacagatcctgagttagatttattcttagatactttatacattctcaacacagcagcacaatcttgcaacagtggccaacacacacaacatggcaaaccccagttccaggcagtccccctccaactccaggatgctt

SEQ ID NO: 695827 - DNA, 487 bp, Homo sapiens
  misc_feature (14)..(14): n is a, c, g, or t
  misc_feature (129)..(129): n is a, c, g, or t
  misc_feature (174)..(174): n is a, c, g, or t
  misc_feature (237)..(237): n is a, c, g, or t
  misc_feature (263)..(263): n is a, c, g, or t
  misc_feature (290)..(290): n is a, c, g, or t
  misc_feature (314)..(314): n is a, c, g, or t
  misc_feature (340)..(340): n is a, c, g, or t
  misc_feature (353)..(353): n is a, c, g, or t
  misc_feature (369)..(369): n is a, c, g, or t
  misc_feature (401)..(401): n is a, c, g, or t
  misc_feature (403)..(403): n is a, c, g, or t
  misc_feature (408)..(408): n is a, c, g, or t
  misc_feature (462)..(462): n is a, c, g, or t
ccttatccttaccnttaaccggggatgtctgttagaacaaaactgtataccttggtctaacttcagcgctttttttaaaaaagcaacaacactctagaacactttttcttttgctttgagatatttganatttacacatttgttcaagtacacagattctggattcaataggcnggatctacaggatcttggttatctcttaatatcttgagctaggcatggtacttctggagcgcnaggtactatctgggcattctaaaacngcctggattcttgtaaataaaattgtncttcagttgtggtgtggtttttgnataacttgggcggggcggtgccaagntgccccccctggnccccctcccccagggnacaaaggaggctcttcttaaaaggtatggggncncgggnctatctttctactctaggggccatttcctactagcatttcgggtagggccatgngggctccgggatagtcttcaatata

SEQ ID NO: 695828 - DNA, 571 bp, Homo sapiens
  misc_feature (45)..(45): n is a, c, g, or t
  misc_feature (138)..(138): n is a, c, g, or t
  misc_feature (201)..(201): n is a, c, g, or t
  misc_feature (222)..(222): n is a, c, g, or t
  misc_feature (225)..(225): n is a, c, g, or t
  misc_feature (305)..(306): n is a, c, g, or t
  misc_feature (316)..(316): n is a, c, g, or t
  misc_feature (324)..(324): n is a, c, g, or t
  misc_feature (340)..(340): n is a, c, g, or t
  misc_feature (346)..(346): n is a, c, g, or t
  misc_feature (363)..(363): n is a, c, g, or t
  misc_feature (376)..(376): n is a, c, g, or t
  misc_feature (404)..(405): n is a, c, g, or t
  misc_feature (423)..(424): n is a, c, g, or t
  misc_feature (429)..(429): n is a, c, g, or t
  misc_feature (465)..(465): n is a, c, g, or t
  misc_feature (560)..(560): n is a, c, g, or t
gcctggggtcatcctggacaaccgtgctctgggcaaagctaaggnaggcggcacagaagttcatgcacacagagggattccagccgtcacggtcattcctgacatattcaaacatcttcatggtagggaaggtcttgngggaagagacaaaaccgtctgggttacgggagccagccacaacattcggggcccctggggggnatgactgagcccaccatttcnggngcttgtgtctgtagaaactcctccattggccagggctgtgcatctccttgggggtcttgggctccacatagcaggtcggnngctgtgtggntggggctngggggtctgtgcagtntaactnccctgagaagagacganggtggcttcccangcggctgcgtagacagagcagagggggnngttggtgttaactccccnnagggntctggggaacttccaggtttgtctgcacacatgtantgctcaaatttgtatcccatgtacataagctcccggaggagcggtggccgagcaagcctctgggcccgagcgttcggtgtctccacttcactcangtatagtgttc

SEQ ID NO: 695829 - DNA, 776 bp, Homo sapiens
agttataaaacaccaagcagatgtaactcaaagaagactacctcaaggcatttaataatcacagtcccaaagatcaaggataaaaaaaggatcttaaaagcagcaagagaaaagaaaccaataatatacgatggcgctacaatatatctggcagcagactctttagtagaaacgtttcaggccaggagagagtggcatgacatattgaaagtgctgaaggaaaaaaacatttaccctagaacagtgtatccagtgaaagtatccttcaaagtgaaggggaaataaagacttttccacacaaaagctgagggattttgtcaacaccagacctgtcctagaagaaatgctaaagggagtatttcaatcagaaagataaggacattaatgagcaataagtaacaacctgaaggtataaaactcactggtaatagtaggtatacagaaaaatgcagaatgtcataacactgtaactatgatgtataaactactcttactctaagtagagagactaaactatgagccaatcaaaaatattaactacaacttttcaagacatagatggtataataagatataaatagaaataacaaaaagttacaaaatagggagactaagttgtagagttttattagtgttctttttacttgtttatgaaaacttattataagattacaatactggattataagatagtatttacaagcctcatggtaacctcaaaacaaaaatataacatggataccgaaaataaaaaacagaaactaaatcatatcacc

SEQ ID NO: 695830 - DNA, 253 bp, Homo sapiens
caaaaaaatttttttgtttccccgggggtggggaaaatttgggggggaccacccggggggtttccccccggggggccccccccccttttccccgggggggggtttcttcccccccccggggggggccccccctttttggggttttttccccggggggtttttccccccccccgggggggggggggggcccctttttttcccttttggccccggggggggtttttttttttttttcccccccccggtcctttta

SEQ ID NO: 695831 - DNA, 109 bp, Homo sapiens
gaacgggtatgcggttgcaggatgcggttggaagtgctggagcaggaagaagctgaggcgcgtgagaaggtaacccatacgcataaggtggtgcgtgcagccaggagcc

SEQ ID NO: 695832 - DNA, 118 bp, Homo sapiens
tccccttccccacagtgagaggggagggctctgggccagagaagttccttagttttctttggaatgaaatccctccttccccccatctctgagtggaggtaagcccaccaatctgccc

SEQ ID NO: 695833 - DNA, 165 bp, Homo sapiens
acgatgtcacgtagaggatcccgcacgagcatcatacatgtctctgcctaatctgcccttaggagtcaggctgcacccgtggagatcccaaacctagccccctagtgagacaaggacctgaccctcctgcccgcatacacaacccacaagccacggtcaacccac

SEQ ID NO: 695834 - DNA, 297 bp, Homo sapiens
  misc_feature (209)..(209): n is a, c, g, or t
gcaacacagggtgaccccatctcttaaaaaaaaaattagctgggtgaagtggcacacacctgtggtcccagctactcaggaggctgaggcaggaggattgcttgagcctggggaggtcgaggctacaatagccatgattgtgccactgcacttacagcctggggtgacagaacaagaccctgtttttaaataaataaactaaatcaatncaatccatcaatcagtcgacctatgttaacttaactttacttgtagggtaatttatccgatagccagctattaattagggacttcttg

SEQ ID NO: 695835 - DNA, 383 bp, Homo sapiens
gtcgaccggctgagcagtcacgccaaccacccttcccgctgggctggtccttgggatttctgtccctctttctttgcatcctgcctcttccttccttatagttaatcgtcgctttccttttcttccttttatgaaccttccgctcaatggtttgttccttcctaaggatgtccccaagtcaaaataagccaggggaccaagaaggttttccttgtgtagaagcccccaggtccctgcatgtgggggcttatggagagacttcctacactgagatcttgcccggtgtgaaaatctgactgctggtgtgcggtgtagacagcacttggctattaggagacgctctcgcacgatgcatgtctgccagctgctgcctggcgtcgacg

SEQ ID NO: 695836 - DNA, 244 bp, Homo sapiens
  misc_feature (8)..(8): n is a, c, g, or t
gacccaantggtctttatgatgcaacaccccacttaaccatatgagagccattcagtgctgctcgcagtgccttctgattacagacacactcatgcttcacgtctgatcaggaccttccccatggagcccatgtggcccctcacttggttggggtccacttatgagtacaaaggggcatcactaaaatctcagctggctggtgggaaagtacttgtctgtctgtccaactacgtgctagtgcta

SEQ ID NO: 695837 - DNA, 558 bp, Homo sapiens
tggttttggaaggggtatgtggatcttcatctttaataaatattaccaacttgtgaaaagcccgacaatgtcaaggactggcaagagtgccccatgtgatggggttgggaatgggcagctcactggtagcaggtgctgggggactcagtgggggtctgggagaagcacttatgtttatagcaaagaatggtctcataaatgggtatctggatagagacaagatgtagtgggggaataaaaactagttggcttagaaataattatagactctaaagctcaacaaaaacacctttctctagtgtgtaaaaattacatacttttttctcagaggggagggggcaacacctttaaacttagaaaacacctttcatatttaactcagttcttcctcatattactctcaaatttgtgtcacttaagtggcctttcctccctcgcgtggacattcgagagagaaaccaccgtgggttatttcggtggcagaaagttttaatattttcctcacaaattcaatttctcgtggggaaaaaagcggtgttacacttttcaagagctctg

SEQ ID NO: 695838 - DNA, 117 bp, Homo sapiens
  misc_feature (9)..(9): n is a, c, g, or t
tcgttagtnagtagtaagaagtagtatctatctttaagattcctgcatcataatgggattcctgtgataaataatgtgcaggaaacaggatgcagagaagtccaagtggaagaaggt

SEQ ID NO: 695839 - DNA, 118 bp, Homo sapiens
cgtcctccaagtccgcggttcctttggctcgcgccggttgctttgcacgaggccgcatatcctgtgcatattgggccagaccttacgctaatggatgaagaggccggcaatgtcaata

SEQ ID NO: 695840 - DNA, 318 bp, Homo sapiens
gagattgacaatatcaagaaccacgcgtgcaagttggaggccgccattgccgaggcttgaggagcgtgtggagctggcggctcaaggatgcgcgtgccaagcaggaggagctggaaaccgccctgcagcggggcatgcaggatattgcacggtcacctgcgtgagtaccaggaaatcatgatcgtgatgctgaccctttacctcgagatcgccacctaacgcaagctgctggagggcgaggagagccggttggctggagatggagtgggagccgtgaatatctctgtgatgaattccactggtgggtcagaacataag

SEQ ID NO: 695841 - DNA, 295 bp, Homo sapiens
  misc_feature (90)..(90): n is a, c, g, or t
tgcggacccttagacagcggacccccccaatagtgccttcatctgacagatacttccactcagccagtgcacagcaatatccagcaggtnacagggcttattctctggcagataaagaagctccaatgctcgccagccatcctggtctggatatcaatcatccgtgagttgcgaacgtatttccgggcttctgtctcgtcataaaacagctctgggggtccgccatgctccggacgccggccggcggacgccatttctcacgcctcagaagcacacctgccctgggtggtatcag

SEQ ID NO: 695842 - DNA, 316 bp, Homo sapiens
gggtagaacaactagggtcagttttgcaggtggtaagccatttaccaagatagttgtaggtaaagaagggcagatttattagagaaattgtgaaaatatgttgcagtgggcagctcagcagagaaggggctacctgcaaagaggcaagggctggaggaaagttttatagggtcctgctgaagggtgctacgtgtggaatgaggtcattgtgcccgcaggttgtttgtgattagctgtctctaacaactgttcatacaataattgttcattattgttctcaacttggggctctccccaacctggggacccttcctta

SEQ ID NO: 695843 - DNA, 372 bp, Homo sapiens
aggattcggcacaaggggcttcccaagttccagccgcaagtccaacttaaccaactttccttcaaagtcaggaaccgccaattttcggaaaaaagcatgttccaaaaacaaaggctcttttcccccgggaggaaaaaaaccagccaagaaaggcagcacccttcccaaggaggtagaaaattctgcgaaagcccagaaaaatccggcccgcttttttccaggcatcgggggcaaaaaaaactgattttctaaaattattggatttggaattgggaaaaaagggggaaaatgtgaatggggccggatctttcacctgggattctaaaaaaagctttgtcttcagaaaaactaaaaataaaaggcccgccccta

SEQ ID NO: 695844 - DNA, 122 bp, Homo sapiens
gctaagatggacagcgggactggagctaggaactaggcgagggaagacaaagaaaagccagccattgccattcactgagaatcactgtcgctttctaaagtgacccacgttgatgctggcag

SEQ ID NO: 695845 - DNA, 742 bp, Homo sapiens
cggacgcgtgggtcgcccagcagtcggtggtgaaccttgcccttgagtacagttcaagtgaatctggataatagttcatcttgctttagcttagataccagtgtatgtggtctgtggctacaggacagctggttctagtctgcttccacagtctgcttaaaaaactgtctgacttcgtgaatatatagaccatgtttaccgattctgatgaagagaccaattaagattcattcctcattctgttgctttccagtgggaggaagagtccccatgaaataagatgaaactgattccatgcactagtacatgtaggcttctcccttgtgcaaagcttagcaattgtacggaaactttgatcttttgtccaagaaaaggaatgtctgacaggcttaagctttcggtccccttgcacttagactcgaagttagtaagagtccttaaaggccttgttaagtagcagacttccaaagagattgccatttaaggatttcgtagcatgcttaaaagtctccagattttcatgctgacattagactatagtatacagtgaggttaagaatcatgtctatgactttcactctaagactggcaaaaggacaggagtctgctatgtatagtcaagcattcattccagtagaagcataatctcatctacattcctgagaccagcaataagccttccaggtaaacctccaaataatcattgatgggtaatacggacaatctagcccctaggtgaagg

SEQ ID NO: 695846 - DNA, 133 bp, Homo sapiens
ggtacccattgaatcgactcgggtactggaggatctctaacagaccaggctccagcttaacgatatttggaggtcagcacgtgctgctcacgtgtctgacgtgaacttgtacaggtaggcatgcaccgcagat

SEQ ID NO: 695847 - DNA, 254 bp, Homo sapiens
taaccgggatcgacagtgccgccggggaactcccacagtcccgccatcgacatgccggcgggccgttgggcgatcagcacgcgaccgtcgacgtcgaccagggccaccgcggcgaccaggaccagcggccggtcgccgagcggcggcgggccgcccgggcactcctcgtcgaatgatgaactcaagaacgatagctgccgttgatgtcgatgtagccgtgcgtcagatcgcaggtccagaccgtggcgcggccg

SEQ ID NO: 695848 - DNA, 367 bp, Homo sapiens
ccaccgcacctggcaaaatgctgtctttaagtcagcgaactgaaaaagtaaaagactgctggttgtggtggctcacacctgtgatcccaacactttgagaggctgagggggaaggatcacccgaggtcaggagtttgagaccagcctggtcggcatgcgaagccctgtctctactaaaaatacaataattagctgggcgtggtggtgggcgcctgtggtctcagctgcttgggaggctgaggcaggagaatcacttgtacgcaggaggcggaggttgcagtgagccgagatcacaccactgcactccagcctgggcaacagagcgagactccatctcaataaataaataaataaataaatatttttt

SEQ ID NO: 695849 - DNA, 330 bp, Homo sapiens
  misc_feature (181)..(181): n is a, c, g, or t
ttgtccacagataatgttgggtgtaggtatgtatagtaaacttcatcattcacgtgcagttctcgttgagcgaagggtcacttcacggcattcagtatctgattgagcagtgcttctcatcagaatctgtttccatggatacaaacccctcttcggacagaagcttctgcatccctgcaanagcatgttgtgccagcttcacattcttggattccaaagccaactggagaggcagcaggcatttctccctcagtacatgtggagggatcttggcaatggtatccagaccacctagagtttccagggcccaggtgcagctctctcttgttg

SEQ ID NO: 695850 - DNA, 235 bp, Homo sapiens
tgctccactggttgccaggctagagtgactggtgtgatcccggctcacacaaactttcaagccatttcccaggttcaagccattctcccgccccagcctcatgagcaggtgggactacaggcatgcaccacaatacctgatttttctttttcttttttttttctgtagtagagatggggtttcaccagtgtgggctaggctggtctcgaactccggacctcaagtgatctgcctg

SEQ ID NO: 695851 - DNA, 81 bp, Homo sapiens
  misc_feature (44)..(44): n is a, c, g, or t
gagcaaggggcttacgcagaaggacctggccacgaaaatcaatnagaagccacaggtgatcggcggactatgagagcggat

SEQ ID NO: 695852 - DNA, 223 bp, Homo sapiens
  misc_feature (65)..(65): n is a, c, g, or t
ccgatcgctttggcttctggagccagagcctttgccgttgtgggggacagggagctgcacccaantgtcatgaaatgcagggacatggccatgcccatcctctggagccagcacagccgggcggttgatcccagaacttgtttctcctgtccacactttgtttgagcacaatggagcacgcgtagaaacggaatgaggcatggcaaatgactggccagtgccc

SEQ ID NO: 695853 - DNA, 317 bp, Homo sapiens
cgggcgcccagactctgagagagagcgacggccatcatagaacagcgaaggcagtcgatcggcctgcggtccgcttcggcattcgcaggccgcaggcgggaggctagagcccccaggcgcacctcgccccaaccgcccgcggctcgggcagctctgcagagacgtcgtggcggcagggccagcacccattggtccgccacagccctccgccctccccctcgccacgcttattggccggagcggcggcgctcgccgggtaggcggtggcggcgtccctcccttgcgccggccctcaagaggcgacgaggaagcggccg

SEQ ID NO: 695854 - DNA, 329 bp, Homo sapiens
gctcgacagagattagaacataagaacaattagggtgggcaggtaggtggctcatgcctgtaatcccagcacgttgggaggccgaggcaggcggattacttgaggtcaagagttcagagccagcatggcaacatggtgagaccccatctctactaaaaatacaaaaaatgggccaggcatggtggcatacacctgtaatcccagctactcaggaggctgaggcaggagaatcggttgagcttgggaggtagaggttgcagtgagccaagattgcaccactgtactctagcctgggtgacagagtgagactctgtctctgtctctctctc

SEQ ID NO: 695855 - DNA, 193 bp, Homo sapiens
aggagcatcagcgggggtaatggagacatgccaaagttatattctgtaagttttcgtggggtgaggggagcattacatcattatataatgggtacttcctcaagtcgcgggtcatcagtgtctggtgtcagttgctgcacaaatatctaaaggatatggattgctgtctccacgcgagctggaggccagtcaa

SEQ ID NO: 695856 - DNA, 962 bp, Homo sapiens
  misc_feature (206)..(206): n is a, c, g, or t
aattaagagatccaggaccatatttgataagagttcctaaaaataatgtaattattaatgctaaagactgctcatgtatcttgatctaattactaaataattacatatttatttacctgataaatatgtatctagttctacaaggtcacatttatgtggaagtccaaagtcaagtccttaggggataattttgttttggctcagtnggttccctggcttcccttttttttttttttttttggaaaagtggagtctcgctcgtgtgtgcccaggcgtggaggtgcagggggtgcgactcctcagacctcacgttgctcttcctcgggccctcccgggtttcaagcaatttcttcgtgcctcagccctcccaagtagtgtgggattacaggcaccgtgccaccattgccgtggctaatttttggtattttatagtagagacgggggttccactatgtgggctaggcgggtctgtgaactccttgacctcgtgatccacccgcctgggcctcccaaagtgcggggcattaacgggcttgagccaccgcaccgggcctctccctcgttcctctctagaatccaattagggatgttgggtactactcatatggttaaacccgttcaccaacacttttttcttttcacaaggtgagatcagcgaaactctggtttaaagataatctgaacaggccctgggaggtaatcacattgcgccctttcgtggaaaggccattcgtggttagaaatcaccttatctcaaatttgactcgggggactactatataaagtagcgtgaacatccccatctgctggttccctagggatgcccaaatttgcttatgtttttacggcttaaaccgggaacctgtactattggagcggacctcgcatcaaaaattttgaaaaacaaaaacaaaacaaaggggggttactcgcggacagacctttatgaaaagaaaagggca

SEQ ID NO: 695857 - DNA, 212 bp, Homo sapiens
tcatcgagctcggtaccgctcaccgacgggtggggttgttgctttgagaggaagtacgcttatttttttttttggtctttggtttttttttttccctttttcctgggaaaaggggttctcgcttattttggcccaggcggttctcgaaactctggggctcaagctatcctcccgctttttagcctccctaaaagcgggatttacaggcttga

SEQ ID NO: 695858 - DNA, 220 bp, Homo sapiens
  misc_feature (71)..(71): n is a, c, g, or t
ttttgatgaagtccaatttattttttctttttgtagtttatgcttttggtgtcatcaaagaaatcattgcncaatccaagatcataaagatttacatctgtattttcttataagaattttatagttttagtttttatttaagtctttatccattttgagttaatttttgcaattaactcaataattgcatccattctttcccacttcaattaatttttca

SEQ ID NO: 695859 - DNA, 247 bp, Homo sapiens
aagagtccatctcactagaataggatattatgcatagtgagctgggccagaagagtatggaacaaattagactcagcctttctaatcaacttgaatactaatcttagttgagaactctttaagtccttttaaaaactatgtttctgatggttcaagattaagaagcatactgacagcaaaaaacgcagccagattttatgaataagtgttgtatactcttaaaacaataatttgttatgttcgtgta

SEQ ID NO: 695860 - DNA, 517 bp, Homo sapiens
  misc_feature (27)..(27): n is a, c, g, or t
catttagggaaagctgagataaagcanctagaatctcaaaaggatcgagccaactcggtgaataagtataaagcataactatcacatatgtaaacgcgagtaaccctctccaatataggggaggcatataggaaacaggggaaagtagcagtatgaacaagagtaaaccgggtagtagaaaacaacagcatagggatgaaaacctggcaaacaaagaattactattttaaggggtacaattttggcaaggggaagataactcaattcctacatttccggctcttggtatgaaacatttttccttcggtaactagatatgggttttcctcctccatagtaggatcaccggatattggataattaatggcttaataactactggtttaatgataccaccatttatgtccacattcctcaagggcttaatttccaagaaaaaataaggtcgtagtagcacagggtgataagctccatcttccaaccaattttaaatggtctcatgggtatgtatatcagg

SEQ ID NO: 695861 - DNA, 116 bp, Homo sapiens
gggttgtgtataccgaaggaggtgccagcagtgtgggctcccatctgtcctcccacccccatccagcccacattggatttctcagctgagcagcaaggcttagaatgaatagccct

SEQ ID NO: 695862 - DNA, 1355 bp, Homo sapiens
gcgctctcggcttctgctccggggcttcttccctgcccgacccggtggccctgaccgtggcattcttcccctggacctgatctgcgcagccctggctggtgctgcccagaaggagcaggcaggcgcggtggtgcgcgctgtgtgcgtggggaggccgtggccaggagctgcggctggcaagctgggctgggactgctcggccgcctcctgcccggcgagcagctcagaccatgctcgcctgaagaactggacgtatctagtggctatcttcttatctccatccccatcggcctcctctcttcagaacagcccggcccctgggctcgcaagcagatcggcggcagccacgccagctcgcaggcgccctcgcgggctccatccctcctcccacgctagctgcgccccccaccaccctcccgcatccctcctgcgtccacccaccactccgcggcacctgcggcccctccactcccacggccccacgccctgcctccctgcccaccgccccctgcgcctcctggcccctgccacctctcctcactccactcctccctgctcccaacccgcagcccctccagccctcccccgcggctctgccccaccacccccctgccccacccacaccaacgccccgctcccaccacagcctggctgccaccctcgccacacgccgcgctgcccccctgcgcccagccggcccgctcccacggccaccctccccctcctgcccccccccacgccacgcaaacccgcgggcccaccacggcccaaccgagccccacggcggcccacacaccctgggcgagctacgctcggccacgccacgtccgacatgccacccagcacacggcaccaccacccaaccccaccagcaccacacgcaacaccctcgcaccccatacctacccacaaggccccggcaaacccacacgaccaccgacaaacacgcggcgaccagcaccaacgacgccacgactaaccacaggagagcaaggcgccacgaccaaccgccggacccactggccccgccccccgaccctcggccggccccgcgcaacgacggccagcgaacgacgagcaagaacacagtcactaccgccgctaccccagatgggcgcgccgcgacacaacaagccgaaccaacccaagcccacacgcgctccaaccccagcgcacgactgcgagagacccgagccacgcactaccaccgcgccaacacacggacagcagcaccaacccccaccgctacacccacacccgaagtagcgcctccacctggcacacatacggcatcggatccgcacagacagcaacgcgagaaccgctcgaagcctgacaacagctcacgctgcgag

SEQ ID NO: 695863 - DNA, 220 bp, Homo sapiens
  misc_feature (8)..(8): n is a, c, g, or t
  misc_feature (50)..(50): n is a, c, g, or t
  misc_feature (63)..(63): n is a, c, g, or t
  misc_feature (136)..(136): n is a, c, g, or t
  misc_feature (187)..(188): n is a, c, g, or t
ggaagatntgcaaaggttatatgcaaatactgtaatattttatataaatnacttgagcacctncagattttggtatccctgagagttcctggaaccaatccccttcagataccaaggaatgactgtacatgtttgngtagaaaactagttgtctctacctagtctccattctggtcacttctttagnntcctaatttcagagtaaggccagtctccttct

SEQ ID NO: 695864 - DNA, 1173 bp, Homo sapiens
  misc_feature (937)..(937): n is a, c, g, or t
cggcggtgtgccctcgataggtatgtctcctggtacaatgggtggttgactgattcaattcctctcctataattccttctaccgcgttgggtgcgcttcaccatgtgcctttttccggccgcagtagaggtttgtcctctgtgccggaggtcaaaaaatttgagagtacaccctcacactccataattcccttgaaggcctatcggttcaaaacaggcggttataagtgtttcttctccttaggttgaggtggcgcccttgtacattgtacctttagcgctaccgggtactaataatcgtgttcccgctttgtggagaaacaacaattgttgtgtgacttgtttattgggggcgtttgccaaaaaattttgggtagggtgtagacacctcattgggcgaacttgagcattaaatttaaaattattgtatgtggtaagatttcatcccaacggcataatcggtggtcacccccgtttggcttcccttaatttgtccctcgggggacgcccatcttcaaaaaggtaaccccatggtccctctgttgttgccccatctaacgccactggttaccctacgttatatatgacggtttcgtagacaaaatgtggacatacaatgacccattgtgattgtcgcatacccttcgaggcccttgagagtttaagtctcacaacagagttactggtccacttgcctcggcggcttgaaggctttcgatgctttcgggcattaaggacaattgggtctacaagacttttagagccctacaaggcatcgtgcctctttccctcttcctgtccttgcacatctacacacgtttcatccccttctgcatagccaagcaaatgagttttcatctgatatcgtgtccagactagctctacgatttgtcatgaactagattacgccatctgtccgcacgctaccatagccaaangactaagcttccatggcacatccatttggcacctatgaggcaacggtctagctataaccgttctggctttgcacaatatgtacccaggtcaaaaggggactttgtgtttttcttagcaatgatatcactgtctgggtcactttcttaagcttgtaaccgcccccccagacttataatcttaaatggtattttcctttgtttaagctgctgttactccgttggattggattgtgcca

SEQ ID NO: 695865 - DNA, 233 bp, Homo sapiens
gttgatggaggtctgagtctagcagcctccccgattgactgcgcctgccggccgtaggggttacggcacacgctgagtccagttctggtgtatccgcgcgtggcggccgcgggcccggcattgacagattgattgctctttctcgatcccgtgggtggtggtgcctggccgtgcttatttcgtgaagcgatttgtctggttaattcggtaccgagcgtcgaatttctgtaatc

SEQ ID NO: 695866 - DNA, 791 bp, Homo sapiens
  misc_feature (1)..(1): n is a, c, g, or t
nagtatatgcaccaccgggtacgcgtggttaccacactctagacgggggtaagattaatatgtgtccccgtttatagaggggggcacaatagtttcggtgggacacgggggcccgcgggttttttgtgtagtcccccatgtttgtggcgccgccacatgttggcctggaatataatgtgttcttcgagcgcgttccccaaaagggtcttatctgggataattgttgaagagaaaaagagatggtcttagctcccccggagttgtttataggcaaactgttggtgtacccaataaatgactcggtattgttccccccccgcgatgtgtgttacgctcgtatgttgtcggccatagagccccttctgatagataatatgtgggggggagacctacaatcgccatgcaaagattgggccagtgttgtctgggagcacccgatgtgggctcccacgtgcgattcttctgttagtgagcctgcacggagattttctcaaaggagtataaacttttagcagatctaaccagatttcacgccggggaccctgtggccccagagagatgctgagcaagcagggcgagcttttacccccaagctccgcatggagtggtcgaagactaataatgctttctcgcgaagctatctgtttctggaagcttctcacgccaacatgttcggcgggagatgctgcgcaatcgcattgaatagcgccccgggcgtcaagggcacctctcattattcttgtgttgccgccacgccgccccccagaaaaaaactggcggcccacaaaaca

SEQ ID NO: 695867 - DNA, 263 bp, Homo sapiens
caggttgtgggtagggtaatttttatgaggtttacttagatggctgtcggtgtgccagacctcctgacactccaagtcacacaccctgtgaagtcccgcacaggacccacacctcattgtaccagtgggttaggctcgtggaacaagcagagacatgagaggagagtgttggctatgtcacgtcccaaggattggattatacggagccgattgcaacgttcgtatattgagttcgtaaaagagaggcccacatgtgtgttgcg

SEQ ID NO: 695868 - DNA, 868 bp, Homo sapiens
aactgctcctgttgcaggattgcgtcccccacccccctggtggcgcgtttctccacgccgcccccttgtcttgtggccccacccttggctcctcctgggagttcacccacccccccgaggtattccccgcgcgcgtatttcatgtatgtacaccaaggggaggcggctgtcacccacacagggggtttaagtggcgaccaacccggtgcgcacgaagtccctctatttctggcgtccacacatatcattattagctccccctctccgccccgcatttgtccctccaccgatattctctcctttatatggatcaggtgggggatcctattctgattcctgcccctcaacatggtgttccctccggggggtgtttcttaggtccttcttttaatttcccctctgtcaccgcctcgtcgcccggggtttctgttcttcactcggggatataattcagacctcagtttcttcttttgtctggggtacctcaccgccgccgccctggtcatttgtcggggagtagcttccgcacgaacgccccacgcacgaataatgctgcgtggtgaagtgtggtggcgctcgcagttgggactcacatacagatcaccgttgcccgcactattgactcctgcccacgctcccctaaccagacaattaggagagctctccgttgtcctcttcgtattctcccaggcgtaatcacctggttggatgtacccaccgacccttttgccccccccacacccaggggccccatcggggtccctgcgtcttttctgtccacccggatactcgccatatcatgaggacccccaagataggagggcatgacaaaaaatggtatgctccaaaatacaaaataaacgcagaa

SEQ ID NO: 695869 - DNA, 273 bp, Homo sapiens
gtgcatggtcctcgctgttggtgtaagaacgatggccaagttgcatgctccttgctgttcgtgcacaaggagtggccagtgcatcgagccttggtgttcgagtcaaaggaaggagtatgtgcatgtcccccatcatactttgagactactgactggtgggtagactatagtattgcagcaaatcctgtatgagagagagatgttggcttcctttttgagtcttgtgtcaggtgctgagaccttttacatgggctaatacagggagagagtctt

SEQ ID NO: 695870 - DNA, 993 bp, Homo sapiens
  misc_feature (178)..(178): n is a, c, g, or t
  misc_feature (189)..(189): n is a, c, g, or t
  misc_feature (191)..(191): n is a, c, g, or t
  misc_feature (357)..(357): n is a, c, g, or t
  misc_feature (361)..(361): n is a, c, g, or t
  misc_feature (652)..(652): n is a, c, g, or t
tggtggtgcgtctgggggggcttcctccccccccgcgcgcacccccctctcttatgaggggaggagagaccgcggggggccgtcttaatatcctctctcatcccccctctccgcctgctcttgagtagaagagagtagagagccctccttctcggggggagagccgcgcccacagcgncgagtatttgngncgcagagctctgctcttcttctctctccgcgacgaggagaggagttgacgtaccacttctcgtagcactcctcctccatcatctgcgaatgagtattgcgtgaggagagctcttctgactgatagagatctcctcatagggggaggaaaaagagatggagaggatntagnttgagagagagacggcacacaacacaacacagcagaggggcgtgttttcacagcagacccacatctagtgctgttttctgtttgtctactcgcgtgaagagaccaacacatcgggaaagatttgtatttcgcacgccacgctcgtatagagcggacgtcacatctgtctgttctatcgacacacctctcacgcagggaggactctctcatcacccacgctgcgtgcgctcttcttagtacacccaccagcagaagtgatgtgatcactatcgagtgtcggtgctatatgtntgtgagacaccacctcgcgccaccacggtcggacatcttttgctcattctctctctacgagagcaccacatctgtggaagattctttatatgagagtatgtttgtaagcgccgcgcggagaattgagagtctgtagttcttgtcaccacaaaaaattttggaggagaaacaattgcggctccggaaccacattttttctctctctgacacccgcttgtaaaatttttgtgggggcgttttttataggtagaggggtttttttataaggggacccctctctctttgtaaaatttaaggcggttttccccttataagaaaaaaaaattttgggccaagcccca

SEQ ID NO: 695871 - DNA, 793 bp, Homo sapiens
ggatcacttgaggtcaggaattagttgccaggttaggcaacgaagtgattccccatctctataggaaaattattttaggccaggcgcagtgacttgcgcatgtaaatcccagcactatgggaggctgagacgggtggatcacctgaggtcaggagttcaggaccagcctggccaacctgtgggaacccctatctctactaaaaatacaggaagtggccatgcatggtggtgcacaccgtgtagtcccagctactcggggaggctgaggcaggcacaatcgcttgcaagccgggaggtggaggttgcagtgagcccaagattgtgccattgcactccaggctgggcgaacaatagcgtgaattccgtcacagtacataaaagaaaaaatcttaacagatggcacaatacatctcttgaggtggtgtggcactaaagtacagtgtccttaccaatcaaacgtgtgaaatgggccggtagagaacccaggtgtcggaaatgttgaccggagtctgtcgtttgggatcgaatgggatactgggcgggtaaaacatatggttgtggagggggttaagaatcagatacaataatcaacttctgaggaggaacaagcgagaaaggttttatataacgaaaggcacggagggggaacgtcagtgagaggcaaatgacggggattcttaagaagggagttcattataagagagtgcgatatatcgaaaattcgcccagcggggttgaaggagtacccgaggaggaacgtggatgtgaaaagaggtggagataacaagaaagc

SEQ ID NO: 695872 - DNA, 657 bp, Homo sapiens
cacaaagtgtttttatttaatgaagaaacagtctttaacagaaaaaaggtattgaaatattaaatggccaccaagtttactttgaagcccatttttggctgtttagtcagcatgaagtgggcatgataattttttaatatttctttttgtgaaatttcctgtacagccttttgtaggattactacaggttaatgtgagttgaggaagacagtctttctcaaacaatactacataccttttattatattacaaacctaagtgttttatatcctagagtcaaggaacaaatttccttaggattatagtattacatgccataaaatactatgctttattggtcccatgttttgtgcaaatttaaaagatggcttttttataaggataaactatggatatataaaaaaccatatttttcacaactaaaatgggcattattttttccaaagtttaaaattggtattatttttacccttggttttgacattcaatccgtccaatttggtggtaggcttaaaacgggcggcatataacagaatgaatttttaccggttagaaattcggaaagggcaaaaaatgaaaattgggtttatttgcctttccaaaaaaatatctcacttttaaaggtgtttggtggtccgccccgcccacatttctcta

SEQ ID NO: 695873 - DNA, 519 bp, Homo sapiens
  misc_feature (172)..(172): n is a, c, g, or t
  misc_feature (193)..(193): n is a, c, g, or t
  misc_feature (307)..(307): n is a, c, g, or t
  misc_feature (428)..(428): n is a, c, g, or t
tttacagcatgtgaagtgggaaatcaggggtctcacagccttcagagctgagagccttgaacagagatttacccacatatttattgacagcaagccagtggtaagatttactaaaagtattccttatgggaaacaaagggacgggctctggctagttatctgcagcaggaanaatggtccttaagggacaggntcacttaatgctaattggtttggtggttttaagaacgccttaaaacgggtttttccaccctggggtgggcccagggttgtccccttgccctcaattcctgggtaaaacccgacnaatctttccaagcatggggcgtcaatggccatcacgagcatgtcacagtgctgcagagattttgttaatggccagtttttggagccagtttatggccacattggggggcctgttcccaaanatgtccccctttgttttgcaaagggttaaaagcaaaggcagctttgtcaatggtggctacttcttgcagagtcgggatccaaatctgcaga

SEQ ID NO: 695874 - DNA, 776 bp, Homo sapiens
agcggggtggttggcgtgcggtgcctggcgcccgacgggccggtggttgcggggcctcccgcctcgacccgggctgtgggtgcagccgtggctggctgccggggaccgcaaggggcggaggaaaggagggggccggtccaggcacgcagaggagcagccgaccatgcccctgagacaacatggcctccttgatccaacggatcgccacgccaggcttgcctcaccttccggtggcagcggggtgctggcctgggccgcttccgatcgcgacgacggcttctggcccggaggcgccgatgcagccgggcttccccgagaagctgagcaagctgaagatgcctcctgacccagatccggccgaggacttgaacatcgcccgtgcaaggcactactgcagccgctgcctgaccaaacctgccgccagatcacctacatgcacatctacgagacggacggcttcagacctgggcgtgttcctgctcaagagcggcacgtccatcccgctgcaactgacaccgggcatgcacggcatgctcaaaggatgctgtacggcaccggtgcgcatcaggatgcgatggaacaagctagaaggctgggcacggctgggcaacaggccgcgggaccttgaccagcccgagcaagcacgtaccgagcccgacggcttgcagccccgggagcgagaagccagtgcggacgggcgtgctgggtacggaagagcgaagtcaccgaggcaagaggaccatgcatactcaacgaacgggacaaactgacagatc

SEQ ID NO: 695875 - DNA, 480 bp, Homo sapiens
  misc_feature (67)..(67): n is a, c, g, or t
tgtctgtatgtggtggctcttgaggttctcatgccatcagttgtgtggtaatgtatgatccaactanaaatggatggaagatgatgggcaaatatgacttcaccaaggagcaatgctgggattgcaactgtacagaacaccatttatgcagcgggaggattcgatggcattgaatttctgactacggcggaagtgtataatcttgagctcaaatgaatggagcccctatacaaagattttccagttttaacaccctcaccaccctctcaaactaacacgcttagtgatccccttatgttctagcagacgaatccttgccaacagccaggttctttgcgccgtccatgcctccccccttctcatccccccttattcccccttatccttctcttcccttccctcccctcccctttcccccgccccccccccgtcttatcctcatccttcttctctccccttcccgtatcattccctaacccc

SEQ ID NO: 695876 - DNA, 843 bp, Homo sapiens
gctgagtgtggtggcgcgcgctgtgtcccagctgcctggggggctgaggggggaggattgttgaagatcgaggctgcagtgagccgtgtcacaccatgcatgtagcctgagtgacagaatgagacaatctctaaaaaactaaaaatcaaaattttaaaatattcattttaatttatgccacggttgactccatcctcataggtactgaatattgtgtttgggaaaagattttcagtatggatatttcaactcaatggtagaagagaatgaaaaattaagctgaaaatattagagagctggattctggggcccattctgcaccttcatagcctgttgtgtagcctctgatagttaagtgacctctgatcttagtttccccatctttaagatgggatggttagcaaagtgatctctttccagctctacaaagctatagattttttttttcatttcacaactagtaaaccttttatatttaaggacgtagattataactatgagataattagggtatgaagaacatttttattggcatggtaaaatttttccttagtgggacaggatcttaagttgagatagccacagactatttctattttccaaacttttgtaccctccttggaggataattcatcccgtcctcaattaccttttgaacacccagtctattattattatgcccgagtttgttagcccaacaaaaatcctattggcgacttagcattctcggatgtggaggggcattttacggacttcggcgccacatcccggtgtctctcgcgcgccagccttttacactgtctcacaaactcgtggcgccccaagtgggtttaacaaaaatgc

SEQ ID NO: 695877 - DNA, 203 bp, Homo sapiens
caccacgcagtatgacctgtacctgtgtgagggcttcagcgaggccctgaagcagtgcaagtatctaccatggtctagagctccctgcccctgaagaggtcggtgcagactacgggggccagtacctgcaccacacctactacccctacgccgacaggccagaccacaacaccaggattgttcccagcatagctgggcattgg

SEQ ID NO: 695878 - DNA, 114 bp, Homo sapiens
  misc_feature (23)..(23): n is a, c, g, or t
cgcaagctcaagattcgaaatgngcttcgagcacctgctgggcatgcagcgctacaacggcagctttggcctgtggagttcggacagcgaagaagagtactggctaaccgccta

SEQ ID NO: 695879 - DNA, 479 bp, Homo sapiens
  misc_feature (44)..(44): n is a, c, g, or t
  misc_feature (84)..(84): n is a, c, g, or t
  misc_feature (88)..(88): n is a, c, g, or t
  misc_feature (91)..(91): n is a, c, g, or t
  misc_feature (107)..(107): n is a, c, g, or t
  misc_feature (121)..(122): n is a, c, g, or t
  misc_feature (126)..(126): n is a, c, g, or t
  misc_feature (134)..(135): n is a, c, g, or t
  misc_feature (140)..(140): n is a, c, g, or t
  misc_feature (148)..(148): n is a, c, g, or t
  misc_feature (180)..(180): n is a, c, g, or t
  misc_feature (184)..(184): n is a, c, g, or t
  misc_feature (190)..(191): n is a, c, g, or t
  misc_feature (199)..(199): n is a, c, g, or t
  misc_feature (207)..(207): n is a, c, g, or t
  misc_feature (211)..(211): n is a, c, g, or t
  misc_feature (220)..(220): n is a, c, g, or t
  misc_feature (224)..(224): n is a, c, g, or t
  misc_feature (236)..(237): n is a, c, g, or t
  misc_feature (257)..(258): n is a, c, g, or t
  misc_feature (266)..(266): n is a, c, g, or t
  misc_feature (317)..(317): n is a, c, g, or t
  misc_feature (327)..(327): n is a, c, g, or t
  misc_feature (334)..(334): n is a, c, g, or t
  misc_feature (349)..(350): n is a, c, g, or t
  misc_feature (353)..(353): n is a, c, g, or t
  misc_feature (365)..(365): n is a, c, g, or t
  misc_feature (371)..(371): n is a, c, g, or t
  misc_feature (373)..(374): n is a, c, g, or t
  misc_feature (376)..(376): n is a, c, g, or t
  misc_feature (416)..(416): n is a, c, g, or t
  misc_feature (422)..(422): n is a, c, g, or t
  misc_feature (427)..(427): n is a, c, g, or t
  misc_feature (435)..(435): n is a, c, g, or t
  misc_feature (439)..(439): n is a, c, g, or t
  misc_feature (445)..(445): n is a, c, g, or t
  misc_feature (461)..(461): n is a, c, g, or t
agtagtggccccaaatgccaggctgcactgatatttattggttntaagacaaaggtggcagggtaaggaatttgaaccatctantatnatnggtttggtttcatggntattgtgtaatatnntaancccctaannaaatnaatggaanaagaggcagatttagagagaagagtgagagantagnttatgnnattatttntgaatttnaganatttagtantttnaataatttgctnntgctatctaaaaggcagagnnaggtatanaggatggaaaatgaaagcggaataggagagtgaaaaatgaagaaaagaatnaaagggaganaggcctntggataaatgcgggnnggnatgaatgatgtnaggcantnnanaagaggtggaggagtagtcttctctaaactcccccggggnaagggnggctncttttccnagtntgctangtagtgggtgtttttncttgacactgatgctact

SEQ ID NO: 695880 - DNA, 361 bp, Homo sapiens
agcactatatcaccaaggcacggccaggataatcgccgcattgtctggaaagaaggaatcggcccttgtggccaagagtccaggggttatgttcgtgaattccaaactggtgatatggtctcaaattagggttaatacccaaccaaagaatatagcctttatcctttccggcttgaccggctttaggttccaggttaaacgcagaaaccttgccggtcagggtttaccggtacctgtgttaagtctaagagtgtctccattgtctcttacctgtgatattatattatactcatatatttaatatatgtgtactcagagtctatatagagtctatttatatttatatatatttctcgcgtgg

SEQ ID NO: 695881 - DNA, 545 bp, Homo sapiens
  misc_feature (502)..(502): n is a, c, g, or t
  misc_feature (542)..(542): n is a, c, g, or t
gggtgtatagcatatagcatattctatttcaaaaatatatataactggcacatacattatacaaataataaaacaagtagttttaatgcacatgtgggctacagatgctatttttactgtgcaatagtgagacatttttaggtattgattattaatggtatataaatctactttttagtagttctataatgactttattcaaaatttatttctgatgaacttttagcatattttagatgagcaatattgttgaaaatttcatcaagtgagtaacttgcttgaatgttaggggattataaaatgggagaccatgtttcatgcctaatatatattttagcacagtacacatggatgttaattatgataaggtacattttttttttcttgaaaactttcatattatggtagtttccctctacggttttgacttagaatatcacagtttctgggatgtaaatgggagttgatcagccagtcattgtgtccttctctttgcatttangttcatcctggaaaggttaaaggatgctcagaccctcttncaa

SEQ ID NO: 695882 - DNA, 264 bp, Homo sapiens
  misc_feature (13)..(13): n is a, c, g, or t
  misc_feature (110)..(110): n is a, c, g, or t
  misc_feature (251)..(251): n is a, c, g, or t
gacaggttggccnatttcctcaatataaatatgattcaataaaaagtaataaataaaataaaattatttttaaaaatactatatctgggtaaaataagtagagaagaacnatctattagttatctgagcattaaaaatatatgaacagaatatgcatatttatatattttaatcagtttcttgtcgatatattttctaatagacaactttttatttcaatatagaaatttttcttagaatcacctgtaaanttttctaaaagtt

SEQ ID NO: 695883 - DNA, 167 bp, Homo sapiens
tgaggatccgagagacgacagaggggaatcaggagctgcaggcagatcaggacagcatgtccaatcgatgtgatgtttcagcctgactcacggtgcctggtgacgtacgtcagcatattaaagtgtggctgcaagaacctgcaggaggcagaagaatggtaccaatc

SEQ ID NO: 695884 - DNA, 463 bp, Homo sapiens
  misc_feature (15)..(15): n is a, c, g, or t
  misc_feature (21)..(21): n is a, c, g, or t
aacgtgcgaatatcntcggcnatccatgccgaatgagtcttcgctgaaacgtacgatgtactggccggtcttgcggttgaggccgacaaatccctggagttggtcggcggcctggcagataagctcggaagtgatgcgcatggtaaacctcactgaaaagtcccacagggactggaaagatggtttacacgcgtggcagaaattaccgccctctgacggggcagctacccgtaagaatactgcaacgccctgcaaaaaagtcgacaaaattggccggtgcgcacgttaatgtcggtttggtgatagcgccgttcgcaatcaattgttaaaaaggacaccttctcaaagttacctccacgaaaggacttcgcatatgcctgtcacgttttccaaaagcgccttgctgctggcgttgatgctcggccttggccaggcacaggctgccgaaccggatattcgcacg

SEQ ID NO: 695885 - DNA, 983 bp, Homo sapiens
gggtggtcagaaccgcctgaggtaaaaacgggtggcactggggaagcgtatgcgtggctcccgagagcctcgaccacttgtgctcagatgtccgcgctcgacctcctggatggatccagtgatggcttcgtgtgattccgcctggattagcacgcgcgctgtggcaggagcgccaccctctaatctgctcccgagactggacgcccggtgcctttccagcagccgcgttgtgtctttccgggcgcggtccctcgaacgactggctatcccctggcgtggctgtttgactcgctaggtgggatctggtcatcgacaagatgcggatggagggctaatatgcaagatgggtatggcatccactagctctgctcataagtatctgcatgtgattccagtaccttggattgtacatcatactctgcatcctgaggacctgaacatgctaactggtggctgcagatttgtcttctagaggagcaagtgtggtctgtggacatggcaggttcagcctcacctgggattttgtgtgcactagaaggtgccaaggcctaccctagactattaaagcagaactggcgtttaacatgacaccccaggtaatttgtgtgcaccttagagtctgagatgcactagtgtagtgattcgcagggggacaattttgacctccagtgggacatatctggagacatttcttgggtgtcacaacgtgctgggagacggtgctactggatctaaatgggtgagcgcaggtgctgtaaacattcggcataccggcactccgcctctctgccgaagtatgaattaccccccggatgcctagtgaaggtgaggaccctaacttaaatcccttgcttcataatctcggacccgggcctacctcgggcccggggactcccctctctcagttacaaaccaccgtggtcagaccttcgctgtctgagcctcgagccacggaactcccccccagaataccttcgggcgcc

SEQ ID NO: 695886 - DNA, 87 bp, Homo sapiens
caatgtctgtgtgtgtttttttttaagcgtagaaaacctggaaaatacagaaaagcccaaagctaaagaaataaaattgccgggtgc

SEQ ID NO: 695887 - DNA, 464 bp, Homo sapiens
tcgtcccagcactttggaaaggctgacgatggaggactgcttgacgcccggagttccagatcagtctggcacgatacagggagatcttgtctctacaaaaaatttaaaaattagttgtgtgtggcaggctaacgcacctggtctcagctacttaggaggctgaggtgggaggatcatttgagcttgggctgtagtgggctgtgactgcaccactgaactccagcctgggtgacagagcaagacctcgttcttcaaaaacaaacaagaaaagtcaagtcccaagccccaagccccataacaaaacaaaacccaaaacccacatacttgataaaagacaaatgtgtaaagaactcttaaatctcaacaagaaaacaaatcaacccaagttttaaaaatgagcaaaagatctgaacagccacctcaccaaagatatacagatagcaaacaagtatattagaagattc

SEQ ID NO: 695888 - DNA, 257 bp, Homo sapiens
cttttggttgggggttgagccccttaaaaaaacccccccccccggaggcctgcctttttagggatttttttgggggcctaaggcaaaccatggggtgaaaccccggggccgggccttttttaggaaaagggtttttccaacccccccccccccccccgggggtttttttttttttggggttggggaaagggccccccccggttttgggtttttttttggggaaaaaaaaaaggcccaaaaaaaccaagcctttggga

SEQ ID NO: 695889 - DNA, 135 bp, Homo sapiens
  misc_feature (91)..(92): n is a, c, g, or t
ccgacaagaccaacgttaaggccgcctggggtaaggtcggcgcgcacgctgggagtaggtgcggagccctggagaggatgttcctgtcttnngaccaccaagacctacttccgcacttcgacctgagccacggct

SEQ ID NO: 695890 - DNA, 198 bp, Homo sapiens
gtacagtatgcatagtccatcatagaatactcactgtaatatataaactcagacccaaacattaatcatattcttcaaatatctactcatcttcctaaataccatactaatcttaattaccagctaacaacctattccaactgttcatcgccatgagatgttggaaggccttccaacatctcatcgcgccatcattgg

SEQ ID NO: 695891 - DNA, 128 bp, Homo sapiens
taatttcagaaagtcaggtatttggtttaagagctgtgggagtccacgctacctggggtgctcggacgcttaattgcaaaataattagagaaaattggtgactgctttcatctctgtttcatctttca

SEQ ID NO: 695892 - DNA, 217 bp, Homo sapiens
tacagttctttattactcatcttacagccagtctccaggagtgcggcaacagatctgtactcttcttaaaaagttgttattgtaggatacaggacagttctcaggtactttataaattggagcagagtatatccgaacgtgaaccagagaatgagttaacctaacagcacccttctgtttctttacagcagtttaagactttctgtgcccgtttcaa

SEQ ID NO: 695893 - DNA, 104 bp, Homo sapiens
taggatggagaggcacccccctcttctagaggcctgggggcagcgtgacttggggggcagacttgacactagtgcccactcactcagatgtcctgaaattccac

SEQ ID NO: 695894 - DNA, 182 bp, Homo sapiens
tgcccggattacaggcatgaaccactgtgcccagccaaaacctgtactcattaaacatgatcctctttcaatagtggaaacatatgacagtagaataatcctttaaaaaaacaataaaacccatccagtcacaataagtcagaaatataaataaaagaaaacaatataagggctccttgttc

SEQ ID NO: 695895 - DNA, 142 bp, Homo sapiens
gttactagtctctgatcccgcccaccttgatggctcgctcccttaattccagcttcccttcatgatcgcatttccttctcagattcgggttctcatgctgaggctgggcagttcttgagatatatttgcattaaccacccag

SEQ ID NO: 695896 - DNA, 629 bp, Homo sapiens
  misc_feature (68)..(68): n is a, c, g, or t
ttcattgctgacggattcgcagtgttctgattcagtcagataggatgcattcctacgttctagatgtncagctagtcagagtcagcagagagactcatcggtctaaacgtataggcatatggccaatgtccgagaatctaggagtcacgtgtacagtatcatacgtttggatatcatcagctgcgtcactttgcactagtgtacatgctcgtcctaatggtaagcatcatgactcttgtcagtttgcgatggagtatttgcatcctcaggccgtatacagtcctggagcagtgcatcaggatgaactacatgaactgtcaagtggacttgttatagctagtagtcaacaagtaaggtagatccagtgtacaatatgtgactgtggtcagttagattggctttcgatgactatggcacaatagaatggagtgcagtcactcctatggggagttctgagtaaggttgtatcgtatacccatacggttaagcagtgtggaggtagcgattgaaaggcttgcacactgcagctctcatttgtgcagcaatcagatatcatcaagatgaatatagtgctatgaatagcagaaagatgtataggcctgtgatccttcgtgactagtcccaggcac

SEQ ID NO: 695897 - DNA, 456 bp, Homo sapiens
aaaaaaaaaaaaaaaaaaaaaaaatgaaaaaaaataaaaaaaaaaaaaaaaaaaaaaaaaaaaaaaaaaagggggaaaaaaaaaaaaaaaaactttgtgggccgcttgggccaattcatttttaaattcaacaaactttttgcttgcggccgaatttaaacctaattggccaaattccccttatagggagcgttttaaaaattaattggccgtgttttaaaaacttcggaatgggaaaacccttgggtttcccaaattaaatcccttggaagaaaatccccttttccccagttgggttaatacaaaaaaggccccaaccaatcgcctttccaaaaatttgcccaccttaatgggaaaatgaaaatggaaagcttaaatttttggtaaaattccggttaaaatttttgtaaaaaaagcttttttttaaacaaataggccaaaatcggtccctttatt

SEQ ID NO: 695898 - DNA, 343 bp, Homo sapiens
  misc_feature (10)..(10): n is a, c, g, or t
  misc_feature (13)..(13): n is a, c, g, or t
  misc_feature (16)..(16): n is a, c, g, or t
  misc_feature (132)..(132): n is a, c, g, or t
  misc_feature (188)..(188): n is a, c, g, or t
gggcgacagnggnagntgcggcgcgaccaggccgggcacctccgagcgcaaggacagcgcgaggtccgcgcagcccagtgcattcatggagttttgtgcggactcactctatgatgtccctgttgttgtggncgcagcgccgtctgctcagcgcccgggtcaataggagccagtcctttgtaggcgtncttggtagtcacgagcgggggcccaggagttttccggtctttagcccgccggggcccccacggaagccccccgcgctctcccgagtgttcaggatgttttacgtggttcacccagccgtcaaggtgccgatatccgagcggctgtacctggtgta

SEQ ID NO: 695899 - DNA, 312 bp, Homo sapiens
cactcagtttcaaatgctgatgacacctgtacacacacacacacacacacacacacacacacacacacacacacacacacagagtctatacaactttgcgtgtatgtaattggcatcatctcaaatatataccatatctctccctcactaaatgtaagccttctcctctctctctcaatcttatccatacatagcaggcatgtgagagggtggattaaaccaaacccagctacgcaatattcttgagcatactccctcaaatacccatatagtgatgaataatagcagatcagcgtgtagcgacgctaaatg

SEQ ID NO: 695900 - DNA, 662 bp, Homo sapiens
tacgacacgtctcctctgtgtctttgaaatacacgttcttttcttccacggcacttaacccaactttacccatatttttgtttgtcacctacaaggactgtaagttcccttaaggtgaaaaccaaggatatttggttcaaccctctatactcacccccttgcacatggtgtatgcttgataaacatctcccgaaagaatgaactgaatgaaaaacacggtcaggtactgtcagatttatgcctcccttcagctgcctaggtttataaaaggatatcaggacatcaagcaactggctgtctaagctaataatgaatgtcttggttaaagagaacacagcattttattctatactagaaaaactttcttacgaacaatttcttgaagttttcttggtactttaaaattgtaggcctttatgccttatgtgaaaaagaaacaattcataaacacctgtaaagcatgattctctttgttgtttttttttgagacagggtttggtgcttgtcgcccaggctggagtgcaatggtgcagtctcggctcactgcaacatctgcctcccgagttcaagcgattcccctgcctcagcctcccaagtagctgggattgcaggtgcacgacaccatgcccagctaattttttgcatttagtagagacaggctt

SEQ ID NO: 695901 - DNA, 786 bp, Homo sapiens
ggttcctcctttgccctaagcgaatgaaaggtaattaataaaatttttcccacatcttaaaagatcccattaaggcccactcaggggggggtcttccaggaccttgcaagaaagtactaactattgaggttcgggctaagtcaagcttgtatgagaggtcatgactttcatgaaggcgttagggctgttttaatttataaagaccagagtcccaaatggaaaccagctggtcttaaaaaagttcctgaggaagatttgaataatccccttaagtctttgggaaacagtgatttgaaattttgaggggccaggcttttaaggtatattttgtagcatgggttggccatctacagcatgtgggcccaatccagcctgctgcctgtttttatataccctgtaagctaagaatggtttccgccttttttaatggttgggaaaagaaatccaaggcttattattcctggcgtgaaaattatcagaattccccaataaagctttattgggaccagctatactcctctgtttatatattatctgtggctgctttgaaatgagtagttgccataaagatggtaaagccccccaagcctaattattttctgtttggtttttgtcagaaaaaagtttgtccatccctgttttaaaagatggaaaaatgtgaagatctttggagattttcttgagtggtatatttaattgaaatgggattttcgtttgggttgtatgttgatgaaatccacttaggtataccatataaaaaataaagaccctgaaaattgttttgga

SEQ ID NO: 695902 - DNA, 271 bp, Homo sapiens
tcagctgtcttataaatgatgccttctgcaagttaaacataatatagattcagttttttaacatgatctacttacaacatactaaacaaataatagaagtatatatatattttaaaagacactatctcctatgaagtctaaaaagggaaatcatgacaagtcccggatcagataaacaccactgcatcattaaaggggactaaaaagaggcttaaaataaatctgattagaaatatccatttcccggggtttcatcctctcagtacggcgg

SEQ ID NO: 695903 - DNA, 162 bp, Homo sapiens
caaggtgccgtcgctcgttcggggctggtcgtgccgctgccacagcggacgcatgtagccgtcatcattgatgcgtctagacgcggtactagatttaacactacgctaatcaataccacgacaccagacgacatccaggggagacaataactaaccttccga

SEQ ID NO: 695904 - DNA, 263 bp, Homo sapiens
  misc_feature (13)..(13): n is a, c, g, or t
actcgggcggttntcatcggtcagcagttttgcaggtgtttgcgaaaggccgggacgttgcccatcgggcctttgagcgcaactaaggcttcgcgcagttccagcaacttgttcaactcgggtacttggcgggcgacggcgtcggggccgaagtcattgatgtttttgaatttaagttgcacattcaagtcggtgtcctgatcgttgcttaaaacagacggaaccgccatgtccagagcaacttcggctttagtcagtacttc

SEQ ID NO: 695905 - DNA, 955 bp, Homo sapiens
ggggaggcggggccggagaggagagaggaagaggaaggaacgcgcctggcgtcactgagggtgtcacccgggaccgcggctcaggaaccccagacgcacgggccttgtgctgtcgctgccgtggcaccccttctagaaggactctattctctataacagaagtgggagccttggacaactgaacgcctatctctagctcaagaaatgtcagctctttttttttttttggagactgtcacccagtcgggagtacaggggcgccatcttggctctcggtaacctccacctcctgggttcaagcgattctcctgcctcagcctcctgagtagctggggctacaggtatgcaccatcactcctggctaattgttgtatttttagtagataatggggtttcaccatgttggccagggtggtctcagactcctgacctcaggtgatctgcctgcctcggcctcccaaagtgctgggattacagacgtgagccaccatgcccagccaagaaatgtcaattctttatcgtagcctggctttccatatttctcactagggtttttattctctagtttgtaaatcacatttggcgtttgtagatcactccttcccttttagtggcattctctattaggtgtccatctcccaatatgaagaaacagttttctgctttttcctcctttatctgatccatttacagatttattacatttataataggctaggtattggggatacaaaaatgaataagatatggtctgttttcaaaggtatgcagaaacttttctatatattcctactgacttgtatttgtatttcttgaattaaaaacaatcctggctgtgtttttttttttttttttgctcttagtgaatctttgtttcttcttttcattatggcattccagttgagtttcaccacgcattatcatgagaataaataatttcactgactttaataat

SEQ ID NO: 695906 - DNA, 726 bp, Homo sapiens
aaaaatatagggtaggtacgagacaagtagttacgtactcagcggcggcgcggcgcgtggtgttgtgcctctgcgcgggtctcctggtccttctgccatcatgccgatgttcatcgtaaacaccaacgtgccccgcgcctccgtgccggacgggttcctctccgagctcacccagcagctggcgcaggccaccggcaagcccccccagtacatcgcggtgcacgtggtcccggaccagctcatggccttcggcggctccagcgagccgtgccgcgctctgcagcctgcacagcatcggcaagatcggcggcgcgcagaacctgctcctacagcaagctgctgtgcggcctgctggccgagcgcctgcgcaatcagcccggacagggtctacatcaactattacgacatgaacgcggccaatgtgggctggaacaactccaccttcgcctaagagccgcagggacccactgcttgtctggcgctggctccacccgggaaccccgccgcacgcttgtgttctaggcccgcccaccccaaactttctgggtgggggagaaaataaacgggtttacgagaacctagagacattacctcatccaagaaacaatctcgcgagggcccccctataaaccgcggtgtcggtgacaagcacgcgttttcttcgacactgcgcactgttgggccctacgtcgggttcccgtgatcccaattttctcttgtccccag

SEQ ID NO: 695907 - DNA, 873 bp, Homo sapiens
gtctcaaggtaaattaaggatttactgaataaggtgttgacaaatccagaccattttattttatttttttatttatttatttttgagatggagtcttgcttgtcgcccaggctgagtgcagtggcgtgatctcagctcactgcaacctccacctcccgggttcacgccattctcctgcctcagcctcctgagtagctgggactacaggcacctgccaccacgcctggctaacttttttttatatttgagtagaaatggggtttcaccatgttagccaggatggtctcaatctcctgaccttgtgatccgcctgccttggctcccaaagtgctgggattacaggcgtgagccatgcgcctggccagacattttagaatggggaaattttagttgagaaaaaatgcactgtaaatatgctttagttttaattcagtgtgggatgcactacctagcgaaacatgtgagaaactatatacttctcagagaaatatctgacatctatggtcattccattgtatgttttttccccagagatttccataatttaaataaaatcctagatccaggtctggttttgtgcataatacttcatctatttaaattataaatctggtttaggatcaggtgtgtaccttaatgtagatattttaatataatcacttataaagaggtaaaagatactttcagatgcgcaagtggggatctgtcgctgcccggaaggcagagaacttactcggtcaaatatgtgtaacccaaagataacttcgggtcaccgcgggaaacaaacacgccgtttcagacggagacaaaacagggggcagagggaaattttaacaccggcccatgtaggcacacattctcgaggtacaatca

SEQ ID NO: 695908 - DNA, 453 bp, Homo sapiens
accgagctgcagtgatgatgctgtaagccctgtaggaggcagaacagtacgtccttgagaaagtggaaagttcttctgatgaagaacgattactcagaagttttgtgagttcaggtggagaagcttcttagtggtgtcattggtcttccttccctggagggtgattgaaagggcttccggaattctcagaacccaattttggagagctgccagcattatgattagtacaatgccagcattatgattagtacaatgccagctatatttgtctgcaggagcttttaacctgggattcatggactgttgaagtcaaggattggtgaacttgggtgggaaaaaatacatttttgtttttactaacctctatgtgaaatgaaacattttcttcaataacaactgtaagtaaaaccagagtagaattggcagtacctgtgactttgttactaaaataaa

SEQ ID NO: 695909 - DNA, 335 bp, Homo sapiens
  misc_feature (274)..(274): n is a, c, g, or t
tcgacagaatgggtctcactctgtcgcccaggctggagtacagtggcacaacctcggctcacagcaacctccccgtccccacttcaagcgattctcctgtctcagcctcccgagtagctgggagtacaggcacatgccaccacaccaggctaattttcctgtgtttagtacagatggcgtttcaccatgttggccaggctggtcatgaactcctgacctcaagtgatccgcctacctcagccttccaaagtgctgggattacaggcatgagcanctgcgcccggcctgcttcctgccaagttaaacggcatgctagctctcagctccccatgccc

SEQ ID NO: 695910 - DNA, 169 bp, Homo sapiens
agcgatacaaaggtaatagtagctgggcgagcaacttctgttgctgcgtctgagggcttgggtcctgagcctccgctgctggccttgccccagctcagtcgccctccaggtgccaaagagctggttggttaagaatcgatggagccagggcttggtgatcctggtgagt

SEQ ID NO: 695911 - DNA, 199 bp, Homo sapiens
  misc_feature (67)..(67): n is a, c, g, or t
  misc_feature (109)..(109): n is a, c, g, or t
  misc_feature (121)..(121): n is a, c, g, or t
  misc_feature (140)..(140): n is a, c, g, or t
  misc_feature (145)..(145): n is a, c, g, or t
  misc_feature (149)..(149): n is a, c, g, or t
  misc_feature (165)..(166): n is a, c, g, or t
  misc_feature (169)..(169): n is a, c, g, or t
  misc_feature (179)..(179): n is a, c, g, or t
gacaagctctcgcgagacgagccgtgcaggctgaaaaaatggcgccacccagtacccgggagcccanggtcctgtcggcgaccagcgcaaccaaatccgacggggaganggtgctgccaancttcccggacgccgacaantttgngaantttgctcttgggtccnnggnggcaatcaanaaagcaactgggggcctaac

SEQ ID NO: 695912 - DNA, 426 bp, Homo sapiens
gaagtgcacctgtgctaccagcagacaccttgctagacccttcagacatcttccttaatcctcacaaccagcctgaaagggacgtgcatccccattctacaagtgagggttccgattcggagggtttgacttgctcaaggccacaaagctagtaaatggtaaagtcaacactggcaatctttgaggactgttcgcctgactcatcaccaggctgccactcagtaaaagccaaggcacagtcacctttaacaaaatgtacagattgcaggccagatttatgggacctcctgcagattgaggcaatggattaagtgtactttatacttctcaggtacatattagcaaccagacgctcccatattccctctgtgtctctcctggaaaaccactgataaagaacaataataaaatttattctaagccaaa

SEQ ID NO: 695913 - DNA, 439 bp, Homo sapiens
cacgagtagtatatatagtagtagagatatagatatagagagagctatagagagagagatagatcagatattctgctcctgatctcgcgatatctctctcttcttaccctctctctcccagtgatattctcttcctcactcctcctctctcaccgcctttcggttctctgtacttttacttcccctcgtctcgctcctccgtgcccacctcctacctgcatttcttcctggaccccttctcttccttccttgtcgacttgtacatcctatccccttctgccatattctcttcctcacgcatctttgctgacctcttcctttctttccctccatcttttcgctttcctgcttccctcccttgtccttttccacttttttcacctcctctcattcttctttccccctttctctcacgcctctctccctcttgcttcctttc

SEQ ID NO: 695914 - DNA, 251 bp, Homo sapiens
agactgttcgaccagggttgggatggagggagtttacaggaagcagacaggtccaacgtcgaatgccgaattcctggtctggggcaccaacgtccaaggtgggccactatcgcatgatgtggcagagcgaggaggtcttgtgtgggttttcgtgattcagatcacttgtctatgccccaggactccggatgtgtactcggtgcaggccatcgcacagctgacgcttgttaggtgatagcggcgtgttgccc

SEQ ID NO: 695915 - DNA, 228 bp, Homo sapiens
ggggaattcctcctcctcctgggcgaattccaccgcccactctcatcccgtcatccaaaaccacagtggcttcagaaaaaccatcttttataatggggaggctccactctcacaggagaacaccatggcactatatttagactctctcagtaatcacggcttccttacactacaacgaaacaccccaagccgtcagtgcggatctactctctcttgcgactgccacgg

SEQ ID NO: 695916 - DNA, 145 bp, Homo sapiens
  misc_feature (119)..(119): n is a, c, g, or t
  misc_feature (121)..(121): n is a, c, g, or t
  misc_feature (123)..(125): n is a, c, g, or t
  misc_feature (130)..(131): n is a, c, g, or t
  misc_feature (135)..(135): n is a, c, g, or t
  misc_feature (143)..(144): n is a, c, g, or t
gggagtgtgtggataccaatttgggagggggcaagtttttggctgaggccagcctttggcctatagtcggccctctttaccagatgttctcagggggtcccagtcctcataatgctcgncnannncggcnnggantaaagggnng

SEQ ID NO: 695917 - DNA, 111 bp, Homo sapiens
  misc_feature (52)..(52): n is a, c, g, or t
  misc_feature (67)..(68): n is a, c, g, or t
  misc_feature (74)..(74): n is a, c, g, or t
  misc_feature (82)..(82): n is a, c, g, or t
  misc_feature (97)..(97): n is a, c, g, or t
  misc_feature (99)..(99): n is a, c, g, or t
  misc_feature (105)..(105): n is a, c, g, or t
  misc_feature (111)..(111): n is a, c, g, or t
gtctcgtgtcttttgaaactttttgcgagtccactgtgggggaaaaccattnaaatgtgatgaatgnnggggangattttanacaatttcacaatgntnttcccnccaggn

SEQ ID NO: 695918 - DNA, 584 bp, Homo sapiens
aaaaaaaaaaaaaaaaaaaaaacaacaaagaaaaacaacagcgacagacagacacgagcgaaacagcttaagacgaagagagaaaaaagagagaaggcgaccaggacgagacagagaaagaagagaagcagccacacaaccaggcgacaccacggaagagaggcaacagaccagcaggcagagagcgaacaccgggaacaaagaaacgaacagagagacgcaaagagcggagaagacgaacgcacgaaaagcccgaagacaacgcacagacggcacacaaagaaccgagcccacgagcaaccccaacaagagaagcagccggaagagcaagaacagccccggaagacagagagggcgagagccgcgacgagggcgccatagagagagagcgaagagagcggagggagagagcacggagaagcccaggagccggacggtgagcgggcgggctgagagaaaagcaggaacctacacagaacaggagagaacagcgaccggacccgggcagcaacaagaggacgaagaaacaagaagacgacgcacacaaaacgagcgcagagacaaacaaaactagaacacaaaga

SEQ ID NO: 695919 - DNA, 991 bp, Homo sapiens
cggctctctgggtagctgggatacaggcatgcactaccgtgcctggctaatttttgtatttttggtggagacatggtttcaccatgttggccaggctggtctggaactccaacctcaagtgatcctctggcttcagcctcccaaagtgctgggattacaggtgggagccatggtgcccaggtcagaaggttaaattgtttcagtaaaaagtcattctgttgtggaaatgttacaaatgcattgctaaaagggagagaaacatccaggcgtaaacacttatgtcagggatcccttatcctggtggaataagcataaacttggagtcagaattaattgcattctcttttacttattatgagtcaggggacaagtttcttagcttctctaagcctcagcttcttccttgcaataataacacttggctgacagtgttatcatgaggattaaattaaatgacatctagtattctgcttggcctagagtacacactcagtaaaactgatccctttctcacttctcccaggcttagaagttttctggaggtaaattgcatagcccacagctgaagttgatctcttggttcttcctcattcttttttagtaacagaatgatagaagttcgccaagtactggaggacaggagaacacctgagctcagggatcagactctaggataagaaactagttcagccaggaagtgtgccactgtgcagctcttaagatcatatgctcaagtgtcaatcccatcgcacatgttaataactcaatgtcacttgatggtagaagatctctagggaactctgagaaaagacccagtgtttggagccacctgagagcacttagcttactatctgtctggccaagaataaataggctcgcggcgtaatcacaactggtaggtggcccaaccaaaggtctcccccacctctgaaaaggggcaagtgggtcctcccgcttatttaaaaaaaccgggccaaacggcaagcagcaa

SEQ ID NO: 695920 - DNA, 253 bp, Homo sapiens
gctcaacattctttgtaagccacaggctacctcggacttcacgtcataataggctcaacttgtactcagtatctgcttcatccgtcaagctaactactttcatcttatacatccacaagcactcagatttgggcttcgaagtcggcgacgtgactactggtcattctcgtagactgtggttgtgacatagtttctagtatgtctccatcgtattgatgagggctcttcaataacaacaggaagagcatcaagg

SEQ ID NO: 695921 - DNA, 335 bp, Homo sapiens
tggggggggtccaaaaaaaatttttttacaaaaacaggaaacagggccctttggcccctaaaatggaaatttcccaaaactacttttaaaggaacccaaaagacccgggtgcccgagggggctttggccctgtttgaatttttgggaaaaggaaacccctttaggggctccgggggcccttagggtttaaaaaccgggaaaaaaggggactgggtttggaaatttttgaccaaagggggacagcaaaggggaaaacctgaaagctttgccggataagggtgaacctttcttataaggaacaccaaatggtttattccaaggcaggggccaagtga

SEQ ID NO: 695922 - DNA, 334 bp, Homo sapiens
taatgaacagataagggagcagagtggttaaggacttacaggaactataactatactggaataaggaatgaatcaactgaccttgggacaagacaggtatattaacataaattgttacttgcctttctcacccagttaatcagtctctgtacttgtatccctttaagaaacaagtgtcttggttaactaattctgttaatatggttgtgctaaattcatagcaggtgcctataatcatttgcttttagatcaaaccaattccatatcagaattttccttggtttactatagatctttggctttcagttgttgtttgtgtttattaatgtacaat

SEQ ID NO: 695923 - DNA, 310 bp, Homo sapiens
ggtcatataaggaacatcataaaatactgatctctggaggtgtcaagatcatacaaaagacaatataaagacccaggaacaattggagactgtcagagaacaggcagaaatgacaatcaaatacaatgtggtatgttgaatagtatcctggaacaacaaaaaccaaaaaaaaaaaaaattactttagtgaaggccaggcgctacggtacctcatgcctgtaatcccaacattttggaagaccgaggggggccactgtttgaactctggggaatctcctctagagttcacctgaaggatttaaagctttgg

SEQ ID NO: 695924 - DNA, 585 bp, Homo sapiens
  misc_feature (50)..(50): n is a, c, g, or t
  misc_feature (52)..(52): n is a, c, g, or t
  misc_feature (61)..(61): n is a, c, g, or t
  misc_feature (508)..(508): n is a, c, g, or t
  misc_feature (561)..(561): n is a, c, g, or t
gggcaatcaatcgcgcccccccggggcgaagctcgtctggtatcttcgancnaccataccncagaggacacgcatccacacaggtgcacctcaactagagaccccagcgaaacccgcctcgtgggctcccgggagcctactacacggccggagggaaaaccaccacaagccagacgcaacgcccaccggggccccaacatacgcttcagaaagtcgaatggcctaactaatacagccctacctccctctccactggggagaccatctccagatagctcgtccctaagggttcggttgccggaaacccgggaacgtatcgctcctcttaatctccccgcctcgggaccaggcaattcccggaggcaccagttctacaaacaacatcccccatacagagcgcccagcatacacacctcaacgtccaatacatcttacttcaatttttccccagccttcctgtccactggattccgcaccccaactaccccacgcccgctgtccgcccggngacccgctagtgactagatcctctataatcacacggacgaacgagacctcatncgcgaggactggacatcacccagt

SEQ ID NO: 695925 - DNA, 177 bp, Homo sapiens
aacaaaaaaaaaaggggggtttgggtttttaaggccccgaaaaacttaaccggggaaatttttggtaaaaagggaaaaaaaactattttaaaaacccctttttttttgggaaatttaagaccccccccggttttttctttcccccaagaaaaaagccctgggtttttttttttttta

SEQ ID NO: 695926 - DNA, 626 bp, Homo sapiens
  misc_feature (60)..(60): n is a, c, g, or t
acagaaaggtctatcatttgggaaggtgttcgctttgactgtcgatctatgtctaaaacntggatcgtttcaacatgatgttacgagagcgatcgactatgcgacggttgttgcgagatctcagctttgagtgtcagctgtccgtgatctgaattgaagaagacaggcatttgcgatcagttgcctccttctgtgccttttatatcgtggccaaaggtaacagacagatgaaagaacttttcagtgaagatgtatgaaaagttgatatggaatctagggcccaacgcttaatagttcaacggtagtatatgaaagggggttctgtctgaagagaaggtacttgccaatgtagaatgttggtgcgcaatagtaattacacaaactactgaaaatgagtgactattgagaagtgcataagcatccggtgtgtgaacggttgatcgcaaatctctcacagcatgatttatcatcgttcagactacacccatgtgcgattgcacactggtgaccatacaatacgacgtggcgctgtcacggaaccgagcctggggcacactgtggcaatccatacccggagcgtgacggtcgcgagaatggcattatcgtccccgacaaacctcgatccg

SEQ ID NO: 695927 - DNA, 332 bp, Homo sapiens
acacatgttccaccaccaatgcttctaaaccgactcagtaatgcgtcgcatttgctgcatgggttcaattgagcaatcagaaatttgcccctgagcaaatgcccacacctccatgctaagcctccagcaacacttggcacatcacgccttcgcacacacagcacatttgtccttgcaagctctgtcatcttgcatcatccagccactggcatttgtagcacacttgtttgcttgcattttgcaccttgctcattgcaagttcacacttgttcccacattgagtccattttgtttcaatcacccatgtcaccatcatcttatgcagttccaca

SEQ ID NO: 695928 - DNA, 325 bp, Homo sapiens
tggtaattcctcctggctgctggctcctctgtccggagggatgcagcacagacaggtgttcatcatccagcgctcaggcaaatcttatttagcaggaagataagactcaagttatacctacgagagtggtagcacctacaccagccgaagcacagataactgcagactggcccgccgtttacaaaggcccagcctgctcaaacacaagctccattggtcttacaagttgatggaactggggatacatcatctgaagaagatgaagatgaagaagaagactatgatgatgatgaggaggaagacaaagagaaagatggagctgaag

SEQ ID NO: 695929 - DNA, 916 bp, Homo sapiens
tgaggtttgaagatggtgggtagtgagctaaagctctgatgtgagtgggagtcagaccagtgggcagccttggaccttaagagtgtccctttcctgtaacccttgcatcaagcacacctattctaatagtagaagtgacagtcatgaggatggtagccacaagagggcgctctagacagacagccattttcctggtgctctctgggcaggacaggtggtgtaaggccagccaggctgaagaatatggagaaccctgacatgggggcaggaacccccataccctgccaccacagggccttgtcccaccctgaggcaaaggtcacctggtctcttgtccctgttggcagaggttaaaatgttgattgctgtgtatgctgtgtgtagcccctgagaacttcatgattacccatccctttggaagctggcaggtactgtaggtccctcttgtcccagatttcaccaagtatttgtcacagtgccctggtcaacttgggccagtgtgtcacagacaatacttgagaagtgagcttgttagaaagacacagatgggaagatacaatgacctctgcttgctggaggggctggagattgcctggcccttgggtgggaaatgggccatcctcaacaaggttcatgcctcctacagccacaatatgccgcatctcacagtagcgccacagctggccatggttcatctgttccatcccgagagggagaagcctaggggtatgggaagggacagattggatggcggggtccgaggaaaggcccatccttttggggcatcccccttgaagtgcttaagtcggacggggctaccgcgacccgtcgaagagaggaggggccccttggacctggtcgggataaaacatatattagccgcgcgacagtaccgtttgattagtaataaaaatga

SEQ ID NO: 695930 - DNA, 408 bp, Homo sapiens
  misc_feature (221)..(221): n is a, c, g, or t
  misc_feature (276)..(276): n is a, c, g, or t
  misc_feature (280)..(280): n is a, c, g, or t
  misc_feature (286)..(287): n is a, c, g, or t
  misc_feature (289)..(289): n is a, c, g, or t
  misc_feature (291)..(292): n is a, c, g, or t
  misc_feature (304)..(304): n is a, c, g, or t
  misc_feature (306)..(306): n is a, c, g, or t
  misc_feature (309)..(309): n is a, c, g, or t
  misc_feature (397)..(397): n is a, c, g, or t
  misc_feature (402)..(402): n is a, c, g, or t
  misc_feature (404)..(404): n is a, c, g, or t
gttgggattaatagaaccttattttagccttccatcccccatagttcacgtctctagtttattgactccgaaaatgacttcatttttgaggtgagactaccttcagccatcccttgtataagagtttagtgttggcctggcgtggtggctcacacctgtaatcccagcactttgggaggccaaggcgggtggatcacctgaggtcaggagttcgagaccancctgaccaacatggtgaaaccctgtctctactaaaaatacaaaaattagccaagnaggnggtatnncngnnataccacctgcntngangctgaggcaggagaagtgcttgaacccgggaggtggaggttgcagtgagccgagattgcgccattgcactccagcctgggcaacgaanaaaanancacc

SEQ ID NO: 695931 - DNA, 839 bp, Homo sapiens
taatcagtctcctgggtgtctactaattaaatcttattcctgcttgctttcttgtagtcatcaaatggatataggatgtacaattttctctcaggatccaggtcttcctaagcacatgaagaatgcgtgaactcttacccaagcaacccaggcccatccctatgtgagaccatctctcctatactaggtctgcattctcatacaacgactactgagatcacttcctacagagattgccaatatggcacgtctacatcaccctgttttgcctctactatacatgttgactctctcaactgcagacccgctcacagattcctgtcggccagtacaagagtatacagcaagaacagctctctccacgtctcatagtaccttagctcacataccaccaagaaccagctgccattactttaccgtctccctagtaccgacagcagccagcttcaactcctggttgacacggcgcatgcgaccggcataatcctccttgtcaggcaatcacctctctctcgtacacctcgagtcactcttgcgcctcagggcacactctccttccccctctgtagagtatcctctctaagcatcggctgctggaactagccgttcgcctctactgacctttttactgcctcccacttctctaaatcgcgctcaaacctggtccaacccaagccttttatatccccagaataacacacgacttaaacactattgtttctcaccaaccccttgccatccttccactcccaagcatctttctgccaagcatctccgcttggtgttccctcctcatcctcgcctaaatttccctacttcacgtagctcaacgctccccc

SEQ ID NO: 695932 - DNA, 356 bp, Homo sapiens
  misc_feature (52)..(52): n is a, c, g, or t
  misc_feature (353)..(353): n is a, c, g, or t
atggagtcccgctctgtcgcccagggtggagtacagtggtgcgatcttggcncactgcaacctccacatcctgggttcaagcgattctcctgtctcagcctcctgagtagctgggactacaggcagcaccaccatgcccagccactttttgtacatttagttgagacagggttttaccaagttggtcaggatggtcttgaactcctgacctaggtgatccacccacctcagattcccaaagtgctgggattataggcgtgacacctaaagtctggccagtgctgcacagtattaatgttccttattttacagattacatcattaaggtctcaaggggtaagtacaaaaagctnagg

SEQ ID NO: 695933 - DNA, 375 bp, Homo sapiens
tttaaaaatcaaactctactaaagtatataaaacaggccaggtgtggctcacgcctgtaattctagcactttgggagaccgagacgagaggattgcttgagcccaggagttcaagaccagcccgggcaacaaagcgagattctgtcttgagaaaaaatttaaaaactagccaggcatggtggtgtgccagccacttgggaggctgaggtgggaagatcccttgagcccaggagtttgaggttgccgtgagctatgatcacaccactgcactccctccagcctgggtgatagagggagaccctgcctccaaaatatatgtatctacacacatctttctaagaacgaaccggacgcgtgggctagttctagatcgcg

SEQ ID NO: 695934 - DNA, 351 bp, Homo sapiens
cgcacagcacggagagggaagagggctactaagtatgattcccaagtcaggagacacgatagacagctgtcctgattgagacatacccggccaaaacgcatgaaataaagaaacatagaataagaaaacatagaatgcccaccccacatcacaccctgacctaaccaaatagagaaataaaacggctctttaaggtcagggcatgacagtaccccccccccaaaaggtatggactccggccacaaaagctgaacctgtaggagagggtctgggtgggcatgtatccgcggtggcaggacgtagaacccgctccacctctggctcaccccaccttctccggtggcgtggtgc

SEQ ID NO: 695935 - DNA, 532 bp, Homo sapiens
gggccccatattgtgtttggggttccccccccccattttgggccccaagagtgcctttttcccaccaaaccgggagggggcctgtggttttccttttaccctgggagccccggagaggggggcccccttccccccccctttttttttttttgggcccgggaaaagttaaaccccccgggtttttcctgggttattttttttggggggtttgggggggggggaaacccaaatgggatttggggggggggggacccttttggattcccccccctgggggtaggggccgggggggggggccccccttttttcccaaaattcccccgggggtttttttggggggggggggccggggggtttttaaagggttttttaaaagaaagggccggggttggtaatttttgggcccccctttcccccccagggggggggacccccccccccccccttttttttttttttaaggggttttgggttttttaaatttgggcccccaaggcccctttttttttccaaaaaaaattgggaaggccca

SEQ ID NO: 695936 - DNA, 249 bp, Homo sapiens
attcgcggccgcgtcgaccgggcccgtcgaccttcttaaaataataatttgccctcactcctcctactttaccacctgacagttatttttatgaacagatattcaattttgtcagataattattttctgcatctaaaaagttatcatatgccttctcttttttagaatattgatatgggaaattattttgtttaattttgagtgatgaaccagtcttgcgtcgacgcggccgcgaatttagtagtagta

SEQ ID NO: 695937 - DNA, 886 bp, Homo sapiens
ggttcgagagtcagaccgcatcttcttttgcgtcgccagccgagccacatcgctcagacagcatggggaaggtgaaggtcggagtcaacggattcggtcgtattggcgcgcctggtcagcagggctgcttttagctctgggtaaagtggatatggttgccatcaatgagcccttcattgacctcaacatacatggtttacatgttcgctaatatgattccactccggcatggcaaagttcctaggtggcacgcgtcgagaggcgtgagaagggagaagcattgtgatcatgtggaaatcctcatcacacatcttgcaggtagcgagatccctccataatagcaaagtggggcgatgctggcggctgagtacgtcgtggagtcctactggcgtcgttccaccaccatggagaaggctggggctcatttgcaggtgggagccaaaagggtcatcatctctgccccgcatctgctgatgcccccatgttcgtcatgggtgtgaaccatgagaagtatgataagacagcctctagatcatcgagcaatgcctcctgcatcagcaactgcattagcgaccctggccaaggtcatccatgacgaacgttggtatcgtggaaggacgtcatgaccacagttccatgccatcactggcacccagaatgactgtggattggcccctccgggaaactgtggcgtgatggcccgcggtggctctccaagaacatcatccctgcctctactgggcgcttgccaagggctgtggggcaaggtcatcccctgagctgaacgggaagctcactggcatggccttccgggtcccactgcaagtttctgtgtggactcgaactggcgtaaaaaaactgccaatttatgacactcacacgggtg

SEQ ID NO: 695938 - DNA, 274 bp, Homo sapiens
caaatcagatggtcagtcccaccagtagaatcacggggacagctctgtcttacccggagaatagtttcccccaaaagatatctccaaatgcctagcatacagtaggcaaggacccaaatattttagcatgtgatgttcttagatcatcatgtatgaaatagtatcttactctttagtcagacctcataaccttcatcgacatgagtcaccacaaaggaggaaatacagatattgcctatatgtatactaacgactatgtatactaaagaccttg

SEQ ID NO: 695939 - DNA, 168 bp, Homo sapiens
acagacaagaaatggacagactgaagaaagagaagagactcacgaatactatttctacaatgtccacatattgaagtacattcaccgtctgctcttctgctcccttaacacttgaacagatccattactgcgatctctttctagaggacggtgacccagatttctgtg

SEQ ID NO: 695940 - DNA, 173 bp, Homo sapiens
ggcccggtcagtacggatgtggcacgaacctgcatcctgcatctaagcacctatttccagtgcgtgacgctatctggaaactcacttgcgtgggtgcagatagctgccatagactattgtgatgctcatgcttgagttcccaaggaacgtgcttcccaggaaaggctcagtat

SEQ ID NO: 695941 - DNA, 169 bp, Homo sapiens
gggtgactctacaggatctatattacagccaggtcacttagccagaggctgtaaaaaagatatgctgggcctgggagaaatatgggattatagatgtgagccactgcacccagccaatttatttcacgtctaaagaccctttggccactattctttacagagcccaggg

SEQ ID NO: 695942 - DNA, 104 bp, Homo sapiens
aagaaaaaaaacatcaagttgtgccaaattattctcctatgttggctgctagaacatggttaccatgtctttctctctcactccttccttctttctctttcttt

SEQ ID NO: 695943 - DNA, 1145 bp, Homo sapiens
cgcagccgcgctcccaccaccgcacacccaccgcgccctcgggtcgcctcttctccgggagccagtccgcgccaccgcacgccgccacagccgcatcgaccacccgtccggcagccaatgatccaaccaggatccgtgatccatcggtccatccataccggcaggaatgatatcggacgggcccggggcaccgacgagccggccgagactccagcacggagcatacagtgacgtacgtccacacacgcaccatacagcactgggcaagcgcgcatgcgccccaagcaccagccggcagccatcatacgccatcggtccccggggcggcagtgtatgcacacagcagctccatcatgccgttgctgccatgcaggagacagcgtgcccaggggatgcggcatccatgcaaggactcggatggacttcatcagcatggccagacagccaatcaacacacgagattcacagacacacccggacgaccaacgacgacaggtggagctgcatggagctgaattgaccggcttcgcacaactaacatcagacaagcgtgcgcgttccctggagcaggcgcagaatacaggatcctagctgagccgaagctcgcagcagctcaatgggccaaggccacgtcacgcgcctgggggacctcatacgaggacggagatgcagggagactgcgcacggacagtgtggaccagataaccaacgacaaaagcccgacgtcgacggatgggacgcagcggcaaacacgcgacgaggacactccatggcgcctacgggcagaacatggcaggagacagaatgctccagacacagaggaaggccgagaacacaccggcagaccatacaaaccaggctgtgcccaaggcgatcacagggaccgtcatggacgctggacgcacaggggcaactaggcaaaacagaataggcacatgcgagcaaaacctccgaacagggaaccaccacgcaggacggcccaaaagggcaacgccggtccaagctgcggacgataccaagaccgacccaaggtaaacacgcaagaacaaaaaacagaagagagggagaccacaaccgggcgtaaaagagagacaccagaagaacaaccagagaaaaagacagcaagtaagaaaaaccacaagata

SEQ ID NO: 695944 - DNA, 115 bp, Homo sapiens
aactcaggggcgagctgcagtcactgtcaccaccactgtctttgtgcatcatcgccaactaatatttcactttacatccaaacatcactttggcttcgcagctcgcccctgagtt

SEQ ID NO: 695945 - DNA, 135 bp, Homo sapiens
caaacccttaacccctccccacatcaagcccgaatgagtatttcctattcgcctacacaatgctccgatccgtccctaacaaactaggaggcgttcttggccctattattatccatcctcatcctagcaaatagt

SEQ ID NO: 695946 - DNA, 390 bp, Homo sapiens
aaaacattccctcctttggccctacaggtcaaaatgggggcaacaaagcattgtcatttttcaggattgccctgtgggccctccctcccagttgaaactttaaaaaacaggaggggcccccagccccctcttccaattcaacaacattttataattgataactccctgagcctcaagacacctggggagggtttgttttatccccttcccccctcaggggatgatattttcaaaacccctccgagggtttgttcattccccttccaccctaaggtccaccctcaggggatgatattttcaagacccctcccaagggggtttggtcactccccttcccccctcagtggatgatattttgaagaaactaccgaagaataaattaataattta

SEQ ID NO: 695947 - DNA, 176 bp, Homo sapiens
actgcattctagcctgggcaccactgcattccagcccgggcaacagagtgagactctgtccaaaaaaaaaaaaggttaactttcaaaagggtatcgccaatagtggttaaataagggccttaagaacaagacctatttactggggcaacaggaggtaaaagtttccagcagctagg

SEQ ID NO: 695948 - DNA, 143 bp, Homo sapiens
gatgtagttagagatctgacatgagcaagatgatgatgcatggggtcgagtgtattaccactgcggtgcatgactcctgtacaagtttcgtcgacaagtgagcagcgtgctgatctccaaatattgttaagctgagagctggt

SEQ ID NO: 695949 - DNA, 212 bp, Homo sapiens
  misc_feature (59)..(59): n is a, c, g, or t
  misc_feature (70)..(70): n is a, c, g, or t
  misc_feature (111)..(111): n is a, c, g, or t
ccctttttttttttggctggcccccttgtgcggggtttaaccccggggcttgccccccncccccaagggngggcccaagggcccgggtgggccctgaagcccgtggctgcnctgaggctgtggccctgagactgcatcggaggcggcgccccgttttagggccgtggcctttgccgagactgtagcagagaaaacgtatttattattccaga

SEQ ID NO: 695950 - DNA, 386 bp, Homo sapiens
gggcccccgggggcacaccgttcccctgccaattccgggggacccgaggtggccggactcccaaggggccccccgggagaaccgctccaggggttttttaaaattggtgggggcggccttcggagccccggcggcgggcgggattgcatggtttgctttgaaagcgaagtgaatgccgcccttgtgccctggggacacaacctgttttgcatggagtgtgcagtacgatttggaagagggcggacccaaagtgtcccgtttgccccatcacagccacgcaagccatccgaatattttcctaagccccgggccccaagcctccggggccccctccactgggccccccctggacctgttttcccctaaagccttttggaaagcggtga

SEQ ID NO: 695951 - DNA, 321 bp, Homo sapiens
ctgagcccttgtatgcgctgctgctcgagtgacattgtaggagaaggaattcatctacacttgtggttgagattagtgggcactacttccttttcatgtgaccggcttggctcactcctctcaggggtccctcttgcctgaagttgttagcctaatcgagttgtcgtttatttccttcctgtaagatagtctttcatcgcgtctaagagctgtgtttagacgatcgtaccttcaacattatctaatgacgccttgtcgaagttgctgtggaatggattcgttttattccagttccccttaatagggtttaaataatttttc

SEQ ID NO: 695952 - DNA, 191 bp, Homo sapiens
  misc_feature (101)..(101): n is a, c, g, or t
  misc_feature (130)..(130): n is a, c, g, or t
  misc_feature (166)..(166): n is a, c, g, or t
cgtgtgggacccctgctgatcctgtcgcagatcgtgctcatgcagacgtgtattacggctcgctgggcctgtggtggcgctggtggacgggctagtgcganagcccctcgctggaccagatgttcgacgncgagatcctgggcttttccacccctccaggccggtnttcatgatgtcctcatctcaaggcc

SEQ ID NO: 695953 - DNA, 349 bp, Homo sapiens
gagccagtgccatcccgtccactctgagtcctgctgcatctgagcgatgtatttcgcagatttgtggacagagcagcagtgggtggccgtccatgcttctgggtgtccactagtattgtccctcgtgtgctcaatcttgtgatagtgggcgctgaggtatttgaagtgtaccaaagcggacttggcagagacagatgatgatggtgatgaccaggatctctaatgtgatcatataggtggtgagctatgaaccccgtgctgcatggtgtgaatagaagagcatccagaagaggcagaggatgggcgcggtcatcatctggtctactgcccccgagtacagtgagcaggt

SEQ ID NO: 695954 - DNA, 319 bp, Homo sapiens
cagatatgtacagtcaaatctaatatgcatgtctcttaattataagaaagacttatttttcagagaagggttcgctttttccagaaatatctattaacataaattatactttggtgcccattggctctaaccaaatcttatctcaaattattttgcaaggtgttcccgttctcattcatatggtctactaaagtagaccacaatacccaaacctaaatatttccataaaataatttggtgattcacatttttaccattaacagctacatttttaccgttgacagcttttatacctatagtttgagcaatctgctaaatg

SEQ ID NO: 695955 - DNA, 291 bp, Homo sapiens
cagggactggctagggagttggtagggtgtcaggctgttcaagacaacgggaaggatgttgaataactatctatccaggtgagtccgtgcacgatttcaggctctactacctccagcagctcccgtgctgagcctggggcttggtgggtctgggtcttcttcctcttctgggtcctttttaattctgtccacgtcaagagccaagccaaggtactgttccctccaagtgagtaaacagcacgtgcgtgtagggcaacggcggagattgaggggagaccctcatagagtcga

SEQ ID NO: 695956 - DNA, 251 bp, Homo sapiens
  misc_feature (39)..(39): n is a, c, g, or t
  misc_feature (49)..(49): n is a, c, g, or t
  misc_feature (77)..(77): n is a, c, g, or t
  misc_feature (112)..(112): n is a, c, g, or t
  misc_feature (124)..(124): n is a, c, g, or t
  misc_feature (131)..(132): n is a, c, g, or t
  misc_feature (138)..(138): n is a, c, g, or t
  misc_feature (152)..(152): n is a, c, g, or t
  misc_feature (158)..(158): n is a, c, g, or t
  misc_feature (182)..(182): n is a, c, g, or t
  misc_feature (192)..(192): n is a, c, g, or t
  misc_feature (200)..(200): n is a, c, g, or t
  misc_feature (203)..(203): n is a, c, g, or t
  misc_feature (227)..(227): n is a, c, g, or t
  misc_feature (242)..(242): n is a, c, g, or t
  misc_feature (248)..(248): n is a, c, g, or t
gagatgacgaagggaacgtcatcgtttggaaagcgtcgnaataagacgnacacgttgtgccgcacgctgtaggctcnaaggacctaccacctttcagaagtcgacctgtggnaaatgtggttanccttgannaagggnaagagaaagtatanctgggngtgccaaggttaaaaggggaaatnccaccggaantaggtcgnatnaggcacctaaaaattgtataccgnagattcaggcatggnttccgntga

SEQ ID NO: 695957 - DNA, 205 bp, Homo sapiens
  misc_feature (75)..(75): n is a, c, g, or t
  misc_feature (189)..(189): n is a, c, g, or t
tcaggtgcgagatagttttagaggtcagtagagtaggggggagacccctaagttgaagtagtaaaaaaatagcgngtagtaagttaggataatataaaataagttaaattaagaatggttatagttagaggttagtacagagtaagaactagcctaattaattcaatcctatagtagagagtaattganggagtatagctaagat

SEQ ID NO: 695958 - DNA, 684 bp, Homo sapiens
gctcggccggctgctgttacctgcgtcgcccggcagcatggacaggctgttggtttgtgagctccaggcaggatggcatcctctccagaatgaagatcttcttgccgatggtgctgctggctgcccttctgggtgtggagcgagccagctcgttgatgtgcttctcctgcttgtaatccgagagatgagcaatctgtactgcctagcacagccgatcactctgctcctgagccagtgacatgctactgcgtgactgttttctgttatgtgccggctttgggaattgtctcgtgacatttggccacatgcctggggcacgacctggttccccggtctgccccattccagaaggcgtcaagtgttgttgtggcttccattggtgcatcaggctgtcgtgcccaaggacggcgttattctcgtgtctagtttatccatgtgggctgcgtccggactagggtctgggaggcctgcccgtgcgccatatggacggttcgatccccttggcttggggttgaccgggggcctgccttgtcgttggagcccttgtctggctccgtggcccgcttgccttggtcggctctctggggtccctgaacgcggcgcaggaccccttgttcacctcgtagttcccccagtcgcaggggactgtgagtgtccccagagtccgtttctagtagtcccaca

SEQ ID NO: 695959 - DNA, 1144 bp, Homo sapiens
cttttcttctttctttttttctctttcttctttttttttgcttttcttctctttcttcttctcccttcttctctcttttgtttttctgtgctttctgctgctctctcttttctttctctgcgcgttttttttttgtgtcttctgcggtctccttcttgctttgtcgttttcttgtggcggctttgtgggcgccttgtttgttcttgttttcccggttgtgtctgaaccgcattgtctgtctcttggtttctgtggtccttgttttggctccgccagtttgtgttgttcctgttttcggacctttttatttttttgtttttcgcttgtttcattgcggcccctctgtgcatttctttgtttctccagcatcccctctacacttgttcagcatttagcctggccaacattgatggtagaactttttatatttcaaacttattgtatcttccgtacgatatggtcttattcccgctcgatatgacgtggtccggcctaacgtatggttacgtccatgcctgcctcctggatgtcttggaggatcgccctcacaagccgttaaatggttgttaatagttcggacggtgattgccagtgaagatgattctgagtttccttgtgtccgtttcctcaggagacattagattctctatagcgcacttcttctctttaggagattctatttttctggatctttcaatagcacagctcgcgtagttgttcataccatattcttctaagttgcttgtgtgtctccatggcacgagcgacgatcggtttccagcgtgacgggtgcctggcccctcgtgtgcaaggttccgattgttattaagactgttacatagtttactatatatctactactatataatttattgagttatgacaagatgtatttgtggtagacattaacacttcttacgcaatgctctcctagagctgttgttactagcctggactgctaccatttcacagtcttggaggcgaacgctcgtgaattcagattggttcgttctgtactgttactgtgccctgactctagggcagctgtcccttgcattgcctgcagggccatggctcagggtggtctcttcttgggcccagtgcatggtggccagaggtgtcacaaacaccggcagtgacgatt

SEQ ID NO: 695960 - DNA, 1335 bp, Homo sapiens
ggagagagagagaactagtctcgagtttttattttttttttatacagaaagccagtcggagttaatggttccattggcccaaaaatacaccttgggggacctcaaattctttccaaaaatcactaccagcagcatattgatttggaagcatttcgaccacccagttcacaccatccagtttcctcgcaggaacgttcaagaataaaaagtggccagtcgtgcccccattcgtgggctccttcggtcatagtggcgtggtctcttcgtttctccagaggggcttgacagatctcgtgatgtggtgaagtgagtggggtgcgccaatctcccaggccattgtgggcccctctgtggcaaggggcgtgggaaatccacattgcagtggccaccaggcaactgaagaattatgtggttctcacggggacacgatctattacatacgagaaaggggtctctctagatcatgtgtgtgtgtctccccacacgaccaacacgttcgggagaattttggggggagcccaccgcgaaaagtgtacagatccatgacgagctttgctccttacgaacactgactctgctgttcctttaccagcgacgaaagaaagctttccacaagtggggtgtgtgtgtggggtgccaaggaaacagtggtaactttgatgaggggctccttcgaatgtcctataggagttagtgcgacgctcgatggacgcacctgtattagtaagcactctacgtgggggagaaatcttcgcaggagtgtacttctacttagaagtggggggagtctcagtggggaaataatctctattaaactgtggagaaggtggtgtttgaaacccccacttttcaccacagcgggggcattgtggtgggtacaaaacaaggcgggcggcaaatcgtgggaacaacacgccacacaggggcggggcatcatacccccctatcaactagtggtcggacccagaagtagagccactaacagtccccagtcagtggtcggcgacgacgaagatggacccctgcatggaggcacgagaacaacgtcggccaaacctgccagaatgaaggggacaaacaccgctatgtgcatatcggccaaggaagacaagcgaggtgggagaacaaaaacacgggcggcacaccacaacccagcaggcggacaaaaaagacggcgaggaatgaaagctacacgccagcttggtcggagctaaccaacgagacgcacaaccgatggacacacgcagcaaacaaacacgcccagtctgacagacagagagcaacacacataaacgactccagcacatgtcacccgccggtaggaacacacgggtt

SEQ ID NO: 695961 - DNA, 1392 bp, Homo sapiens
  misc_feature (422)..(422): n is a, c, g, or t
gattgtgctcatccctccagcttcacatgtcaatagcgctatagacgtcctcattggacgacttctgcgagtagacagactgattctgcatgtaatgccgacgtcagtcgaaagaacgagagaaagccggccctgagtgaatattcgaatgaagaaagacgaaatctctcgtgcaatagaggtcacgatatagaacagaaggggctaccctggcatgatagtgcgagtaggcgtgcatgatatgcatatccatccaaagtgtccgttctaaaaactagtacaacgccatactatacctaatcataggattcactctttgcgtgccaacgaaacctcaatagtttggtatcactaggtaccctattgcttccctacctaggcgcaataagcgcatttgaccacgtcggcttgggactttgtanaacacttgactttcgatgttacccgctattaggaaacaggtcgcattccaactttagcggtcttagggagaacctgtcatgaagcacctagcctagtgtggggcattactattggtccttggttaaactggggtagactaagttccaggtacaatccctccaggtttggtattagagattaaaccccacttttctgggaataacgaagagagcttttggtggtaggcctaattatagtccaacgtttccaatggatggaactttacgatttcaatgcaaacaacatgggcggctgcttacggaccgtctaatttttacctggattagcaatatagcccccattttaggggttagttccatgttcgaacctcagtgttgttcgaggactccatgtacctatggtgggaggtttatcacgattagctcacggcttttagaaagttaaccctgtgagagctcttcccctgtacattgttaggttctaactccgcacccatgtttaccattggccctttgggcgacgtttacgaaaattatgcaaaacgcagacgtacacatcttatcctttcagggcccccatagggaactccataaaaagccatttttttcacgagtactcggtccttataaatctctgggcagtgctagtagcgccagcgtcagcaccttgccctaattagaaaatcgctcatctatcccgaacagccttagtgccttgaggtgcgccccctgtctggcaaccatccccgtcggcgtgtcgtctctctcaccactacctttgtctcttacccgaagttgaggcatcacctccagaaggtttggattaaccacttatcgtctcacgctgggcagacgatccatccgcaactcagtcgttctagacacgtactatatgcccctccacaaagcggctgttttgttcacacgcgcgtttgaagcgtacgccgtagcctcgtgggactactcagac

SEQ ID NO: 695962 - DNA, 243 bp, Homo sapiens
caaatgtaaaagtaaagatgcaggaaaaatgaatggtgggtatcattacttcatgtatatcaagcacagcagtaaaacaaaaacccatgtatttaacttttttttaggattttggctttggtgattttttttttttttggaaactgtgcctaacttgcttgtgctgtaaaattatttcacgggaaaatacttggagatgagggctagcttggtgcagggtcttatgacatctccatgaacaat

SEQ ID NO: 695963 - DNA, 125 bp, Homo sapiens
ttgttttttgtgccttcttcgcataatggctcatttgggccacatcgccggttagcggggtgcaggcctcctagggcgaggagggtggatggccttacgggtgttagccctcttagcctgtgtct

SEQ ID NO: 695964 - DNA, 716 bp, Homo sapiens
agcggtctctgcctgcctccctccctcaccgaagggttagcggacacccatccttttctgcttggggagccgcaatcggatacattcacagcaacacataggagcagctggtctcattcttcaagcgttagtccgttcctcatagactcacgccctcaatatactttctcgtatacgtcattcttctatgtccctctttaaagtctgaactggacaccacagggacatacccacgatgaatgactggaagatggagacacatacatggaatgggatagctaggcgcagtgggaggtcatggaatttcaagattaatgaaaaccctctctcacgcaaaggcgagtaaatgaaaagaaaaaaaacagtaaaggtaaaaaccaaccagggcacaacgaccatagggatgagcacccgctgtacacacagaatagagaacattcccaagagacaacgagagaggagacccatacgcaaaaccacaacaactaaataaccacggcgcccaacaaggacaaagcaaatgaaaaacaaaccaccaaaacagaaccgaaacaacgacataaacaaaacaaccacaagcacagcaacaacacacagcaaagcacaaccgaaaatcagcacacaacacaaaccgccaccaacacacagaagaccaacaacacaaaagcaccacagaacagcacaaacaacaacaaacacacgcacaaccgagccga

SEQ ID NO: 695965 - DNA, 327 bp, Homo sapiens
gcactgattttgtttttcactattccttgcatttgcataatgaaggccgggtgtggtggctcatgcctgtaatcccagcactttggaaaggcccagtgggcggattcgcctgaggtcaggagtttgagaccagcctggtcaacatggggaaaccccatctctactaaaaatacaaaaattagccgggcgtggtggcgggcgcctgtaatcccagctacttgggaggcggaggcaggagaatcacttgactgcaggctgaggttgcagtgagccaaaatagtggcattgcactccagcctgggcaacaggagcgaaactctgtctcca

SEQ ID NO: 695966 - DNA, 891 bp, Homo sapiens
  misc_feature (405)..(405): n is a, c, g, or t
tggaaaaagtcatggaggccagggggtgggcttgaacccagcttgggggggttcgatccctccctttttggtctaaatttaatgtatacgggtcctccgaatggtggtggataggggtggggggccactccattaatagctcccctccgaggtttatagtgggagggtttcttctctacttatttagggaacttttctcgcttctcgaaagcgaaaggtcttctcctcaaatcttatttaaaatttattaattagtatacgtgcgtgtatagagaaaagtgaatgtggaccccataccagaatgtggatatagaggatgtgtttccatgtgtgtggggtgtatatgtgccatctgcggggtatacgctctccggagtatacagcgtctgcggggccatctcccgngaaatatagcgccccgcagacacagtgtgtgtctgtggtgtggcaaaaacagacgtctatacgaattttatacgccgcgaagtaagattattgatatgcgcgtgacagtgtgggattttgtgggcggccggatagggttgtgggcgcttcataagggggggtgtatacgcccccgtggagcaccatgtgggggcggaaacactccacgcgtggaaatgtgtaacgccccctcctatatgtgtgatgtggggccgaaataatcaccagggctcttcccatatgtggtgtatctgcggcacccatctgaggtggtgggcacaccgcgtggaacggccctaaccaaccgtgttagctaccgggtgtcttccggtgtgtagcacacccgaaagtgtttctatacaggggtggaaccgacaaggggtgttgtgcgcctaacctacccaaaggttgccccaggtcttgggaggccccccccctttccggggg

SEQ ID NO: 695967 - DNA, 102 bp, Homo sapiens
gcaggattggataagcctgcattaatacaaccttctctccattcacttcctatttacaattaggaagcaaccttttggttaatacatatattttaataccaa

SEQ ID NO: 695968 - DNA, 230 bp, Homo sapiens
gtcaatgtggagcaaggaagaaagcaggcccagatcatggcctaccgcaacagaaaaggctgaacaccataaatcaagcagacaggagaggccagatgccgttctggcgaccgccaacgctaatagctgaagcatatacgaatcctggctgccgctctgacacaccataatggagatgcaacagcttcactgactgtggccgagcagtatgtcagcgcgttctccaaact

SEQ ID NO: 695969 - DNA, 241 bp, Homo sapiens
ttattgtatttccagtagagacagggtttcgccatgctgaccaggctggccccaaactcccaacctcgggtgatccttccccctcagcctctcaaagtgttgggatcacaggtgctagctaccaagcccatgcccataattgtattctcatgtagagacagggattccgccatgctgaccaggctggccccaaactcccaacctcgggtgatccttccccctcagcctctcaaagtgtcgg

SEQ ID NO: 695970 - DNA, 284 bp, Homo sapiens
  misc_feature (13)..(13): n is a, c, g, or t
  misc_feature (79)..(79): n is a, c, g, or t
aggaccccagtgntgtcgggcaggctgcggcgtggctgatcgtgacgtattcgcgcacactgaaggcccccccatacgngcgggtaggggataacgaaggcacggtgaccgaggtgggcatgttcaacaccaccatccgcaccggtttgggcgaggtgttgacgctgtccaacttgatgatcaccgggtcggtgacgcgcaactattcacgggtggtgcagggtcaggggtacatctgcgatacggtgggcaccatcgggtttgacacgcccctgcgccagggg

SEQ ID NO: 695971 - DNA, 147 bp, Homo sapiens
cgcggtagctacagaacttctggagggagagcacactgccaatacccacttcatggaatacctgctccatacacatacaggaaaaggagtctagtcccagccgggacctcccgtgtccacagacaataacgcagacaactatggtaa

SEQ ID NO: 695972 - DNA, 1438 bp, Homo sapiens
gacacgcacgccgggacgtgccaggtttataacagggagagagcaagcagacgagtcttgaagctctgatagggatgcattgggatccatttccatcggtccttacagccgcatcgtaagacttccagacagccaagatggtgaagcagatcgagagcaaggagtgcttaccaggaagcctttgaacgctgcaggtgcataacaattgtagatagtatgaattcatcaggccaagatggtggtggagcctttgaaaaaagtgatacaaggcactatacattacatacccccatcttctgaagaaggtagtaccagagcgtgactaataccatatgaaggctacacatcgtggattggacgctcgcacagagactagtaagcatagcaggaaggttgtcgaagatccaaagagtgcaagtgccacaagacagttcacaagattctttccacagcacgggggaacaaaagaggtgtaggagattgacaagtgcactaggaagccccacataacaggcaaagaggctgtgacagccccaacccatttgactggaactatcaagtcatcaacgtccaagtagatagacacatggacaccacattattagacaccaaggacccaattcggacataattctaacacacacaatttgtataaaacttatacatcatatacacgtttatcacacacacaattttattaccacacttatgttgactaccacatataaaacaccaagatagcccatcttgcagatgaacaattacaacgaccacaatttaatgtgacaaaacaacaacttgtgggcttaaacagcacgaccaaaagaagcaaacgacacagacaggtcagacgcaaagaaacacaggatgatgacagagccgacgcagaccgagacaccagacagaagaacaacagacgataacagaacaacatacgatgaagaagcacgagcagccacaccaaagcaactcaacgagagcaaacagcgagcacaagaggagagaaaacacagagaaaaaacaaggagtgaacaaaaacaaagaaggtgcggggtaagaaattcacgacccacaaagtaccaaagcgaccagcggggaaacaagcgaagacgttattagcacaaaacacgcgaaaggagaaagaggagcacaccagagggacacactaaaagagacgaaccaggaagacgcaataaaaacaagaccccgacgcaggagaaacaaacaaagaagcaaagacaagcagaaacgaaccaagaaagagacagaagaagcaagaaggagacaagagcagtacagaagaagaagaaagacaaacagacaagcaaaaaaacgccaaacaggaatagcacagaccgagacgacaaagagcaagagaaaaagcacgaagacaacagacgaaaaggcacaagagacaacagcaacgaatcgacgaaaa

SEQ ID NO: 695973 - DNA, 213 bp, Homo sapiens
  misc_feature (155)..(155): n is a, c, g, or t
  misc_feature (179)..(179): n is a, c, g, or t
cagatgtagtagccaactcattgatgacaccaaaaagttgtcatcattagtgttttctagagaaagtctgtgtggattccctcatccttagaaaggaggaggagaaacacaagacctgtaaacatcagttgctttgggaacacacggaattctcnatcagatagttcagtataaaccangtaaaaagcgtatgtgttgaaaatactgaacgct

SEQ ID NO: 695974 - DNA, 796 bp, Homo sapiens
tggcttccttcggtatgggagccaggcctacatcccgaagcaatcatgttccaagggaccgtgcagtgggtatcgatctaggaggcagctactcttgtgtgggtgtttccagcacggaaaagtcgagatagtggccatgatcagggaaaccgaggccactccaagctatgtcgcctttaggggagcactgcacggtttgatcggtgatgccgcaaagaatcaagttgcaatgaagcccaccaacacagtttttgaatgccaaacgtctgattggacgcagcatttgatgatgctgtgtccagtcgtgatatgaaacattgggcctttatggccggtgaatgatgctggcaggcccaacggtccaagtagaatacaagggagagaccaaaagcttctatccagaggaggtgtcttctatggttctgacaaagatgaaggaaggatggcagaagcctaccttgggaagactgttaccagtgctgtggtcacagtgccagttactttagtgactctcagcgtcaggctaccatagatgctggaactatgctggtctcaaatgtactgagaattattaatgagcccagctgctgcgtgctatgcttacggttacgaacaaaaaggctggaagccggaaagagacgtgcacatctttgaactgggagggtgcacttctggttgtggcagcctcactaatggaggcagggatccttgacaggtaacagtttacagtgggaaaccccttggtgggggaacttttccacgggaggaccctgaagggaagaaaggcacttaaagg

SEQ ID NO: 695975 - DNA, 1337 bp, Homo sapiens
agcgtggtggcgagaccgctaccggtgcaaccagcgcgggttttacggaacttgggggtcgtgcagatctgtctggactctagtgtccagtggagtctcagtgatggtctgagcctggcctgcgccgaggttggggtgtcccagaagagccaggaatcgaaatgcttcatggaacaaccgaccctggccttcaagttccgccatggagctcatagttgcagctgactccagggactacagcgagttgcttacattgcctcccagacggtgaagaaggtgatagagatcaagcccatacctgctaggcaccatggctgggggcgcagcgggattgcagctaactgggaacgggctgttggatcgggaaaatgtcgaactctatgagcttcgaaataagcgaagcggcattgtctgtagcagctagacttccaaattgtttgcccaacatggtagtactccaagtaccaataggccatgggggcttgtcccatggggcacccgtggatcttgtgggcgtggggatacatgcaggaaggcccttggccttcttacttactgttgggacaggtgacaggggacaccgggatttccagggggccaaccattctcgtgccaggttcgtggctcatgtgtatgccatatgcgggtccatgggactcgggggcactattgcctatgaacctgcgcagttgtgagcaaggcctaatgatctgtggcccggtcagagccattttacccagggcacagcgtataagaagattgcctaactccagggaggagggcagggacaaacctcctaaccaaaagttgcgggaacaggaataagatagaagcaccagagattaccacgtgttggcacataggagcggagaagaccaaagagtggagcaaaagaacaggggcaggacacacaccctcgacacaaataggtggaaaatcaaccatgagagagagtaccacaggagatcaacagcaacaacaggaagatgattgtcggacagaagcgaacaccaccgccgcaccgcacaaaataaaatgagggacgagacggcacacaacacgagcaacgaccaagtcacccaacaatactcgtacgaagaagaaacacaaattagttagtaacacgacaacaacatacagccgccgaccaggcaaaaagacattagatgatcataaacgagtaggctaaaaaaaaaagccaccacagtcactgatcagacataaagaaaaacaaacgaacagcagcatctactcatacaagcagaggtggtgagtagctacacaccagacacgcaaccaaaaataactagaaacagcaacacaaagaccaaatgagt

SEQ ID NO: 695976 - DNA, 338 bp, Homo sapiens
taaatttggaaagggagtctccctctgttgcccaggtgggagtgcaggggtacgatctcagctcatggcaacctcggtctcccaggttccagcgattctcctccctcagcctccggggttagcgtgggaccacaggcgcacgccaaagtgcccagctaattttggtattttaagtaaagacggggttcaccagtgctagccaggtgggtctcaaactcctgacctcaggcgatccaccgcgcctcagcctctcagagtgcggggaatacagatgtgagccatggcgccgggccctcgttcacacttttttaagtggacacctagctgaataatctcag

SEQ ID NO: 695977 - DNA, 307 bp, Homo sapiens
gcgcacacgcacaccagacatacacgagcaccagcacacaaacgcacagcacacgcacacacatgcacacacagcacactggcacacagcacacacacctaagacacagcacacacatgcgacacacagcacacacagcgcgaacaccgcacacacgaacacagcacacacagcacacacacaaagacagcacacacatgcacacagcacatgcacacacagcacacacataaacacagcacacagcacacaaaagcacagcacacgcacacacatgcacacacagcacactggcacacagcacaca

SEQ ID NO: 695978 - DNA, 302 bp, Homo sapiens
  misc_feature (35)..(35): n is a, c, g, or t
  misc_feature (51)..(51): n is a, c, g, or t
  misc_feature (235)..(235): n is a, c, g, or t
  misc_feature (255)..(255): n is a, c, g, or t
ttttgggggcagccccgggccccccccgagtgacnccaaaaccctggtttncttttacaaccccgtgggtgtgtgggaggccgggcgctttggggtttgtctgtcagggcaatcgtttagtgttttttcagtggggcggggcgggaaacgggtgggaccgggcaaccagttttcaaaggctgtggggccgattggaggccccagcccctcccccctaaacgttgccaaccaaaantgacgtgtgacctcctgggngttgatgccattaaaaccaacgttggggcccggtgaaaaaaaaaaaa

SEQ ID NO: 695979 - DNA, 314 bp, Homo sapiens
atcagtaggcagatatagagtcactgtcaactgtactcctggagacatcaactacactgtgttgctataaagatatttcggccgggacatggtggcgcacgcctatatcccagcactttgggaggccaaggtgggtagatcacttgagatcaggagttcgagaccagcctgaccaacgtggtgaaaccccatctctattaaaaatacaaaaattagccgggtgtcgtggcaggcacctgtaatcccagctgctccggaggctgacgcaagagaatcacttgaacccaggaggcggaggttgcagcgatgctcga

SEQ ID NO: 695980 - DNA, 1011 bp, Homo sapiens
tccttgtgtcaatcctttatttgggggtaaaaacagaaaccgggaaaatacccggtttttaaaatttccttgggtcccccctctcacatttggtgggaccccccttccccccaagacgctaactctggtcacaaacctcaaattatttaaaaatttacaggcacgccaaaacaaaagcgcatggggggaaaaaaaacacaacaaacacaaaacaccaaggagtggagaaagaggtatacccgtgggccccagatagtgtgtctccacttgggcgtgtgtggacaccaactgtgagagggtggtgtacacaccgcggagagcctttgcgtgtgttctcgtgtgttttatcttctttctctcttctctctctctccttttctctctctctcgagagagagagggtgactctcgtgagagagtatcacccgtggtgtgtgtgtctccccagtcttctcgagtgaagaggcgtgtgctctccaaattgcggcgtggagcctgtagagagcgacatattgtgagacacacacactgtgtggccccacagagagacacaccacggcggctctgtgaaattcttactccactctctctctcccgcgtgatcgcactgttccccccacagaggggggccccagtgagcgagatacacttttacaccgtgtgtgtccctctcaatctatttgtctctctgtcgtgagagacacacaagtctttgtgtgggcgcccccaccacgaactctgtggccctattgtgggcctctttctcttctcaaaaaccctctcttcagagaccatacttgtgggcgccaacaggagcggaagacgcgcgaaagagcaggaagacagacctctctactactctttcacagagcaaactctcccccaaaacaagcccgcagacacaaaacgtgagcggcgacgccaccgttgccccccccgtgcccacccgacgcgccccccctgccccggcctcgtgccaaccagcagaagacgggcgtccactgcacacct

SEQ ID NO: 695981 - DNA, 662 bp, Homo sapiens
ggaatcattgagattgtatatgccctgagtattaaagctaggcttagcaaaatacttttagaaacatatggtaaatgatacccataaaattaaattagttatattttattttaacaatgcgagaatacattgatatttattgaactcattggatcctagggacagggacagatatggtgaacctgacttgtggcagatggtaaggaatatcataaaacatttggatgagaacaatcagggcgaactgcatcttttctgttccacactggtaatcatttgaacacattgatttacctcagtgttgaacagttattggtcttgttttgtgtttctaaataataactaattgtctgagcactgtatagagatgctagtattttggtggggggaggtggtgggggagatcatcacttcaccaactgcagtgcagtttgtgtgtcttaaccctcagagaactctgcagtttttagggtacttgaggctgacttaactagaagttttagaagtaagccttttttccatggtaaactatttctgtgaatactaccaattggacattagaacacgtagacgtacttcgtctgaatccgaattcctatttgtagtttatacagtatttctcagctgtgatcttttggagcaaaagccaacggcaggcaaaa

SEQ ID NO: 695982 - DNA, 87 bp, Homo sapiens
  misc_feature (51)..(51): n is a, c, g, or t
tgttccatgaccttcattgatcagtttaaagcacttcaccagtgtaacaantattggggagtggggggactaaaataccttcaaaac

SEQ ID NO: 695983 - DNA, 197 bp, Homo sapiens
gatcgagctcggtaccgatcagcacgatcccaggggctcctccgtctgaaattcagcacgcatattgaatcctccacgtcctctatggacaccacctcgtgttaaactggttcttgccactcttatttttattgcttgtctttgagtcagtgttctgtgtctttgctggtgaaatagccttcttggtttattccgta

SEQ ID NO: 695984 - DNA, 1621 bp, Homo sapiens
cagcagatagaatcgagccggtaccccactctagtcaagaagctctcatagagatttatttagtgtgagaaatatgagaacaatagttgtaaagaacaaatcaataacccgcagtgtgcattttggaaaaccaaataacttcttcaaatttctgagtacacagagggtacctgccttgaaatttaaatgtctaaggaaaatgggagatgattaagagttggtgtggcctagtcacaccaaaatgtatttattacatcctgctcctttctagttgacaggaaagaaagctgctgtggggaaaggagggataaatactgaagggatttactaaacaaatgtccatcacagagttttccttttttttttttttttttttttttttttttttttgagacagagtcttgctctgtcacccaggctggaatgaagtggtatgatctcagttgaatgcaacctccacctcctaggttcaagcgattctcatgcctcagcctcctgagcagctgggactataggcgcatgctaccatgccaggctaatttttatatttttattagagacggggtgttgccatgttggccaggcaggtctcgaactcctggcctcagatgatctgcccaccgtagcctcccaaagtgctgggattacaggtatgagccactccacccagcccagagttttcatttgttccttaaaataattaagctggaaaggcaaggacaattatgagcacaactgtagtcaagttgagaagacctcaaaaaagtcaagtttagaccttcggattttccatagaagagaaaaagatactaggttttagggtacagagagccagatctgaagagtagctgcagggggaaggtgctgttagaaggaggatatagacacattctctggggggaacatatggtgactgacccatgcacacaaagggggccttagcgaaactgcagaggactgatccttaaaccaatcacatctttgccaatctctgtcactgtggtgaccctgcagatttgacctttgaactcaggggaatagcaggccccactgagtggacacttttctactggctttccacggtagatgggccgatatgatgcagcacaaatgtcaaaggggttgtgcatgtcataattgagctggtaggcatctgtgggattcttctcacaggcagacaggatttttcgggtctgttgggccacctcaggcttgggcccgagttctagtaggcgccgagcaaaggtggcagctgtcttgaagttcttgagcttgaagaacagattgagggctgtacgcagcaccaggatcatgtgcacaggctgcaggtttgagtgggtgaaataggctgccatctcacagatgcgcttctgctgttctagagtctctttgggcagcttcttcctttctgtctccacggacaaacccacaatgtactcacggcaaatggtgatgagctgctgggcctctgcaatctcttgtttattgtccacaacaagaagtggcacactgagaaggatggaacggaatttttccacagcctcctcaaatttgccaactgtggtgagctggtagcacagctgcaaccgttggatgaggtcattaagcttcaggcccacag

SEQ ID NO: 695985 - DNA, 531 bp, Homo sapiens
cagcagatagaatcgagccggtaccccactctagtcaagaagctctcatagagatttatttagtgtgagaaatatgagaacaatagttgtaaagaacaaatcaataacccgcagtgtgcattttggaaaaccaaataacttcttcaaatttctgagtacacagagggtacctgccttgaaatttaaatgtctaaggaaaatgggagatgattaagagttggtgtggcctagtcacaccaaaatgtatttattacatcctgctcctttctagttgacaggaaagaaagctgctgtggggaaaggagggataaatactgaagggatttactaaacaaatgtccatcacagagttttccttttttttttttttggaaaaaaagttttgttttgtccccaagtttgaaagaaggggttttaatctaagtggatgccaccctcaacttcttagtttaaggcatttttaatgcttaagctttttgagaggtgggatttttgggcccatcctcccttccgggtttattttttattttt

SEQ ID NO: 695986 - DNA, 805 bp, Homo sapiens
ggcggctccaggagagcaaggacacaaggaagcagagatgccccgagcagcactgtggtccactgctcctgctgctgctcctatcctgggcgtcccgggacgaagcagctccggaccaggatgaaatcgattgcctcccgggcctggccaagcagccctctttccggcagtactccggctatctcaaagcatcggattccaagcacttccactactggtttgtggaatcgcagaacgaccctaagaacagccccgtggtgctttggctcaatgggggtcctggctgcagctccctagatgggttacttacagagcacggtcccttcctgatccagccagatggtgtcaccctggagtacaacccctattcttggaacctgattgccaacatgctgtatatcgagtccccagctggggtgggcttctcctactcggatgacaagatgtatgtgaccaatgacacagaggtggctgagaacaattatcaagcccttaaagacttctaccacctctttccggagtacaaggacaacaaacttttcctgaccggagagagctatgctggcatctacatccccaccttggctgtactggtcatgcaggatcccagcatgaaccttcaggggctggctgtgggcaatggactctcctcctatgagcagaatgacaactccctggtctactttgcctactaccatggtcttctggggaacaggcttttggacttcactccagaacccactgctgttctcagaacagtgtaacttctatgacaacaaaagatccagattgtgtaaacaatctc

SEQ ID NO: 695987 - DNA, 124 bp, Homo sapiens
actcatgctcggtaccggtggcggccaaggaaataagcagctgatcgaggtctgccagcaggtgaactgcggcgcggaacaggtgctgccaggcctggtcagaccatgcaggacatcatgggcg

SEQ ID NO: 695988 - DNA, 270 bp, Homo sapiens
gaactctagaggacccagctattcaagtagctggatacaggcaccgcgacatgccagctaattttttgtatatctagcagagacgggttttttgcatgttggccaggctagtctcaaactccttgcttggcctcccaaaatgctgagactacaggcataagccaatacgccccgcccagctctgatttattgatatagggctgacatgaaatcttgacaagcaggctgagggcccctcctgtggactccaactctgacatggttgttttt

SEQ ID NO: 695989 - DNA, 1470 bp, Homo sapiens
  misc_feature (223)..(223): n is a, c, g, or t
  misc_feature (566)..(566): n is a, c, g, or t
  misc_feature (655)..(655): n is a, c, g, or t
  misc_feature (1470)..(1470): n is a, c, g, or t
tgggatcaaaaaatgttaattctggaattctttaattttaaaaaaatcatacctatgaagggtgtgtgctacgggaattctcaaattacaaataaggtggcattattaaaacccgaccctcattgggcctcattgtggtggttaaagcaaggattgagtgaaaaaagtgccccttcgaggagcaaaaacacgtcttccagcggggcaacctcgcgggacaccncagagttccgcgagagaacaatttctcccagcgtgtgacaccttctctgtggaaagagacaccaccacgcggcccaacgcgtgaagtgtgcagcgaagcgggaactgtggtctccgagcctctccgcgggctctccctcgaggagagaggaagaagtggagtttctccataacaagagtgtggagtgtggcccacaagatgtgccaggaaacgaggcggtgtgttcgcgtggagagccgtgtggtgggggagacacccttgtggggaaagaacacaccacacttctattctgtggcacttctcagcatcttctctatagccctgtctacaagtgtgatctccnaaacatagctgtgacactgtgtgcagcgcactgtgtatatattttgtgggggccacaaaaatgtactattaacaccgccccatgtgtgnaccgcggggaagcgcgaggggttcccccagtgagagtggggctctctacacaggacaaataagcacgaggacccagcagtggcgctgtatctctttgtaccccaagagtggcgcagaaagagaggcccatgtgtcggtgttctaacccatgtggggcacacaaaaacagccgcgcccccgagggttttgccccgtgtggggcccccagggggcaccccattattgtgctcgtgtgcaaccacgttcaaaacagaacccattccaggctcttgttggttggacaaaacgcccaaatgccccgaaagcagaagaaacctccaaagtggtggcaccgtggggggggggtcccccaaatttccaagaaaacccccggggggcgcaacgggggagagggctatcccaacaagggagcttcaaggtgacaacattggccgcggcgggtcgggaccagtgggaaaaaggggcccccccaaagaaagaccctcctcccgggggagaacacgtcggggcccatacaggggaagccgagggaagaacaacgagtggtgaggacaagcccccccgagatttgtgtcggcgtccgtaggcaagaaaaacaaacaccacggggggctctttgcttgaaacaaaacgcacccatgaacccactggaggcgggtagacacgagtaaactatataatgaggcagagaagtacccccacgtagagagaagaaggacgccctagcttctggttgtgagtaaacaaccacgcgagggagaaatcatcaaaagacaggagcagtactcgctcccccacagagaagagcaagatan

SEQ ID NO: 695990 - DNA, 326 bp, Homo sapiens
ggagtgcgcactatactgtgaggggtgaagaaacctctatcgttacaggcctggtactgtggcgctccgtgaaattagagctgttatcagaagtccactgaacttctgattcgcaaatcttcccttccagcgtctggtgcgagaaattgctcgtgactggaaaaacaatctgcgcttccagagcgcaacatatcggtgctattgcagggaggcaagtgaggcctatctggttggcctttatgaaagacaccaacctgtgtgctatccatgccaaaggtgtaaacaattatgccaaaagacatccagctagcacgccgaatacgtgg

SEQ ID NO: 695991 - DNA, 616 bp, Homo sapiens
aaaactaacaaagaattttcgtgtgcttagatccggatgaaacagagcaagaaactgacaacctgtgacatatgtccatactgcatacatgctgctagattgtcatcagtatatcaatataaaattaagaggtgcaacgttccacactttatgcggcatcacaaagataaaaacaagttatgaactgaggtataggggtacagtacacaaaggcaatactaagactaacttataaacagaatcatgaaaagaaaaatccatcccttctgatttcataacatgaaaagaaccggtgtagaagtacagcaatggtagcatcttcattcagcccacagctatgtaatttgtatgcaaaagtgcttgtcttaattatgaaaaggaacatcctgaattgctgaaagtatatacaacgggcacacatccagaactaggaaagaggtaccactcccgcatgctacgaagacttgggtcaaaaaatttttctcatgtttggtactataactaaagtctgtgctaaaataacctcaattgatcctgaggagatgaacttctggaacaaacaaaactgtaaagagtcacagcattagactctacctgtccagccatctttttaaaa

SEQ ID NO: 695992 - DNA, 186 bp, Homo sapiens
cggtacccaggtgactaaccaggtagacctactgaatatattgtgtgctcacacgataaaccctaggatagcatattgatatcatagctcagaccatacctatgtatccaaatggttcttttttttccggagtagtaagttacaatatgggagattattccgaagcctggtgttaggtctacctgg

SEQ ID NO: 695993 - DNA, 1179 bp, Homo sapiens
caggtttctgtatgccggaagacactcaatgacagataatgaaaaaatagagaccccaagagaaaaaagatgatcaatatccaacacataagacaaaaacatagaaaacaaaaaaaacatagaaaaaagcaaaacaagacaacatacacaaacaacaaaacaaagataagacaacaaaggtagagcgcggcgtcccagcacctcgtgtatgtccttccttctagatgtcagcatgcgggatgcgacaggggacatactgagggactaaactgacaggtcccctgagagttaccgagaatgtctgcagtccaggccccctcacaagtggatagaggaacacccagcgcgagtgtaccctcgagagacgccgccacagggtgcctccgagagctgcctctacaagaggcctccgaccaagggagaccttccatccttcctaccaaccgtgttatccatgccgcgagaagagacagctagatttccaacacgtacgctaaaaagcctgcgctacttcaggactttaagaactcacaggtctatacagaccatggtataaatgactgtcttcatgttgagttttattagcatgactgtagaccttttaagaatccattctcattgctgataatgctgcagccctgctggtttgggcttgcctcgaagattttattaaggcacgaagaagtgaaaaactaagggcttcattcaccatcaccaagtatatcgaaccatatacttgtttgccaaaacggatgacgacttacatcgaaatacttaccctctaatttgacatatcagacagctaaaaagaatgatcataaatgttacttcaccagtgatttactgcaatgccctaaattacgctaatgtattgcaagttcagcccgttcagaagaggtctaaagagaacttgaagactcacgacgaaactgcactaaataacaaatactcacaccagaactacaaagcataaagcaagcggaccacacacacataacaaaataaacgaagaaaacacctcaaacaaaagaaacaagaacacacaaggacaaacaaaaacgcacacaggaaacccgccgaaacccgtccacaaccacaaacagccaccacaacacacaaaaaagagcccgaacaacacaaaaccaaagacacaaacgacacacagacagaacaaactag

SEQ ID NO: 695994 - DNA, 418 bp, Homo sapiens
ctttacgtgcccgaagtgtggcacagaagtgcacagtgtgcagcccttgaaatccaggaattgaaatgtcagaagtaaatgctctttagaaaccaagttgtttcctctgagaaaagtgtattgtatccagttccttggaattagtcatcctcagtgtcatctgtaggtggcttttaacaggagtgtgctgtacagccactctcttcctttacaagcacaactcagttctaatcactggaaaccaaatgatactagaaaatcttataaatgttcatgtaatttttttagatcatctaatataatttttaatgtcaagaatactggaaattttttgtcagatgaatactaagaatgactaagaattcttcttcatagaaaaaggtcagactctaaaaataaaagatttttgaggctctgg

SEQ ID NO: 695995 - DNA, 745 bp, Homo sapiens
agcggtctcgccctcccagccgccgccgccgccacggccgtcctcggacctcctcctcctcctcctacttccacgcggcagtaggagcagcgtgaggacgacaaaaagatcgaagaagcagactgcagaaggacaagcaggatctatccggggccaggcaccggctgctgctgctggttgtgctggagaatctggtaggaagacaccatggtgaacggaagatgaggatcgacttgacatttgattagaatggggagtttaaatagagaagaagggggcgtgcgaaagaagagaccaggcaaggctgaaaggaggaaagcaaacaagctgaatgagtgaagaagggaagagccaacaagttgcatggaacaatctaataaaaaagatgaatgagagggaggagtgggaacgcgccaatctgatggggtcacagcgcaatgtattaagagcgcatgagatgaaaccagccctgtgggacgaggtagggatccgaaacaccgccggaggaaaacgaacgatccaagaacgttggtatagtaaccgtatccactgacagttagttgaatggaaaaagcagtagccttggacctgatgtgaacctttcccactcacacagtagagttccgtattagcatccaatggtccgaaagtgaaatccatgccagaggaagaggaattggaatagagagagtgcgggtagacagtagggatggctaaagcgcgaacacaacaggaacgttaacag

SEQ ID NO: 695996 - DNA, 89 bp, Homo sapiens
tttcccagatcccggaccaagtgctcaccttgctcttctgcctgctttcctgcctgctccccagtctccaacccgtaagggcccacctg

SEQ ID NO: 695997 - DNA, 225 bp, Homo sapiens
cacagtgcaattactgtttcattaattatcctcatcaaactagagtatgcaagtccaagcataatttcccatagaagaaacctttttacctttccttcaggtaatggaaaggtgcatggtcgagactttagataacatcactaaggttactagttttaccaatctgtgcccagggtaacaggtgatgattatgctgtgtaggacggtctgttccaagtcgaacac

SEQ ID NO: 695998 - DNA, 998 bp, Homo sapiens
gagtttcactcggttgccaggctggagtgcaatggcagcttactgcaacctccacctcctggttcaagcgattctcctgcctcagcctcccaagtagctgggattacaggcacgcgcaccacacctggctaattctatttagtagaaatggagtctcaccatgttggtcaggctggtctcgaactcctgacctcaggtgatccacccaccttggcctcccagcgtgctgggattataggcatgagccaccaggccggccccaggattttatattaagccttcttgctctcaaacaaaacaaaaaaggtttcaactattcccatttcccagatgaatcccatgagcgctgcttactggtcgaataccaaggtctagggctctgcttccggtagacacgcacacgtggtctccatccaatgggcctttcctgaagttaccagaaaacaccaacatggcgagggagtcctatgacagcacaggcaacggcacaccgtcggctagctccaggatagcaccgcgaagacaatggcgccggccactcggacacgtgtgcacatgccggctcctgccaaagcacggctactcactcacacgggtcgcgcacacccccatggccgacaggcccacccaccgaccccagccgccacaccacacacccaccccccccccacacaccccaccccggaacgcgcgcacgaagcagaggccgggccgacggaaagagcggccggaccagcccggcccgccgcggaccggcgacggagagacgcccaacgccaggcgcgcccaacgcctttgccatagacgcgagcgctagtggcacacgagggccgtcctacgagcgcactactgaagccagaagatctatcggtcgtatctcacgtccgctgcgacgaaccacgacgcggacatgtcgtagtccactccatcaaggaagacaccatgaatcgaaactgaccaagccgcgcagacacgcgagagcctacgccctccccacc

SEQ ID NO: 695999 - DNA, 238 bp, Homo sapiens
tagccaaacagtattaaagttactttgcatttattttatttgatttcttttcttttttttgtattatatatagggtgtttcgtttttgtggcccaggtggatttgcattggcaaaacctcggcccacggaaccccccgcccccgggttccaagcatttctcctggcctcagctccccaagttacctggaattatacgggaccccaccgcaagtccccggattattttgtgtatatttt

SEQ ID NO: 696000 - DNA, 160 bp, Homo sapiens
catttccttctttcctgttcctcaccctgataacacttggtttattgatggcagttccaccaggcctaatcgccactcaccagcaaagggaggctatgctatagtatctttcacatctatcattgaggctaccactctgaccccctccaccacctcttca

SEQ ID NO: 696001 - DNA, 441 bp, Homo sapiens
  misc_feature (359)..(359): n is a, c, g, or t
  misc_feature (364)..(364): n is a, c, g, or t
  misc_feature (441)..(441): n is a, c, g, or t
catgtttactctttggctcatagctccttcatcttaaagccagcatcaatgggtcaagttctgtgtagcattgtttttctgttagttgcatctctctctgactctgaccttttctctctaggtagatttaaagttttctgattggcaactggttgaaagagctattatctaaaggtctggaatcaaatagggtgaagccttcaggtagcaggcttcagagagaatagattgtaaatgtttctaaccatacctaaagagtctgttctgtcagtcttaaagtctctgtattgatatttgtgaggcatgtctgattcccacttcccatcatggcctgaactagtcattcaggataatctggngaggngagggtgcatcagccagtttgggggtttagaattttatctttggcttacatcttttacagatatttcatttggcatn

SEQ ID NO: 696002 - DNA, 407 bp, Homo sapiens
  misc_feature (135)..(135): n is a, c, g, or t
  misc_feature (176)..(176): n is a, c, g, or t
  misc_feature (202)..(202): n is a, c, g, or t
  misc_feature (348)..(348): n is a, c, g, or t
aaagtggggaatgggagaaagaagcaatcacccgcggatgattcctgaggattttacccccttcccaccctctcaattccctgaagaccccatccccttcccttttaaaatcccaactctggcccgggccattgngttgtcacgccctgtaatccccagcactttggaaggccaanacgggcagatcacgaggtcaagagancgagacccatccctggcccaatgtggtgaaaccccatccctaccaaaaatacaaaaattagccgggcgcggtggtgcacacctgtagtcccagccactcaggaggctggggcaggagaatcactagaagctgggaggcagaagttncagtagccgaggttgagccattgcattccagcctggcgaacagagcaaggctccttctc

SEQ ID NO: 696003 - DNA, 274 bp, Homo sapiens
  misc_feature (28)..(28): n is a, c, g, or t
  misc_feature (142)..(142): n is a, c, g, or t
  misc_feature (237)..(237): n is a, c, g, or t
tgcggggataatagccatgagccatggnacccagcctaaagcacgattctttttaaggccctctcttaattagcccagtcatccctcaaccttagcgaaggggccagtgcagagagaggtggccttcacagattcccccggncgggtacaaagctcaggggacacaaagatgatcggatacggcctggggccctctctgcggatctcaatcaggttgcggcatggttttcaccaggncctaagcatgtgagaggacagagagtcgtataaaaat

SEQ ID NO: 696004 - DNA, 104 bp, Homo sapiens
atggagttagcccaggagggggctggtgtgggagggtgaggaggttggggcagtagggtttttctggtgctgttgttcggaaagttggttagaggggtattaaa

SEQ ID NO: 696005 - DNA, 738 bp, Homo sapiens
agcgggttcttctcgtggttccagtggggagagaaggaggaagtagggagcggtggtggcatggagggggacccgccgcgtgctgactgtccaccgccgccaacaccgactctgctcgtggcgtgtggaaaggaggtgtgagtcccgggcgcgagccggcggcggtcgcctgtctgcagggagggtcgtgctggtgggaaggcgatggcgtgatttatgataaacatcaacgatcgacagcattatccagacggctgcgtggaagtgagagggtccaagcctggtaagaatgtccagcttcaggacaatgagatcagaggactgtgcttaaagtctcgtgaaatctttctcagatcagcgttatcctactagacacttgaagcaccactcaaaatatgtggtgacatccatggacaatactatgatttgctgcgaactttttgagtacggtggtttcccaccagaaagcaagctacctgttgcttggtggactatgtggaccggggaaacgcgagtcatgggagacgatctgcctcattactggcctacacaaataacagatatcctgagaatttgtcctactatctacagagggaaccatgaatgtgccagcatcaaacgagaatttatggattttatgatgactgtaaaagaagatacaacattacaatctatggaaagatttcacatgactgtctttaggctgtgtaccgatagcaggcatcgtggatgagaaga

SEQ ID NO: 696006 - DNA, 182 bp, Homo sapiens
gaggtttccgtaggcggagattgtcacgcctgtatccagcactttgggagtgcgaggtgggcggatcattaggtcaggagattgagaccatcctggctaagatggtgaaaccctgtctctactaaaagtacaaaaaattatccgggtgtgggggcatgcacctgattatcccaggctactca

SEQ ID NO: 696007 - DNA, 147 bp, Homo sapiens
  misc_feature (21)..(21): n is a, c, g, or t
  misc_feature (36)..(37): n is a, c, g, or t
tagaggatccccccaggtccnttagccacagcaccnntagggtgcacggaattaatattctttatgatcctacaatttgctgtgaatattctaatggtagtgcattgaatttttacttgtgtcataaatctgctaaacgtaaatgct

SEQ ID NO: 696008 - DNA, 442 bp, Homo sapiens
agagattggagacagcagttcaggggccagtgacgaggagccctgcgtagcttgaggaaaccggctgtaagagccccagtctctcaaggatagggagttgtccatctactgatggactgtaggctctaggatactacgatatcgcttagcgtcatgtttgtgacgcaagtttagtacgctgagattgtgagagaaattatgacgacttagcagtgttgcatgaggaaggctgagatacagggcctctagaacatgacggcggttgagacgaagttactttatggagtgagagatgcctttaaccgccgtgagaccggactgcagagctcggagttattaccaagggaagggcagtgcttttagatggaaatgaaggtgacttcagctataagtttgagttcagagtcgtaggggattgactgaatttgaaggcgaacttctc

SEQ ID NO: 696009 - DNA, 136 bp, Homo sapiens
tccagcctaaagagcaaactcaagtgaaggttgcggtgagcaaagatcgtgccactgacttgcagtgagattgcaccactgtactgcacttggagtgagccgagatcatgccactgcactccagcctaaaagagca

SEQ ID NO: 696010 - DNA, 165 bp, Homo sapiens
ttccccacacctttaaagctgacagtctgtccctgaacagtccttagtttcctgtctgcctttattttcagtctctgcgttatcagaatctcatcggtcttgcatgactctgccctgacctgtagcactcctactgtacctggtatcatcaagcctttattccca

SEQ ID NO: 696011 - DNA, 239 bp, Homo sapiens
aggcctgtggggcagggtcctgcctggagccatctttagtccagtggaccctggaggagtaagtgaccctatgcagtgacccgtctacttctatacggatgcagtgctaatgcggccgacccttgctctccttagaaatggtaagtggcatttacatacttggtctaaactataatcgagttggctgcttttctgtgtcagaatccatcatcctgcttccctgcctttgctggctatat

SEQ ID NO: 696012 - DNA, 444 bp, Homo sapiens
gtgatgaatggggattagatgtagcagcagtctggctgggatcaacgatgcctgggggacatcttgatctatggaccttctcagggcaagtgggaggctagcaaggtggctaggaaagaacagcataacttcagagtaagggtatagacttgggatgtgaggcagttatgctgaaaggttctgtcacagaggggatcagaggacagtggggaacttgggtgggttatctacgcctgtactgtctgcaggtcctgaaattagatgctgtcatagtcttagccgtgaggtcggttggaatgattctgggggcagaagctcagagccccttagtaggactggaggcggaccttctgctgacactgctcagacccctccactgcatgacgaagggtggaggaaattcccagaaaaatatggaccaggacttgaagaagtgtggcaggt

SEQ ID NO: 696013 - DNA, 745 bp, Homo sapiens
gtgcagctggaagatggcgggtccgtggtctgtcgggccgctaccgtcggggcataagtgctattgcggcgcccgtcggtcgcacggccctgctgcggacgctcagccttgcggtgagtacggtaagcttcgttcaggcgctcctagttcgtgccggagactgcgaggttagccgtagcatggcacgaatcgtgccatgcagatgtggcctctcagagcagtccgtcttccatgctcacattgcgactgggtggagtagtcgtgagattgatcgtgggcgagcgcagattggagagcacctgcagaagcaagtaatgagggccaggcgtactttttcggtagctatctgtggcgtttcgaaggcgaaacaaagtagagtcggacactgtgccatgcttgaccctgtggaggatacggacggtgagatgacgcatgagggagcctcactctttatattagcctactagtgaaccctgggtatgcatcgagcgagacttaactacgatcgaaggacgcatgtccaagggatctggcctgaaagctgttggaagctccctgggtcgacattgtcgcagaagctgtaggtctggaaggacctcacacgattgatgaacggacacgtgactgtgagtccttgcgggacgcatgtcaggagaatgattgcatctcatgcgcagactgtgggtctctaacttatcctgggatgccaccaggagtacgcagggacaccagcctgttaggccca

SEQ ID NO: 696014 - DNA, 313 bp, Homo sapiens
gggggggtaaaaaaaaaatttcccccggtttttaaaaaaaaaaaaaacccttttttttggttaaaaaaaaaaaaaaattcccccccaaaaaaaaaaaaaaatttttttttaaaggccccaaaaaggccccaaattaaaaccccccccccccccgggtttttaaggccccttcccctttcccaaaaaaggcccttttcccccccccaaaaattttttttttccccccccacggggggtttaattttttttttcggggggggtttggaccccaaaaaaacccctttttggggccaaaaaaaaaaaatttttttta

SEQ ID NO: 696015 - DNA, 356 bp, Homo sapiens
ctagttaggctaaaaatacccgcccccccaatgggtttgttttacaaacaaaggaaagcagggttagccggtataaacatgcagctggaaagctagaagatttaatgcttccaaaaccctgcttaaagggtgtcaaatggccatccaagatataaaacgttagccagcttatgggctcaattgcttgctcattactctttttgttttttacatacctaccccatacttgttttttaaggggcccttcgggtttgccagagttgggtccccccaagaaattaaggttggaggggcccctcctgccagtttttggcctgaaagacccttccccccctctccctgcccgccaacccata

SEQ ID NO: 696016 - DNA, 229 bp, Homo sapiens
actccctatgtgacttcccgtcgacatggtcgagctcttcggagagatccccatgcccttcaggaaatcccaggctgccacttaccagaaccgactgcgaaaaactcccgcaataccttcaccacttgcccgacgcatgggctacacactgcgcggtgccttacgatccgttctgacttggaaacaccctcccgaccgtcagctaaggtcccaaagttatggttaagtg

SEQ ID NO: 696017 - DNA, 173 bp, Homo sapiens
tatgaactccagaggatgaagaagagaaaaagaagcaggaagagaaaaaaacaaagttgagaacctctgcaaaatcatgaaagacatataggagaaaaaagttgaaaaggtggttgtgtcaaaccagataggtgacatctaccatgctgtattgtcacaagcacatagtggct

SEQ ID NO: 696018 - DNA, 176 bp, Homo sapiens
ggctgcacgtacagcatccggcttgtatgcattcatgggcgtgatcagatcagtcagttcacggttgcacccatgttgttggtgtcatcatcatagtcaatgcagcatagctcgaggggcaatcaggttcatgtgcattcaggcagtcaggagttcaggcatgcagatgggcaagc

SEQ ID NO: 696019 - DNA, 404 bp, Homo sapiens
  misc_feature (15)..(15): n is a, c, g, or t
  misc_feature (69)..(69): n is a, c, g, or t
  misc_feature (74)..(74): n is a, c, g, or t
  misc_feature (121)..(121): n is a, c, g, or t
  misc_feature (146)..(146): n is a, c, g, or t
  misc_feature (224)..(224): n is a, c, g, or t
  misc_feature (248)..(248): n is a, c, g, or t
  misc_feature (266)..(266): n is a, c, g, or t
  misc_feature (268)..(268): n is a, c, g, or t
  misc_feature (278)..(278): n is a, c, g, or t
  misc_feature (297)..(297): n is a, c, g, or t
ggctgaaaatgcctnacacattaccaacagtagagagggaaaacccctaagacagaggaactcccaganatgantgtctggaacgcttcagttccagctttaaagccccaggacgggcganacgtggctggcggcctcgttcccantggcggcacgtccttgggcgtctctaatgtctgcagctcaagggctggcacttttttaaatataaaaaagggtgttanttttaattttttttgtaaagtganttttggtcttctgttganantcggggtgancctgttctgcgctgtgtanaatgtgagatcggtgcgttctcctgatgttttgccgtggcttggggattgtacacgggtccaggctcacggtaattgcattgcctgtaacaatgtaataaaaagcct

SEQ ID NO: 696020 - DNA, 219 bp, Homo sapiens
ctgcacggtgaacttgctctcaagaaaactgaaaaatctagaattgtgtagccggtgaatggagcgtatctgccataattttgagaaaaacttggctgcgaaacggttctctctgactgctgcttgtgttctggaggctgtgtcttatgtatgggtttgtttaatgtgccctctttgaatattaatggcttttccaaagaataaaatattttggacaat

SEQ ID NO: 696021 - DNA, 979 bp, Homo sapiens
  misc_feature (43)..(43): n is a, c, g, or t
  misc_feature (111)..(111): n is a, c, g, or t
  misc_feature (166)..(166): n is a, c, g, or t
  misc_feature (172)..(172): n is a, c, g, or t
  misc_feature (182)..(182): n is a, c, g, or t
  misc_feature (210)..(210): n is a, c, g, or t
  misc_feature (220)..(220): n is a, c, g, or t
  misc_feature (226)..(227): n is a, c, g, or t
  misc_feature (258)..(258): n is a, c, g, or t
  misc_feature (260)..(261): n is a, c, g, or t
  misc_feature (263)..(267): n is a, c, g, or t
  misc_feature (269)..(269): n is a, c, g, or t
  misc_feature (272)..(272): n is a, c, g, or t
  misc_feature (277)..(278): n is a, c, g, or t
  misc_feature (321)..(321): n is a, c, g, or t
  misc_feature (344)..(344): n is a, c, g, or t
  misc_feature (357)..(357): n is a, c, g, or t
  misc_feature (359)..(359): n is a, c, g, or t
  misc_feature (363)..(363): n is a, c, g, or t
  misc_feature (375)..(377): n is a, c, g, or t
  misc_feature (379)..(379): n is a, c, g, or t
  misc_feature (381)..(381): n is a, c, g, or t
  misc_feature (392)..(392): n is a, c, g, or t
  misc_feature (406)..(406): n is a, c, g, or t
  misc_feature (411)..(411): n is a, c, g, or t
  misc_feature (421)..(421): n is a, c, g, or t
  misc_feature (457)..(457): n is a, c, g, or t
  misc_feature (466)..(466): n is a, c, g, or t
  misc_feature (488)..(489): n is a, c, g, or t
  misc_feature (529)..(529): n is a, c, g, or t
  misc_feature (536)..(537): n is a, c, g, or t
  misc_feature (564)..(564): n is a, c, g, or t
  misc_feature (907)..(907): n is a, c, g, or t
  misc_feature (978)..(978): n is a, c, g, or t
actacttaacatttactcatagataaaaatatttccaattttncaccttcaggaaggctccaaaatataaacactgtacctctccctagagaaaaaaaaaattattcttcncttcaaaaacaggaatacattcattttttctcactgtgtgaatcaagtaattatncaaatnaacatctganacattttcctttttaatatatttatatnatatatattncccccnnctttacaaataagggcaacgccttaataccnanntnnnnncnggnaaagnnaaagttaaaacacgatcagcaatcaggcatagtgcattttganaagctgctgcggagctggctggncacatcgggaaancnagtnctctggaccaannntnanccttctttganggggacgggatccnttttngccatacggnccctccatatgccgttgggccagagggattagcctnccgacaggntctggcggtgccaaggcttggnncggcctttgagaagcgtaagcttggttaaccggcgttttnggctggnnttgacaactgagtctagttctgcttgncgggggcagctttttactcagctttgtgcactttggggtgctcgctcggggtgtccgcctttctcagaccttggtttggttccctgcacagtcagtactaatggttaggcctagacacaggtgccagaagcccagggaactcctccctccctccggggcagctcagcttgtacaaggggcccattttcagttccttagtaagctaatcactacgaaagcctgagtagggaactacattctctttattcctccgaggcaggggtggggagcagacctgcggaaacctccccaaaccactaccggtgctatgccagtgcctgctacctccccatgttagcagaanctcggtctgactgctctctctcccgacgtctggtgagtcagtcgacaataaagcaaagggtggggtcctana

SEQ ID NO: 696022 - DNA, 897 bp, Homo sapiens
  misc_feature (3)..(3): n is a, c, g, or t
  misc_feature (169)..(172): n is a, c, g, or t
  misc_feature (208)..(208): n is a, c, g, or t
  misc_feature (234)..(234): n is a, c, g, or t
  misc_feature (263)..(263): n is a, c, g, or t
  misc_feature (284)..(284): n is a, c, g, or t
  misc_feature (311)..(311): n is a, c, g, or t
  misc_feature (314)..(315): n is a, c, g, or t
  misc_feature (318)..(318): n is a, c, g, or t
  misc_feature (322)..(322): n is a, c, g, or t
  misc_feature (343)..(343): n is a, c, g, or t
  misc_feature (375)..(375): n is a, c, g, or t
  misc_feature (396)..(396): n is a, c, g, or t
  misc_feature (400)..(400): n is a, c, g, or t
  misc_feature (405)..(405): n is a, c, g, or t
  misc_feature (410)..(411): n is a, c, g, or t
  misc_feature (417)..(417): n is a, c, g, or t
  misc_feature (421)..(421): n is a, c, g, or t
  misc_feature (431)..(431): n is a, c, g, or t
  misc_feature (495)..(495): n is a, c, g, or t
  misc_feature (499)..(499): n is a, c, g, or t
  misc_feature (501)..(501): n is a, c, g, or t
  misc_feature (517)..(517): n is a, c, g, or t
  misc_feature (522)..(522): n is a, c, g, or t
  misc_feature (542)..(542): n is a, c, g, or t
  misc_feature (544)..(545): n is a, c, g, or t
  misc_feature (557)..(557): n is a, c, g, or t
  misc_feature (562)..(562): n is a, c, g, or t
  misc_feature (569)..(569): n is a, c, g, or t
  misc_feature (617)..(617): n is a, c, g, or t
  misc_feature (680)..(680): n is a, c, g, or t
  misc_feature (683)..(683): n is a, c, g, or t
  misc_feature (796)..(796): n is a, c, g, or t
  misc_feature (801)..(801): n is a, c, g, or t
  misc_feature (836)..(836): n is a, c, g, or t
  misc_feature (896)..(896): n is a, c, g, or t
gcnctcaattattgctgatggggatgtaaatcagttgaaacactttgcaaaacttttggcattacctattaaagctaaacacaatcctaccctataacccaataattttcctcttaatatacccaagagcaaagagctgtgtatgtccaccaaattacatgtacaaaannnnccatagcagctttgttcataataatcccaaactggnaacaaactaaatgtccatcaaaaggngacaagatgaacaaattgttgtatatttncataatggtattactactatncacaaatgagaagggtgggttactaanatnngtnacanaggtgggtctcattatgtgangttcaagagcacaatctatggtgatgaaaatnagggtagagtttacctctggngggnggggnactgnncggggngggncaagaggggntattctggaatgatgaaaatgttctgtatcttgatttaacagtggtggtttccgggtatatttntgtnanagttttccagtattanttctnagatttgtgtgctttacttntnncttatatctgtntgttnaatcccnacaatgcattgataaaattgactaaatggccttaaaataaactttatngccaggcacagtggctcacacctgtaatcccagcaccaaagtgggcagatcacttgaggccangantttgagaccagcctggccaacatggcaaaaccttgtcactactaaaaatacaaaaattagtcaggtgtggtggtgcacaccagtaatcccgctgaggcaaaacaatcacttgngcctngagaggcggagactgcagtgagctgagatggcgcnactgcactccagcctgcatggcagagtgagactatgtctcaaaaaataaaataaattatnt

SEQ ID NO: 696023 - DNA, 342 bp, Homo sapiens
tacgacatgatagaatcgagctcggtaccgggtcttactctgtcatccagtgctgagtgagtggtgcaatcacggctcactgcatcctcaacatcttgggctcaagcaatcctcctgcctcagcctcctgagtagctgggactacaggtgtgtgccaccacgtctggctaatttttgtagagatggggttttggggttttgccatgttgcccaggctcaggctggtcttaatctcctgagttcaagtgatctgcctacctcagcctcccagggtgatgggattacaggcatgagccactgtgcccgactaacatgaacaattttttttttttttttttttgg

SEQ ID NO: 696024 - DNA, 357 bp, Homo sapiens
ggtcagtcttgtctctattttggttttggtgggttttggccagctccttcactgcaacctgttttatcagcaaggtctttatgactggtattttgtgctgaccttctatgtcatcctgtgacttagaatgccttaaccatcagggaatgcagcccagtagtttcagcctcatttttcccggctcctatttaagatggagttgcttctggttcacacacctctgacatgatcgttgcccactgcggcttccacctcccgggttcaggagaatgggatgagcccgggaggcgaagcttgcagtgggccgagatcgcgccactgcactccagcctgggtgacagagggagactccatctc

SEQ ID NO: 696025 - DNA, 254 bp, Homo sapiens
agtattgtgtaatatctattgtatggtgacagatggtaactacgacttgtggtagactcattttgaaatgtatagaaatatcaaaccactatgttgtgtacccgaaactaccatagcattgtaggtccattatgcttcaaagacaaacaaaatcatacaaaaagagatccggtttgtggtttccaaaggccgggaatgagggggccaggggaattggatataaggcatgtcaattatgtgcaaaatccccagtt

SEQ ID NO: 696026 - DNA, 1175 bp, Homo sapiens
  misc_feature (404)..(404): n is a, c, g, or t
  misc_feature (839)..(839): n is a, c, g, or t
  misc_feature (1106)..(1106): n is a, c, g, or t
  misc_feature (1175)..(1175): n is a, c, g, or t
gaagaccttggctgagggtctaggtggactgtctgatgatctgaacgacagcatgtacacagtgcattccccagcagtggctctccattcccagggctcaggtgcatggatcctaggggcgctgcactgtcgtaggcggggctggacgaacgctgatacgccgagtgccttgtggccgcagagacgaagccatcggcgcagtctatctgttctcggaggtgacatccctaacctatgtggctgcatcagatggcaccacgaaggaggttgtcccattctagtcacctgctggtatagtgccgagcagttcgatcccggcgatggagccagtggtgggccttgtgccgtgtcttgtgcttgtggcggcctctagacgatcggctgtcttgggaagtagtcggtcnctgttgctagcaagccgccgagggtgcagagggcgacatcgcacgtacttgaccactcattcccattcgtatgccttacttttcccccagctggtgggccctcaaatgttaacgctagggtagaggcgcttgagttagtcgcgaggtccatgccacttttcccacagaaggcatctaccccacaagggcatgccccccagagctttgcaccaattcgaaaggcaaagacgtacgtcacccaaaggatgtcgctaaaggtgtgcggacaggcaaacggcaaacgtattcccaggtttggcaccaaattccgggaagggcctgggggggcacaccttgggaagaatcgctttgtgggggaaccgaagggcgcgtttctcggaaattcgtggaacccttggggggtgggaggaaccgtgtggggcccttttcacaagnataccccgataggggaaaggctccgcttgggggggcaccgaacggaagaaaccaaatttcgttataccacgcttcgattgggcgcattggtcttgacagttagaggcacaacacgggcttcaccgagagaccaaaatacgcgattgggcgaagaaaccataggccgaagagacgaccattggggcgcccgaattggggggaaccgcccagtgggggcgccgctattcggtgtctcccaatattcccctagaggagaaccaccaggtngtcggacgtgtcgcgcaacacacatgtgtggccacacaatggggacccccaacaggggctggagaaggn

SEQ ID NO: 696027 - DNA, 695 bp, Homo sapiens
  misc_feature (10)..(10): n is a, c, g, or t
  misc_feature (14)..(14): n is a, c, g, or t
  misc_feature (25)..(26): n is a, c, g, or t
  misc_feature (36)..(36): n is a, c, g, or t
  misc_feature (46)..(46): n is a, c, g, or t
  misc_feature (57)..(57): n is a, c, g, or t
  misc_feature (63)..(63): n is a, c, g, or t
  misc_feature (68)..(69): n is a, c, g, or t
  misc_feature (74)..(74): n is a, c, g, or t
  misc_feature (87)..(87): n is a, c, g, or t
  misc_feature (114)..(114): n is a, c, g, or t
  misc_feature (141)..(141): n is a, c, g, or t
  misc_feature (164)..(164): n is a, c, g, or t
  misc_feature (200)..(200): n is a, c, g, or t
  misc_feature (211)..(211): n is a, c, g, or t
  misc_feature (217)..(217): n is a, c, g, or t
  misc_feature (219)..(219): n is a, c, g, or t
  misc_feature (225)..(225): n is a, c, g, or t
  misc_feature (228)..(228): n is a, c, g, or t
  misc_feature (237)..(237): n is a, c, g, or t
  misc_feature (240)..(240): n is a, c, g, or t
  misc_feature (243)..(245): n is a, c, g, or t
  misc_feature (247)..(248): n is a, c, g, or t
  misc_feature (255)..(257): n is a, c, g, or t
  misc_feature (259)..(259): n is a, c, g, or t
  misc_feature (284)..(284): n is a, c, g, or t
  misc_feature (286)..(286): n is a, c, g, or t
  misc_feature (379)..(379): n is a, c, g, or t
  misc_feature (389)..(389): n is a, c, g, or t
  misc_feature (401)..(401): n is a, c, g, or t
  misc_feature (404)..(404): n is a, c, g, or t
  misc_feature (467)..(467): n is a, c, g, or t
  misc_feature (469)..(469): n is a, c, g, or t
  misc_feature (471)..(471): n is a, c, g, or t
  misc_feature (473)..(473): n is a, c, g, or t
  misc_feature (477)..(477): n is a, c, g, or t
  misc_feature (482)..(482): n is a, c, g, or t
  misc_feature (498)..(498): n is a, c, g, or t
  misc_feature (504)..(504): n is a, c, g, or t
  misc_feature (507)..(507): n is a, c, g, or t
  misc_feature (554)..(554): n is a, c, g, or t
  misc_feature (560)..(560): n is a, c, g, or t
  misc_feature (570)..(570): n is a, c, g, or t
  misc_feature (572)..(572): n is a, c, g, or t
  misc_feature (593)..(593): n is a, c, g, or t
  misc_feature (597)..(597): n is a, c, g, or t
  misc_feature (599)..(599): n is a, c, g, or t
  misc_feature (617)..(618): n is a, c, g, or t
  misc_feature (626)..(626): n is a, c, g, or t
  misc_feature (632)..(632): n is a, c, g, or t
  misc_feature (692)..(692): n is a, c, g, or t
tcggcgggcntganagggaacctcnntgaccgagcncacgtctccncacggccaganaaatcnccggnncggcncgcatcgccagcncccagacccggaggaacggcccgagcncaggagaaccacatcttcgtcccagcnccggaggctcctgtgggcaagancgtgagccaacgggttcctgaggcccctcctggccnttgattttttnccctcncntttccnagnatgcctgcnttnggnnngnngtttacnnncntttgagtttgattgtttgggaacgnangactacacctttacactactttttgactgggtgaggtgacctattaggcacagtagacctattttttaacacttacgtattagacgacggcgnctttttttgncttgaccttganagncgtgacggacgaacagcagacgaccagacacacgagttttacctgacgtggactttggactancnanancctnttggntggggacggtcttggntactangangtttggccggtgtctttgacgttttggtggacctcgacctttgggancacccnggcgtactanancactgttactacgacgttganctananctttttggtgtttgttannacgtgggnttttanctttttgacgttgtacgtgacgtactgggtttggttttacactttttggttacacttaancta

SEQ ID NO: 696028 - DNA, 898 bp, Homo sapiens
gccatataatcagcggtatcggtgagcggggtgttatctcccgtgagtaaagggctcgtgacatctcaggtctcagcggtctcccatctggaactatataaagttcagaaaacatgtctcgaagatatgacttccaggaacactatattttctccagaaggtcgcttataccaagttgaatatgccatgaagctatggacatgcaggcacctgttgggacttttcagcacatgatggtgtttgctgtgcgcagagaagacgcaaatccacaagcttctggatgaaggctctttttttctgaaaaaatttataacctcaattgagggaccatgtttgcgtgtgccagggcataaccttctgatgctaatgtctgactaatgaactaaggctcattgtgctcacaaggttcttctactaccagtattcaggagccaaaatacctttgtgagccaggttgtgttacagccgcctgtgttgatcatcaaccaaggcttataccacaattgtgaggaaaaacgtcccttttgggtgtccatggctgtcacattgcttggaataaccactaatggcttccacgctcctatcacgagtgcgcccttagtgaacattacgggcgggattgacgggcccatggcatgggaaatactaggcgctgcagtgtgtccactgtgacacccaggctataagaggagaatgacttgaagtcagcacttgctttagcactcaacgtctaatagacctgttagtaactcttgtgaaatggcatgctctacgcactggagacgtgactgttccacaacagggcgtgccacactgcgaacacactcgggcacaaacacaaggtcaacctttctggcgctgaacccacgcgttggggaacacgccaaagggctccaca

SEQ ID NO: 696029 - DNA, 363 bp, Homo sapiens
gttaaaaggaagaaatttaaatgagaagagagatccaaaacaaaagagttttcaggaatgaatgtatgtgtgtgaatattagcagcagaggtctactgcctgtctacaatggcttgagaggagactgcagaaataaatggaaaccagaccatggccaggcatgcaagccacgttaagaaaaatgaacttaatttcaacagtgtaatggtgagccattaaaaaattttaaataggaaactgagatgaaggatttatatttccgaaagattgctctagctactgaatgtagcacagattatagagggcacatagtagtcactcactattagtaagaagtaatttataataaccattactgccaag

SEQ ID NO: 696030 - DNA, 936 bp, Homo sapiens
gcattttcaagtattaaaaatgatgagttttttaatcattttcaagtattaaaaagcattctctttacatcatcctataaaagagtgactcattcttaaggtgtttccctaggttgccacctgttgcaaaagcacattgtaatcagaggcttcctgtctacctctctcagctaagtttcctaaaatcagtatgtgcttcctaaatctctgccttagctactaacacaagctgtcttcagaaccaaagcagaggagtgttgtttgtgggagccttctggaggcctgcattacaaactcagtgccagtgcccactggtagataaggccccacatgtctcctatggagtagcagtgaaggctatagtgccagtcctgggtacgcttcagagcactaagtactcagctttaaagatgtctcgtgtggtactgggtggtttcgtgagcgcacactttgtgccaacagatagtaattatacagaactcccaaacatttggacctatctgttccctatgaagtaaaaacagaacaggttaggatttactttagagaaccagtttgaaatgtcattagtcaccaaataccttgccttaagatgtttcaagaaagtgtattttcttacgatttaattctgattttatttgcattatataagccgttgctattagtgctgggtgcacctggttggggggtcggtgacttatggtctgctatgggagcgttttggtactctcgaacaggtctggtctggacttgggactggaatgtgtcccttaacagggaaggccgccggtaatccggtcccggcgggcccggattatgtcctctttcccgttaatctttttgccgattcggttccgcacacttgtaccgcctctccgccgggcggggccctgggggccacgtgttgggggcaccctcgccgcccgccgttgtcga

SEQ ID NO: 696031 - DNA, 192 bp, Homo sapiens
tcttgtcagcacgagggaacgcaatggcgcggccaaacatcagtttcaataatggctgcttcaagcgcgggcccgcgctgctgacggatacgatgggggtgaagcagcagttttccacgtttggccacgagctagtgaggggcgcgattgccgacgccaccacccaggaaatctccaccgctatgaatggcc

SEQ ID NO: 696032 - DNA, 399 bp, Homo sapiens
aaagtaactaaaagccttcctttcccagtttttggcatccctacccctactgattaaacaagaataagagaacattttatcatcatctgctttattcccaaaaaagaagttgtgatgaataaatctgcttttatgcaaacccaaggaattaagtgggtttgtcattgtccttttccctccaagataatttattcccaaaggtaagataaatggaagactcttgaacttgtgaactgatgtgaaaagcagaatctcttttgagtctttgctgtttggaagattgaaaaaaattgttcagcatgggtgcccccccaaaagtaattttaagccctttaaatgtccccattgaaaccaactggggagttggttgctattgtaaaataaaaaaaactgttttta

SEQ ID NO: 696033 - DNA, 996 bp, Homo sapiens
gctagcgtcgttgaatcctttatagagatggaacagtctgtattctctgatgctcatactagatgagtaacagactccatactctgttgttaaaatccattcgagaagctcggacacgagcacctgtcacattgtaaaatagttattcgggacggtaggacacttctgatacgtgatgaggactttacgtggtatgggtataaaagaacgggctcatctcagtaaagttcttgagctctgtgaagcgtcatctccagaaaagtaaagaccgagattctacgaacgtattcctgtcttgctcgattgatattgtcacaatcacttcattacccgacgatttatgatgcctccagttgcattgttgtcgtcgccttagatgtttctcctatcgtacattgtctgcatgtcaatatggtaatgcttttattcccgtgactttcctgccagattctaatcacatgaggctctcctcgctgcaatgctttcttgctgaaacctgtgttctatcaaacgttgtctacctttggagatctcgtaagctcatgatggaggagccaattaccgcctctgtgaatccctcttgctccttcatcacagaagaatgtctcgttctacaatcatcgatcattacaaggcatggtgtaactccctagtaattttcaatgggcaagcctgctcagatcagggttcaccttgctattatcaatgtccccttaccaaaatccaatacgcatttgagcacctttagggacctatcctggaaattccctgaacgctatcacttgtatacacaaaggggctttggccccttttgaattccaacagagtgcttgctcactgaagatgctgggccaaattcagcagagacagaggccctgccagggagacatctacgcttgtcaccacctgtacacacgcaacgaccacaatccaatcccaaaccctgtctgagtcagctcgaaccctatcatcaagactaccagttcggtgcctaat

SEQ ID NO: 696034 - DNA, 189 bp, Homo sapiens
  misc_feature (13)..(13): n is a, c, g, or t
attcaccgtgagntatactatgtatgagcagcaatacagtattttggcacaacaaaccgataatggataaatccagaactacttttatcttctgatatcatagaaacaatgtccttgtcaacttctttaggggcatccattgcccagataaagtcccagtgattgtaaaaaggaatctccttgtgataa

SEQ ID NO: 696035 - DNA, 127 bp, Homo sapiens
aacgccgctgtgaccttccgcctgtggcctgtcaaggttctccctactgtcttcctgcagtcgtgctgtctccccgagtgcattcgcagacacggggccgcccacttcccctttgcgccattgcact

SEQ ID NO: 696036 - DNA, 327 bp, Homo sapiens
cctgtgatctatatagtctgtgtcactgcatctgctctccgcactgttatctcaccattgcctttgtccccgtgtagatgtcccttaagcccttattgagctggattctggtccaggcctcatctcttcctattgcctatctctctcatgctccccttgtttctgggatttcgtccttgtcctcgtgccaggtatgtcttactttggtgctggcaagtggtagttgtatgaagcttcctctctctctctgttcccctggcgcagaggcaccgtgtgagactgagagagagagagagagagagagagagagagagagagagagagagt

SEQ ID NO: 696037 - DNA, 132 bp, Homo sapiens
gagaccttaataacaaataggcgtattaaaattttcacattgacaatgatagacacatttgatgtaataaaacttggtaggcttgatattttaaggaatagaaacctagcaatcttattggagagacaagaa

SEQ ID NO: 696038 - DNA, 426 bp, Homo sapiens
aaaattaaagggggaaagagaaatattctagttatcagatgcagaagcaaaaagagcaaaaatgtgcaataagaacaagccaagtaactttagttaacgaaactggagattaacaatggaattacaggtttgtgaggctatagtggtgcaccacatttaaaaccaggcaggaaagagctatttatattgaaaggtggaatgagggcatttttactaaagcaaattaacttcttgtcaaactggcaaaacaaaaaaaaaatggagcatatgagtgttagtatactgaaggcatgttataccagtttctgtgcagcatgctaaaagttagaacttcttcactggtgcttatcaatcattactagtcacgtttttgccccttcttgccaaatttcaggcatgtcttattttagatggagtatagctttt

SEQ ID NO: 696039 - DNA, 480 bp, Homo sapiens
  misc_feature (14)..(14): n is a, c, g, or t
  misc_feature (40)..(40): n is a, c, g, or t
  misc_feature (113)..(113): n is a, c, g, or t
  misc_feature (144)..(144): n is a, c, g, or t
  misc_feature (159)..(159): n is a, c, g, or t
  misc_feature (273)..(273): n is a, c, g, or t
ccaaaaacaacacncccaaggcaggtggcaaactacagcntgtctgtttctggtaagtaaagttctccctttctgtcgtcttctcgcagccctttacgggttgcgagaagacnacagaaagccgagtgtgtataagagtcattncttttcaccagaaantacagaatttctggtaggctttttctgaatattgaaattgattataggtaggtgtggtgcctcagcctataatccccagcatttgggaggctgaaggtgtgtgaatcacttganccccaggagtttgagaccagcctgggcaacacagtgcctgtctctacaaaaagttcaaaaaattagctgggcatgatggtgcatgcctatagtcccagctactcggaaggctgaggtgggaggatcacctgagctggggaggtcaaggctgttgtgagccattatcgtgccattgtactcctgtttggtgacagataccttgtctcc

SEQ ID NO: 696040 - DNA, 131 bp, Homo sapiens
acccaaaggctttatttttatttttctcaaatatagaagtacctttttttcttttattatacaagtacatacttacggtcaagtcagtcaaatattacagtaaatttatcatgcggaaagaggagagtggg

SEQ ID NO: 696041 - DNA, 445 bp, Homo sapiens
  misc_feature (12)..(12): n is a, c, g, or t
aactgaagaatntattgtctcaaactggtgtgctgtttatggcctcttttggagaaggagaagagggtgaagaagaagaaaaaaaagttgactccagtggagaagctgagaagagagatttcagagctgctcttaggaaacaacatgcagctgaactccatctaggggattttttagtttttcttcgcagagttgtgtcttcaaaagcaattcaatcaaaaatggcttcccccaaatggacagaagtgcttctaaacatagcatctcagaagtgttcttcaggtattcctctagttggtaacttaagaacgaggcttcttgctcttcacgtccttgaggctgtgctaccagcttgtgaatctggtgtagaagatgaccaaatggcccaggttgttgaacgcttattttcccttctgtcggattgtatgtgggagactcccattgc

SEQ ID NO: 696042 - DNA, 334 bp, Homo sapiens
  misc_feature (27)..(27): n is a, c, g, or t
gatcagttgtaatcagaatacaactgngtcttgtagttgtaatatgttctatcttaaccaccactttcgtaccaggaacctgctcaggtttgttctctagaagctcccaacatagatagtctacatttcagactactaagttattaacaaaccctttgggcccatgttcactttagggttgagcatagtgtgaggagatgtaaattaaattataatcctatatgtgtgtgtaataaatattaaagtgtataaattaaacagcagattctaagtatccaacaagagtcaaataaatgatacaaagtcaccaaataaataatatttaatctcatct

SEQ ID NO: 696043 - DNA, 108 bp, Homo sapiens
gtcggccagctgcgacagccttagagcatcttatccgaagtacggatcggttgcgattcccttactacattgtccaacatgcagaggtgtcacttggagactgctgcg

SEQ ID NO: 696044 - DNA, 882 bp, Homo sapiens
tgtcctgctaccgggattaaaagggaagcttttgggggtcgcggcccgaatcattggggcggggggtccgcgtccccagggaaaggttgaaccgatttccgtcgccattcccgattccttcaggtgatccggcgttctgctcttaagcagaggtccaaatcacgcggaccttaaaaccccagtgggtgttgaccgggaccttaagctacctcggggtcaattcacgagggcggaggggtgagtggcgcgcagaacagtgtggggatcctgagcggtatcctgggctcgtttccgaaacatctctcgcattatgcgagttcaacaggcagtaccagtgcggggtgcctcgtgggcgactacgcttgattcccagttatttggaagcatgtgtttctcggccagatgggtggattggatgaggatgcttcgggggagatgggacacagtctatagtcctagagctatcatccaggggctgaccagggccatgtacagccggcgctcgaagatgaccccttggtgggaacaccatgggtccatcggaggctatgctgatggagagacgtttcctcggttatgtgggacatggcttggggtacgcctatgagagccctttcgtggggccgacgggttatgggggcatcactggggcttcacgcctctgctgagagatgttctggaaaaagcgccagtgttaagcccagaaccgagggcccgcgactttaataaacgcttgcatgcgaattgctgtactacggaagatgccggttcttacaaccggttcaaccgccatgtcccgaaagggttgaatcgggcccttgtttccgcacccatgggtatgcccatgtcagtgtggaatgaaccgatgtttcgatgatgcca

SEQ ID NO: 696045 - DNA, 116 bp, Homo sapiens
gcagtaatgggcgaacaacagaagcacattaggatatggtgactttgtagcttgtgagctcagatcttgggactgagtcccaattcttattggtggatactataagttaaggtata

SEQ ID NO: 696046 - DNA, 555 bp, Homo sapiens
aaggtccccgtctcaccaccatggacttggggctcaggtgactccatgaggctccttcaacaggctttttggcccacaaatactttaagcaaatcatttaaattataacagttaatggttaaggggtgtataggctgtaactgctaactcctaggaaacagccttttccctggacacagatggtcccatacgctgagccacgtgaaactgctgatgtattgtttagatgcacacacaatggcagcgtttcatacaggtcagcaggttagaccggcttttgaccatattcatcgctatttaaaacctgtggcacaatgaacgcttattttacagactttctaatttgaccagatttcttaatgaatagacacagaattaactaaaaacagtctcaccccatgtagtgcgccgtgtcctgagagaggtgccctccctacgaggagggaagaacaggccctggggtgcagaggcccggcacgtagagaacccagatagacgccggtggtggaactggtcaaactccacgcccggcctggaggttgtcaggttgctgtg

SEQ ID NO: 696047 - DNA, 176 bp, Homo sapiens
agcagtagatatcattcacttggagggagactgcacatctgacactggataactagataaagatttggatattgattctatatccagacatgctgatttctggcaccagacataagccagtagtattcgatagtatgagaacgagctgtcctgacgtgaaaccttttaggacgctc

SEQ ID NO: 696048 - DNA, 219 bp, Homo sapiens
agctgaatatcttgtgatgcattttgggagttcagctatcaggacaatagactcttgtatctcccaggattactatcaagcatagcggcgctatcttgctctgttcgtaactcagcactctgtcgtggaaagctccacatccattacagtcaaagtctctgctccttcaggaaccgtacatcttcctggccttcatccattatagcactcgtgatttcg

SEQ ID NO: 696049 - DNA, 294 bp, Homo sapiens
gactatctggtaccgcgaccatgctcattaccgctatgttgctattggccactggcaggggcgcctgcatctatgcctgctgaaaaagccgcaactgcaccaagcatgcagccacaaacgacgacccaaattcgtcgtcatatatgaggcggtcaccgtacttgaagctgtgaatgccatgccatcacactgaccgtgcatcacccacatcgactcacgcccacggatgatcaggcggctagccgattgtatagcctggtctgcagaggtgcaatggcgctctgcattgagtgc

SEQ ID NO: 696050 - DNA, 672 bp, Homo sapiens
  misc_feature (529)..(529): n is a, c, g, or t
  misc_feature (636)..(636): n is a, c, g, or t
tcccccaaataattataacttaagcaatatatttctaaataacaaaagagtcaaaaatcacagtgggaattttaaaaatattttgagttaatctaaaactatggtattaaatcttgagctacatagcgatgcatagagagaaatcaatagacctaaatacatattttaagaaagataaaaaactggaaaataattatctaattatccagctcaaaaacagcaaattaatcctcacccacctctgtaaacagaaggaaggaaaaaaataagaaaagggagatcagttaaatagatagcagccataaaaatagtaatttacaaggtgttcttaaatactacaaattaataaactccacagactggtaaataaataaatgagaaacagagtcaaattatcaaaatcaaatgaaaagagaatgtaaagtcttacaggtcgttgaattataactcgagggtataaagcatctgtaagtgaaaaaactactattttaatagaaaggaacaaatcccttatgaaaaacatgacagnccaaaactaattagagagtaataatctcaatagtgtctatctattcaaggaaacaaatctattattaaaaaatctctccacaaagagaagcaaaagaagccacaacncaaaggagtacataggcaaagaacaggcgaagctca

SEQ ID NO: 696051 - DNA, 1071 bp, Homo sapiens
  misc_feature (255)..(255): n is a, c, g, or t
  misc_feature (462)..(462): n is a, c, g, or t
ctaaaaccgaacttccatacgtttctacgcagcacaacctttatgatcacatacccattatcttaaccgcactaataaaggtattgcgtcgattaatagaatgtgtaacactccatgtggcgctcaactacgtaccattatagcctacccgacacaggcgcaacatgcatgtacatataagattcataaactcagatgcacttaaatcagtacgcacaaaaggagctacatccgcctgatactcgctgtactggncatacagtgtgaggttacatctacgcacatatatagcttctgccaatggtacgaggccaaaatgacttagaggataccaacgacagataccaagtacagaacgtcataaccctaaccacacaagcgtcataagagcaacatccgctgcctcatatagatatgcataataatcgatgcgagagatgattttagtacgtgttaccaggngcagacaacagtcatatcctgaggtcatgggcatgaaatacgcactgcgcattgggtgccataagaattagtatacgtccatgtacggttctcacaccctattataattttgtgggcacacagcagaaaatgccacttacatacgaagtccacctttggtacataggtttttacaccgtggtcaaggttccacatacggaagggacaccacgtcatcctttttgcgcagcaccttacgtgaatagacatagcccttgctatgacgcaggaagttacacacacatactttaaagtccaactcgcagtaaggtaacgggccgtacaaaatgtcaatgcccaagccgagaattcaacgaaaatggccgttcaaacgacctcaaataagcccatttaactctaatagagatagttccccaaaaggatattatagcctgtagactttccttcgacatccgcaaatgtggggacccaaattcttaaattcaagcactagttaagaaggaaactaaactggttaagtactaacagttatacactgacacatgggttcgtgccatccgggcattaagggctgcggtccggatttagaaacgcttggaatgagcagat

SEQ ID NO: 696052 - DNA, 965 bp, Homo sapiens
aagcagccgtatcaatgctaaggggccattcacgggcggggtgcgcacgagtgacactgatctaaaatggtgaggagagagtcgcgacgagcactctaatgcctgtattttattgagttcttgatggagcggggtggaataatgctacagaagtttaccctatgtgggatcaagcatgaaccctgtggatgtacatgcttgcattatgagtggtggagatagattgtgatgatcgacgcatgcaagggtgtgttggtctatgaacaggttctggaggactcagggcatttgggtgattagtgctatctattgtcccaaagtatgagatagttagcgctaaggtaggtaactctgtattatgaatcgccttgaagaattcggtgccaggagtttggtgcagaaatcgtgtaagtggcctcgtgaggggcattgttaagcttctagagcagggtgggcgggaatcattataattcgtttggggaataaactactaagaggctgccttctgcattgtatttatactggaacgtaggctaatttcaaccagaaaagatggtgagatcatgccataaccgaggagttggtagatgataccatgaagcaagtgcaacggaggggcacgtagacaatgttgaaaaggtcctgaatctagaatatggcgggactctgattatttatcgtctggggatagatccacttggtggggtggactgtactgggcattgatgtctacaatgaagcagggagtctgcggaaagatgaacgtttagaagttaggaatagttaagtagagtcggatttaccagagggttgtactctgggaatggaggtgtgacctagaaaaaagggctttggagaggagatttgagacgcgggttgggtgcccccaaacagggggtgggtggaaaactccgaagagggggtttcaaattgtggatggaaaaatggggaaaataggcagagat

SEQ ID NO: 696053 - DNA, 605 bp, Homo sapiens
taagacggagtctcactccgtcacccaggctggggtgcaggggcgccatctcaactcacgggaacctctgcctcccgggttcaagtgattatccggcctcagcctcccgagtagcggggattacagggcgcgcacaccacgcggtggctaattttgggattttcaagtgggagacggggtttcaccatgtgggacaggctggtctcaaacacaccttcactttctccacgggaatttggggttatcaggtaaccagtaacaatattctcatattcccatgaggagcaagaggttgaggaagaaaagaattcacactagtaaggtagtatccatttctgagatgctacagcttggacattatgataacccaatttacaagaacaggagggtcattaaccaaaagggacaactatcgctaaagcggaacggtagtacaaattaacacttatgtccaaattgggagcatattcactaagggacttggcaaatcagataatgggcatggcggcacaatttcgggagtcgggcactcatactgggagcactgtaggaaaatatcctgggtctaggagcacaatgctgaagtatcaggggatgaactatcg

SEQ ID NO: 696054 - DNA, 644 bp, Homo sapiens
agagaaagggagagggtgaagaagtgggggagcgacagcaacagatccttggagagggaggctctgctcatgatttatccccagtgccttatttagttcacttggtgaggtcatgttttcctggatggtgttgatgctagcagatgttcttcagccgactggacattaaatttttggggggggggcaccatatgagacgttcaaaaaataaaatttaccgagagataagtgctggaatcgctgaatcacacgttgccaatagatgatcagtactggtgcccaatcatcagctagagtgaaagcgctcagcagagcttgataacaccaaaactctgagaccactgaccttcaaaaacttcaacagccctgagtgaaaagcccaaacacattgatctaccattctaagacgctgtattgtctgtcctctgcgcatggcagaagtctctttctaccacactggctatatactgcgtgagccatttatttgaaactatcctgcacttcaaggcatcttatactatatattaacccatgtatccctagtacctagcacagtcctggaatacagttacctactaaacttcacgaccgaaggtatcatcgcgcttcacttttcaagtttcacggcattcctccctaaaaaa

SEQ ID NO: 696055 - DNA, 389 bp, Homo sapiens
ggtcgacgattccatttatattaagttttttaaatgctctaaactgtaggctgggtaaggtggttcacatctgtaatcccagcatttgggaggccgaggcaggcagatcacttgaggccaggagtttgagaccagcctggccaacatagcgaaatcccatctctactaaaaatataaaaaattagctggtcatggtggcacgcacgtgtaatcccagctactcaggaggctgaggcaggtgaatcacttgaacccaggaggcaaaggttgcagtgagccaagtttgcaccactgaacttcagcttgggtgaccgagcagactctgtctcaaaaaaaattgttggaagaaaaagttttgccccataattggttctattacaatgttcacg

SEQ ID NO: 696056 - DNA, 265 bp, Homo sapiens
cttgaggaaccactaccagcgcgtcgttgccgtcatacatagtgtcagagctgagtcatgggagagagcacatatgttgttcctaggaaggggtagtggtgaggccgtgtattatactaatgtttgtgtattcggctatgaagaatagggcgaaggggcctgcgacgtattcgatgttgaagcctgagactagttcggactccccttcggcaaggtcgaagggggttcggttggtctctgctagtgtggagataaatcatattat

SEQ ID NO: 696057 - DNA, 1206 bp, Homo sapiens
  misc_feature (477)..(478): n is a, c, g, or t
  misc_feature (484)..(484): n is a, c, g, or t
  misc_feature (487)..(487): n is a, c, g, or t
  misc_feature (515)..(515): n is a, c, g, or t
  misc_feature (522)..(522): n is a, c, g, or t
  misc_feature (526)..(526): n is a, c, g, or t
  misc_feature (528)..(529): n is a, c, g, or t
  misc_feature (532)..(532): n is a, c, g, or t
  misc_feature (539)..(539): n is a, c, g, or t
  misc_feature (559)..(559): n is a, c, g, or t
  misc_feature (576)..(576): n is a, c, g, or t
  misc_feature (579)..(579): n is a, c, g, or t
  misc_feature (594)..(595): n is a, c, g, or t
  misc_feature (597)..(597): n is a, c, g, or t
  misc_feature (602)..(603): n is a, c, g, or t
  misc_feature (612)..(612): n is a, c, g, or t
  misc_feature (622)..(623): n is a, c, g, or t
  misc_feature (631)..(631): n is a, c, g, or t
  misc_feature (634)..(634): n is a, c, g, or t
  misc_feature (636)..(636): n is a, c, g, or t
  misc_feature (647)..(648): n is a, c, g, or t
  misc_feature (651)..(651): n is a, c, g, or t
  misc_feature (656)..(656): n is a, c, g, or t
  misc_feature (663)..(663): n is a, c, g, or t
  misc_feature (666)..(666): n is a, c, g, or t
  misc_feature (686)..(686): n is a, c, g, or t
  misc_feature (692)..(692): n is a, c, g, or t
  misc_feature (695)..(695): n is a, c, g, or t
  misc_feature (714)..(715): n is a, c, g, or t
  misc_feature (727)..(727): n is a, c, g, or t
  misc_feature (747)..(747): n is a, c, g, or t
  misc_feature (758)..(758): n is a, c, g, or t
  misc_feature (768)..(768): n is a, c, g, or t
  misc_feature (836)..(836): n is a, c, g, or t
  misc_feature (864)..(864): n is a, c, g, or t
  misc_feature (1075)..(1075): n is a, c, g, or t
  misc_feature (1080)..(1081): n is a, c, g, or t
  misc_feature (1084)..(1084): n is a, c, g, or t
  misc_feature (1086)..(1086): n is a, c, g, or t
  misc_feature (1106)..(1106): n is a, c, g, or t
  misc_feature (1112)..(1113): n is a, c, g, or t
  misc_feature (1135)..(1135): n is a, c, g, or t
  misc_feature (1186)..(1186): n is a, c, g, or t
ctatttgagacagtgttttccccccccctccgcggctcaaagaagaaatcgtggcttcccacagagtctcgccccccgtttctcggcccctccccaagggaggagaaggatttttcttccccctcggggaagggaaatttcccaggaaaggaaatttagagaacccttcccagggaagggaaaagaacccgccacaggtccccccactgagaagccttgaagggttccttttgaaaacccaaccttgggccttgaggaaaaaccggagggggccccccgggggaaaaaagaaagagtggctttctaaagaaagcggcccattatgagaaggagggacccccacccaaccctctcacagtagagaatggcgccagaaagagaggagaaaccgtggagccccccaccacagatatgggaaaagccttataaataaaaagaggggaccccgcagagagggggcacacacacaaatgggcnngccccncanactggggaacgctttgtccgcaagaganaaggagntaangnnacncacttgnagaagagaaagttcgcgganagagaccccacagagantcncccacaggagccccnngnctganncgagagagnctgagaagcnngagactanatntntgtgttttctnnagngagancttgagnctnttttcttccgccactccccntcttcntanaatatttcccaaagagccnngtatactcgggnccacgcggtgcacactttanattgtgttgtnccgctccctngagcacacaataattttatagagaagctataatgtataggagctcgtatataaggtatagaatcccangagtccacgagactcgtaaagaatgttngtgtttatagggggtataaaggggaggagaaactcgagaaagtgtgtttaacttctctttttctataaagtgttggtgtctctttctaaagtaaggctatttttttcttggtgcactcttttctaacttcacgacaccttggtgtactgggttaaatggctaagtactgtaattggcttctgtgaaaaacacatatattgtgaaaaagagntatanntangnggctttttttggaactgttnagaatnnctgaaaatctgttcacttttcnatccccattttgtccccattttacccagatgctactggacttgaatggttnataaaactgccccgtgctga

SEQ ID NO: 696058 - DNA, 101 bp, Homo sapiens
tgagctcggccccacttcatcgcagacttctggcagatggtgtggagagcggctgcacgtcatcgtcatgctgacccgctggtggaggatggtgtcagcag

SEQ ID NO: 696059 - DNA, 381 bp, Homo sapiens
  misc_feature (38)..(38): n is a, c, g, or t
  misc_feature (209)..(209): n is a, c, g, or t
gcctagcaggatctgcaaagtgactcttctatatctancacgcatcagatgacgatggcttccagaccaggagccgggcagagggatggctggtgtcgatggtgccaaaggaacttaggattcagatgctttggaaatgaacttttgctggtactgaaaaggaaagagcattctctccctttagagaatagaggtttgagtgctccggntctgcaaacagtgcctacggttggcacgttggtgtgtgcgaggggttcggaggccccagtacatctgatcacctcggctttttgtgagtttaggtgttcagttttaatcttgttattgccacaggaacatgtgactctttggggagtagatatagaagagtgcactttttgg

SEQ ID NO: 696060 - DNA, 189 bp, Homo sapiens
ccatggatgattccccaatatcaatgccacgccgtggaacccgactcatcgtctggctcgtacgattggttctcatcggttctggctgtcggaaaatccctggcgcttcctggccgtacacagatgatgacaggcctcccagacgaattgccgattaagacaggggaaactggcgtcatgcggatgatg

SEQ ID NO: 696061 - DNA, 294 bp, Homo sapiens
agattttccaaatagtgggcctagtgtaaaagacacccaacatgtataggaaatcaaacaaagctatgtgcacagaactgaaatgagtagggctgggaagccttttacagaaagaagctttcacattattttattcctttctaaacatgaatgggtcaatcaaagttttaaaagcaatagtaatttttccctttacagaacattaatgatgttacagaataatactgtcttgaaatgataaaacaagttgacaccgacgtatatgtttttcctgcatccaattctgctgggaag

SEQ ID NO: 696062 - DNA, 1734 bp, Homo sapiens
  misc_feature (371)..(371): n is a, c, g, or t
  misc_feature (641)..(641): n is a, c, g, or t
  misc_feature (1454)..(1454): n is a, c, g, or t
gagttgccttggcgcctctttcttcctggcatgcgctacgaccacattatggggggttgtctctgccttatgctgcctgcgccgccgcagctctactatttacgaccggggtgggtgctccgccgttgctttttcgtttgtacaccgcgctgcgtccgcttcccccggcgagacaccttttttctttgcccgggtcccccatagttttgtattcgtactgctactaatgtacaatgggggggggcgcccttccccacaaaaggtggtgtcgacctcccgcgtcttctccaatcgggtggtggtataaaatccttgtgagtcggtaacacgcccgttgcaccgggacaaatctgttgggggagacgagaaanttctgactaacaagagcagttgtttatgaggtgcgcccaccgcggcggtggaaattttccttcttgtggggggtgttctcccctctttctcggcggaaaaaagagaacccctcggtgtgttgtccccacacaaaagaacacaaccagcttgggggaaaataaaaacgcttctttttcgtgttggcgcccccctctttaatagggccttaatactccatcggcggaaggggaagatgaacacaaatagcggaaattctctttttgtggggntcctgtatcaccacagcatattaacttcctcctgcccaccagaaggtgtgtccgccacattgccgcgtgtgggttaaactcttcaccagcaggggaagccgtcttttccaacctagtggaagtgccccccaccagggggggcctgtggaagagaaccctcttttcaacaaccacacaaagggggggagagaaatatggggccaccaccacagaggaggggcgacaataaaggaggccgactatttcttctcaccccgtcttgtgaggagcccccgcgttgtgtcctccccctcggacttttgatgagagaacacttcttctcacaaccaagaccttcggagaagacgccaccgcttcatcacgcgagaggcctctttctggggtccttcttggggggttgtggaagaggccacatcgtgccgcccccaccaacaacccgccacaggcgccaccaacataagatgacacgccccaacactacgcgggcgttcgtccccaacacgtggtttcttgtggcaacattgtcaacacccgaacacaactggtctcaccacagaccaccaccccctctggggtctttagaatatggggcccaacagacactttgtgtgggtgtgttgttttgcgcccacaaagtgttctaacagagaggcgccactctgagagagtgtttggtgtgtccccgagagacagagtgttggagagagagacactctccacacagagcactgagcactccccccgcggagataataacccccctgtagaagagagatgtttgagatctacttctccaccagagcttgtctcggncacacagagattcgagaggctgtgagagagaagccccctttggccacatctcgccacacaggagagatatagggcacacacagggagacatcttttctcttctgagagtgaccacgtcttgtgcaaggcccctgtatgtcccgcccccagggctcttgaggcgtgccctggcccccggtgctggcaatcttggtggagagccggacccccctctcccctcacaattctcccaaggcccctggactcacttttgtaaccaactcctacccaccctgaccca

SEQ ID NO: 696063 - DNA, 386 bp, Homo sapiens
gaagtttacctctccctagtactatgtccaggtataccgtggaaaaacacagacgagacacacacacacacacacacacacacgcacacacgcatgcacttatctcccccaaggtcgtgtgccatgtgcttatcgctcggggacgtgctgtagaagtgtgccaccaagatctggggcctcttatacgcaacgctgtatctccccctggaggagtaagagcaggggacagagtcaggagacttgtcgctagctacatgatctgtggacacaccatcatccttttacagggcctctgtgtctagtcttagggcatctagcttcttccagtttctgaagccctctgatgagatgtctggaaagctttacccacctgtgcccaggtatct

SEQ ID NO: 696064 - DNA, 2023 bp, Homo sapiens
  misc_feature (1419)..(1419): n is a, c, g, or t
  misc_feature (1632)..(1632): n is a, c, g, or t
gttcgttgttgcttgttgtgtgtgaagtcattctcacgtgtgggttgttgtggctgtgagtgcatgcgtggtgtgttgtgttgtagcgtgttgtgatttgctacgtatgtgtgtggtcttggttgaggttcgttccctgtttgttagggtgtgttcgtcgtgtgtgtgcattttgttttgctggtgtgtcctctagcgtgggtgtgttcgtgcgctcgtgtgggggcacgggggtgggggggcttgttcgtgtgtggattgtcgtttcttagtttgtgcttgtggttgtaggtgtgtgtcgctcgtgtgtcgggtacttcgggtcgtttcccttggtgtcctggttgtaccagcgtggtcagggtctgttcgaggggtgtcccctcttgtgttggtgtgtcgtcaccgtcgtccgcatccgaggttgtttctttgtgttgtgtcttctgggtgtgtagtttggctcttccttttctattggtacttctgcggtatggttgctctctcgtgggggtcgtctggtttcgcgtgctgccctgcatggtctcctcgcgtttgttacgatggggcgcctacgggggggctgcccttcgtgggggatggatgtgtgttgatgaagtgggggcgctgtgtggtttcgctcacggaagaagatgtgctacgtttgcgtcacgtgttggtgctatgggctacagactgttgtcgcgcgtaggtgacctgggtgcgtgtttcattattggggggggcgcttggtgttggtatggtgcgtgtctcctgtgtgtccgcaagctgaggtgtggggtgcgttttctgcgggttagtgcctccccccgtagggggggcgcgccgccgatggctcgggttggtgggagccccactgttggtggggtgggagccaccgtcgcttcgggtgtgtcataaccgttgcgacggtgtttggaggggcccccctattgccacgagtgggggccgcttgtggtgcgcccgccaacgaggtgctgcttgtggtggggacacagcggggttctcccgtgcgcgccttggttcgccggctgtgcgcctggtgtgggggcgccgccacgcatggctgggaccaccgcagagggtgtggtgccccccctgtggggtgttagaggcgctgtttgcttttgtgtgtgggtttgtggtttggggggttataccaggggggatgtccactgcgtccgcacgaggggtgtgtaatggtacgtagttatcttctgtcgtgagaggttgtttcttgtggggggggcccccacaaccgtctgggttgctctgtgtgaaaccccgctgagccttgtgagcccccccgttgggcagagagagaggccgcccgcgatgtgtgatagtggtggtctggtccgttgttgttggcgttgtgttgttctgcattgccgcacnacgcggtgctgccccccgcggcgcacagcagtgggcggacttcgagagagggtgtctcccccccggggtgttgtgctgtgggtgcacaaagagtgcgcaccacatattggcttggtgtgtttgtctggggagaactctctgagactgtgttaagagtatgtttgtgtatgcgagattctcacagagagagtcctctcccgacacacacacggngtcacaggtgtcacacccgctcactgtatgtagacaccgctgcggctcacactggctcacaggggtgtgggtctctggcggaacttgtcttgtgtcacacacaagtgaattcccgggctcgctctcatggactcagctcagcgacatctccacgcgtgcgacaacaagacggccttaaggggtggcacgctctagacacccactcaccatacacgcgtctatttcttggaaaggcgccaaccacctgagttggtctacatggtctaagggccaatggccaagacctgctgtgtccttctctctccacaaggtctcccccccccgctccaatgtcaaccgggtgacagtgtgtttttttgagtcccttgtatgaattaaaggctgggaaacc

SEQ ID NO: 696065 - DNA, 137 bp, Homo sapiens
acaactgagcactagctgggccccatggcctcgcacagttacaatacagtgctgtcgctgtcacacttgccagagtgacactgattgtccactggtctatgtatacaagtgacatctgcatggtgagcacagccggg

SEQ ID NO: 696066 - DNA, 367 bp, Homo sapiens
  misc_feature (161)..(161): n is a, c, g, or t
  misc_feature (187)..(188): n is a, c, g, or t
  misc_feature (192)..(193): n is a, c, g, or t
  misc_feature (199)..(200): n is a, c, g, or t
  misc_feature (268)..(268): n is a, c, g, or t
  misc_feature (286)..(289): n is a, c, g, or t
  misc_feature (291)..(291): n is a, c, g, or t
  misc_feature (293)..(293): n is a, c, g, or t
  misc_feature (300)..(300): n is a, c, g, or t
  misc_feature (317)..(317): n is a, c, g, or t
gcattttcatcacagaaaagagttgcatttgtattaacaagaaatttgtatacccacgcttcagctactatctaatcatcacccgaagatttaagatacaccaaatttcagtttgtttgtaacattgttcatctttagtgcactttgttttatataatacngtatgcctgttatattattttatttnnttanngcaatnngcgatatagcatacccaaacaaagatgttctcgatacagtctggcaaagactatcccaaggttatttnaatgaattcagacatttnnnncngnggatatnctccatcctaaaaaagnggcaaccaaggaaatatttagatgcaacttactagagtgatgatgtgaaa

SEQ ID NO: 696067 - DNA, 421 bp, Homo sapiens
gggctactgagaggcactggccagacagcacgagccaggatgtagtgtccctgggtatggactggaaatcctcggccctcgcttgcctacccccgccctggtcagtgcacagagccaaacttgcggatgaacttggtgaacaggttccgaagcttcatgcggaagttgcgccgcatgtcatctgagagcttcccaatggtttccatcttgcggacagagcaccaggctttcagggaggcgagccttccatgctgtgccccctttaatgctgtccagcccagggacgcagcgtgatcaagcccagctgaggggagggttagcgcgggcctgatcctgggccacaccctgggccagtcatgcttccctcgggtgggcagggcccatcttttcccttgagcctccttaagaacccatgcctgcc

SEQ ID NO: 696068 - DNA, 417 bp, Homo sapiens
gtaagtggcctggctgcagcgggggtgctcctcccagcacagacaccggatttggaggagactccccctgtagatgctctgggcaggagcctcctccctgccctaccacagggcaccagaatgcaagccgtgttgggcatcaggcaagaggagtcaggtctggtctcatgtcctgttccttctgtgtgacactgaactcaacttccttatctgataactggatgcaactgcaaaatcaagcatttgcctccacccccattctgcaggcagcctctcatctgtctggagcagcagcatcaggctccctgtcactcactcccaaccgccttggtgcctgcagagggggcaagtcccgtgaccacccttcagagcagagtgggtgttatgcccaggttgggcaggcaggacctgggtctc

SEQ ID NO: 696069 - DNA, 202 bp, Homo sapiens
  misc_feature (83)..(83): n is a, c, g, or t
  misc_feature (181)..(181): n is a, c, g, or t
gtggtgtaccgtaagactctgaaagttgataatgtatccctcccaatccctgtatcacatttcttatgtcatacagcattgcnagtacaataatgttgaggatttggggcaagaacaggtgttatgtccagttcctgacattaataaaatgctgctaatgttaccctattaagtatgatgnttgctatacatttaaaaacac

SEQ ID NO: 696070 - DNA, 103 bp, Homo sapiens
caccccccacacacacacgcacagcatgctgtgccaggccctaaaccctctacactgggtctcctctgaacccaggaaataaaaagtctgatcccgtcgacgc

SEQ ID NO: 696071 - DNA, 297 bp, Homo sapiens
actatatatatccaacagacagcagaaactcggacctatagtaccacaaccacaggaaatgaattctgccagaaaccaacgaggacgagagggctggagctccagatggaactctagcccatagcaagaccttgcagtgcaactgcagcacatggatttcagccttgtgagaccctgagtagaggacccagctactccatgccctgacttctgacccagcaaactgtgagatcctgagttaaatgattttaaggtcactctagtaacactcaatacaaagttcaaatttattaatca

SEQ ID NO: 696072 - DNA, 469 bp, Homo sapiens
gaactttaatggttggcaaagtgtgattaaaaaacaaagtgagctgaggttaaaacacaggacagcaattataacctcataaatgccacctagacatcatgatgtggaacccagaatggaacagagctacaaaagggtctgctttatgggagggaaacagacctgttaggaggtggccagccctggagataaagaattatgaagctaggccaggtgtggtggctcatgcctgtaatcccagtactttgggaggctgaggagactggatcacttgaggtcaggagtttgaggtcagcctggccaacatagtgaaaccccatctctactaaaacatacaaaaattagccaggcatggtggtacacacttgtagtccagctacttgggagactgagacatgagaattgcttgaacctgggaggtggaggttgcagtgagccgagtatcgtgccactgcactccagcctggga

SEQ ID NO: 696073 - DNA, 217 bp, Homo sapiens
gctgtccatccaccttcgtgtgtcataccccttcgtgtgtccatcccccttcgtgtgtcatcccccttcgtacaactttttttgagacagagccttgcttttgcgcccaggttgtagtgcagtggcgtgatctcggctcactgcaacttctgcctcccaggttcaagtaattctcctgcctcagcctcccaagtagctgggatcacaggcgcccgcc

SEQ ID NO: 696074 - DNA, 299 bp, Homo sapiens
gcacgatcttcaagtaaccttcttctcctggcaacagtcggggaatgcgttgctggcgctaccactggctccccagcagaaaagtcgttgatgttggaagtttcatggaatccagttagacgtcgggcattgtccaggcctcccttgggatcataggctccgatgttgtactggtgccgcttgcttagtttctcaatggcctggtggatgttcctggagttaactgaaaagattgcagtccaaccttgtctccaggtatggagcctagaatgaagttgcacaaaatatgataccagttg

SEQ ID NO: 696075 - DNA, 173 bp, Homo sapiens
gatcgagctcggcccatcttgtcgctgacttctgctgacttactcccatttcattgtcgtcataagacttgccccccatgtgtctatttgatgtttgagcgagagctgacttttcccaggcagtcgtcactcactttatattcacggagaatctttcttgtcgtcgctccctg

SEQ ID NO: 696076 - DNA, 488 bp, Homo sapiens
gtcatctgcatgtataacattatgttataatattcttagagccaggtgtggtggcatatgcctgtaatcccagcacttcgggaggctgaggtgggcggatcacctgaggttggaggttcaagactagcctgaccaacatggagaaacctcatctctactaaaaatacaaaataagccaagcatggtggcgcatgcctataatcccagctacttgggaggctgaggcaggagaatcacttgaacccaggaggcggaggttgaggtgagctgagatcatgccattgcactccagccggggcgacggagtgagactccatctccaaaaaacaaaacaaaaaaacgacggtgaaccggcgcattgactcgaatggctggaaacatttggagaatacagacaaatcttacacttatttaaacctagaacaactctctagaaatgggcttcgagtacttaagccatagactataatatgcaggactggacgtct

SEQ ID NO: 696077 - DNA, 218 bp, Homo sapiens
gatataaatacttaatatgcacatatacaatacatacagataatatgataagataaactaagatacagaaacatagtgaaccattctagaaaagaaatagaagaggtctaacagaggctcagtcccagcagctccatgactagatacattgtagtctttttcctgaccataccaccgtatgtgggggatgccaaccccacattttgggcgtacgggga

SEQ ID NO: 696078 - DNA, 116 bp, Homo sapiens
tcattcttcagctactatggatatgagagactaagttatgttctacagctacaatagaaatgagagagttagttagttactacagctacaatagatatgagagagttagttagtta

SEQ ID NO: 696079 - DNA, 316 bp, Homo sapiens
acagttttcccatagggataagtgttatgtaacagaaaacagtccaggcgctgtggctcacacctgtaatcccagcactttgggaggccgaggcgggtggatcacgagatcaggagattgagaccatcctggctaacatggtgaaaccccatctctactaaaaatacaaaaattagctgggcgtggtggcacgcccctgtagtcccagctgcttgggaggctgaggcagaattgcttgaacctgggaggcggaggttgcagtgagctgagatcgcgccacagcactccaacctgacaacagagcgagacttcgttt

SEQ ID NO: 696080 - DNA, 133 bp, Homo sapiens
  misc_feature (6)..(6): n is a, c, g, or t
ctcggnaccctcaaacaccggaataggggtgagccccaggtgttctcttgtctcggctgaaaaatcgggtgccatcagctcttgaggcggcatacaggtgccaacaatcgagagggtttcgggtggggcatag

SEQ ID NO: 696081 - DNA, 210 bp, Homo sapiens
cacgaggcgggggggttctttcgcccccgtggtggagggcccctgagaggcggatactggcgtgcctttgggggtgatgtggcgtgtggggggaaaggtccgagctcccctgccagggggagggtttttcccttaagtcatccctcacacgacatgttttttctgctctgacccggacgccggaatggattttgacgaagagattcttcg

SEQ ID NO: 696082 - DNA, 245 bp, Homo sapiens
acttttataaacactccaatttattaactgttcctgctgagttggagctgtaagaatatgaccaagatggagagatatctagtacaagccccactgggggttacctgctttacattaaaaaaaagacaggctcagttcttttccctgtacccacatctgtaggacttatattatacagcaccagtctttaatggtgttctgcttcagattcgtgtcatccttaatgggttgtaatgaccagtctg

SEQ ID NO: 696083 - DNA, 264 bp, Homo sapiens
tgatctagaggatcccaatctactctatccgaagctgaaaaattacatgggcttcaacttaagaaaaccttagtgaaatcgctcacagtaagcatgcaaaaggaaacagtatccttttgcaaaaaaaaaaaaaaaaaaaaagggttgaaaaaaggttctttataattcgggaatagcccttttattgtattaaaaaggcctaaattttggtttccagtcaagggtgggtgtggaagggtgtgttaaaggagcaattttcccaaa

SEQ ID NO: 696084 - DNA, 221 bp, Homo sapiens
  misc_feature (22)..(22): n is a, c, g, or t
  misc_feature (33)..(33): n is a, c, g, or t
  misc_feature (56)..(56): n is a, c, g, or t
  misc_feature (79)..(79): n is a, c, g, or t
aagcagggctcctttcactatnttgatgcaagncgctagtgaactggactttgccnccccaaagaaatgcatttcattntagtaaatggtgagtagattccattctagagcaaacaaagcaagtaatgtagagtcagcccacagcaaaaagaacaagaagaattgtgttgtgacaagttgccatgtttttaacctcacactgcacagcatcaggcccgaat

SEQ ID NO: 696085 - DNA, 245 bp, Homo sapiens
cggcactggtttactgcagtgcacagaagtcactatttcatgaggatgttaaaacgcctggatattcaggcagaagtttgctgcaggggtggggctctcatggagaacctctgctagggcagtgcagaaaagaaatgtggagttggagcccacacacagagtccctactggggcactgcctcatggacctgtgagaatagggccaccatccttcagaccccagaatggtagatctactgacagct

SEQ ID NO: 696086 - DNA, 152 bp, Homo sapiens
ttctgatttctcagtaatctcttgaaagaaagttgattttttaaaagaatcacttttgtgaacataaatttctaaggaccaggtcctggaaaagactgcacccattatgtacttaaagcttccagagggtttcctctttgcatctcctagct

SEQ ID NO: 696087 - DNA, 110 bp, Homo sapiens
ctgaaaggcttcagaaaactcttttttaaaatcttcctcttttccggaatcttttcccttatcttggcggccttcctaacttcttggtggggggaggtataaaggataga

SEQ ID NO: 696088 - DNA, 487 bp, Homo sapiens
ggaggaggggggggtctccaaattgtataaaaaaaaaaggggtctcaagggttaaaaaagtatttttgggttcccccccccccaagggggcaaacccccttttagcctggggcctcctggggccccccccccccccccccggggggtggggggcgccccccaaaaaaaaaaaaggggttttttttggggggccgggaaaacccccccccctgggggccccccccccttttttttttttttttacccccccctttttttttccccttttccccggggggggggggggccccccccaagggggggtttaaaaaaaaagggggggggggtttttcccccggaaaaaaaaaggggggcagggtttttcccctttaaaaaaaaaaaaaaggcccccggggtttaaaggggccccccaaaacccccccccttttttttggaaaaattttttcccccccccaaaaaaaaaagttttttttttttccccccccca

SEQ ID NO: 696089 - DNA, 118 bp, Homo sapiens
  misc_feature (13)..(13): n is a, c, g, or t
  misc_feature (117)..(118): n is a, c, g, or t
tgagcaggacagnctatacaatagaatgcaagctgtaatgtaattttatattttcttatagccaccgttgaagtaaaaacaaacacggtaccacgtgttttttaccaccgctttatnn

SEQ ID NO: 696090 - DNA, 167 bp, Homo sapiens
tatcacaaacagtgtatagccagtggaataagtgtgtctgtgtgtgtccgtgtgatctgtgtgtgtgactgtgtgtgtccgtgtgatctgtaaagtgatgactctgagagtgtgactgagatcaatatgtatgacagagtgtgacagtgatgtatatctagatcagt

SEQ ID NO: 696091 - DNA, 122 bp, Homo sapiens
  misc_feature (15)..(15): n is a, c, g, or t
  misc_feature (63)..(63): n is a, c, g, or t
  misc_feature (104)..(104): n is a, c, g, or t
gctacatgccctgtnctccaccatcaatacaaggtctccataagtgtcagcaatgccctgggncacaatgccacagctatcacctttgacgagtcaccattgtnaagcctgatcctccagaa

SEQ ID NO: 696092 - DNA, 343 bp, Homo sapiens
tcaaggatatacccaaacagctaagcaccagcccacttttgatctgtgatgtctacaactccaggccaaatcatcatacagattgtgtgtgtgtgtgtgtgtgtgtgtatgtgtgtgtgtgtgtgtgtgttttgtcattattttttaatagaaagaaaactgttatattaagtgtcacgctaattttggcctaaaagtcacagtttcattttaaatcccaacaactgggagaggtgtgtacatgtgctcactagagacaccatttttattaagtttcactcaattaaacagaaacagatggaatgtcgacgcggccgcgaatttagtagtagtaggcggccgc

SEQ ID NO: 696093 - DNA, 325 bp, Homo sapiens
tctggatgccagtgtccaagaagggataatatatcggatataaagaactatacgtacattgtttgtgacctctgtggacatttgcctgaattctcacctgggagtgaatggagcagtggggcgaaggtcattggaggaggttgtgttttgtggtgtatgtggcagtgtctctggggttggggagtgtatggataagaaagcaaatgaaacaggatggagaaaaaaagaacgatcaagattaatgggtctctaactggattcatttcactgtagttcccccaggtcttcaacagtcacatttgagacctcagtaatgcaccacaga

SEQ ID NO: 696094 - DNA, 217 bp, Homo sapiens
cacgaggcatttttatatcacattgccctagcccagggattacacatgatggcctgaggatcagaagttgttgcaaggatttgatgagacgcttccaactacagccactgctgcttaccacagtgggacccaccggtcatccctcacccatgcggtgcatgtggaagtttcagatgccaggttgatcatgccagccttacatcctggccttgaacgc

SEQ ID NO: 696095 - DNA, 364 bp, Homo sapiens
cgacgtgtgtgtgtgtgtgtgtgtgtgctgtgctgtgctgtgctgtgctgtgctgtgctgtgctgtgctgtgctgtgatgtctgtgctgtgctgtgctgtctgtgctgtgctgagctgtctgtgctgtgctatgctgtgctgtgctgtgctgtctgtgcagtctgtgctgtgctgtgttgtctgtgctgcgctgtgctgtctgtgctgtgctgtgctgcctgtgctgtgatgtctgtgatgtggtgtgttgtctgtgctgttctgtctgtgctgtgctgtgctgtgctgtctgtgctgtgctgtctgtgctgtgctgtgctctgctgtatgttctggcagtgctggtgtttgctttgtcgcccc

SEQ ID NO: 696096 - DNA, 127 bp, Homo sapiens
ctacggagcatggtgcaggtccctgcggagaggcacttctggcctgactgacagctccattgagccccatgcagtacaggtgtagtgccttggaccacagcccacagcctggtacatgggcgcctgc

SEQ ID NO: 696097 - DNA, 404 bp, Homo sapiens
gatcccccggggctgcaggaattcggcacgagtaaaacacacagcctcccttcactggcaaaaactcccacacgagagtagtcgattttttacaattgatgaaccctacatcgacacatcattggctggatgttggtcgcacgcctgtaatccccagcactttgggaggctaaggtgggtggatcacctcaggtcaggagttcgagaccagcctgtccaacatggcaaaacctcgtctctactaaaaatacaaatattagccaagtgtgatggcaggcacctgtaattccaattacttgggaggtgagagaattgcttgaacctgggaggcagaggttgcagtgagcccagatcgtgacactatactctagcctgggcaacagagcaagactctcctacaaaaa

SEQ ID NO: 696098 - DNA, 209 bp, Homo sapiens
ctgcctggctgtttggggtcctgcacggctttcccaccacctgtagctcttgttgacctgcctgttcacctcatgagtgaagcgtctgcctggcagtgggccatgaactgaggggtctctgtgtagagtagaagcttcctgtgctccggttgccaggagacagcctgtgcagttaaatggacctagattttgttttgcactaaagtttc

SEQ ID NO: 696099 - DNA, 112 bp, Homo sapiens
gtaaatatatcgatctgaaaacaaggaagggacactctgcagacctgaaaaggaatatacttccatatcatgccatctcttacactggcatacctatgcctatgcatgtgca

SEQ ID NO: 696100 - DNA, 131 bp, Homo sapiens
cttagaggatccccccttgtatcccacccaggttgcttatcgcacatctacattcacatttgcatacggcttagatatctgtattagatagatgcttctaatttgtgtaaagggttaaaggccaggtcccc

SEQ ID NO: 696101 - DNA, 156 bp, Homo sapiens
gttgacgaatcagtatgaacacattagttgtatgaaccacttgttacatgactcgctgatcataaacaaccctgtgtgtaatattttttccccaaaaaacgtagcacccttcagcaggaccctataaaactttcctccagcccttgcctctttgca

SEQ ID NO: 696102 - DNA, 155 bp, Homo sapiens
ggacgtcaagctagatgccgacgagtgatggcactgaaggggctggggaaacctgctgagaccttccaaggacagccgtgttggtcggactctgaattttgaattgttattctattttttattttccatgaactcattttttaccttcagtgggg

SEQ ID NO: 696103 - DNA, 419 bp, Homo sapiens
aggacggaggttgtactgtcacgatcatagctcactgcagctcgaacctcctgggcccaaggaaccctcccatttcagctccctgagatagctgggactacaggcatgacgccaagcacgtggaagaatctcctttctggcttggttgacactttgtacaaagtgaggttgcccatagtgaagtctttccctgggccctgttttgttctcagtaaggaaggcccgtacaccctcccttccactagacagaggttggcctcacctttcgatacctccttcttgccaggaatcctcggctgtaggcctgcattgtgatggtggccatgcgaaatcaactgatacaggctgcgaacaaagatacccacggcagtgcttctgaatgattatggctgcccaagattctttttaaggccactgca

SEQ ID NO: 696104 - DNA, 252 bp, Homo sapiens
tcacacataaatataaataccctccatgtatattacatacaaacaatcacatcatccttaatctcggtatcccatccaactatcttctactagtatgagggtaaaacatagtaagagagttggaaacatcgtgttgcaagtggctgaacagagacagctgcagctaaagctgaagcttcagtctgcagggaaaagtctagtatcgcaaatctgacaaagaaccaaatgccaaaaagccactcaactgtagag

SEQ ID NO: 696105 - DNA, 145 bp, Homo sapiens
gtgggttgaccgtggcttgtgggttgaccgtggcttacccctgatcccacacccagccttcccctgagaatcattccctgtattcctcaactttgttctcgtctccctgttcacatgcaaaaatcctcccacatcatgccacggt

SEQ ID NO: 696106 - DNA, 298 bp, Homo sapiens
gaaacgcgctctgaaagagggggcgcccatactcaggacactgactctaagccctgtagcatcaaggcgtcacagattcagcacaaagtgccaaagggctggatgttcttctggaagaaagcctttcaaatatgccaacaacttggtcttaaggggccttcctgaatttggagggagggggtctttcagcttccaagtcactcgtgacttctttctggtcacaccaagccctataaccagaaccgtccacacagcttcacgctgaccccagtagccagccctccatgccccaatggtg

SEQ ID NO: 696107 - DNA, 140 bp, Homo sapiens
gtgatttggaggtgtggagaaggggaagggagggacagctcactggttcttctgcagtacctctgtgggttaaaaaattggaacttttcttcttcccagccccacttcctgttccctacccatataggccctaaatttgg

SEQ ID NO: 696108 - DNA, 260 bp, Homo sapiens
  misc_feature (58)..(58): n is a, c, g, or t
attttgtattccagtagcgcgatttggaccctttccaagtttagcctcctgggttcangccattccatcctccagcctcccatcatttggagttgcaagaagtggtggtgcaaacttgtaatcccacccacttgtgaggcttaggcaggattatcgcttgaacccaggaggtgtaggttgcggttagccgagatcccgccattgcactccagcctgggtgacagagtgagaccatgtctcaaaaacaaacaaaaaaagca

SEQ ID NO: 696109 - DNA, 381 bp, Homo sapiens
attcgcggccgcgtcgacttcccataaaaataccaccatcattcttcacagaactagaaaaaacatatggaaccataaaagagcccacatagccaaagcaaggctaagcaaaaagaacaaacctgaaggcattacattactggacttcaaactaaactataaggctatagtcatcaaaacagcatggtactagtttaagaatagacacatagaccaatggaacagaatagagaacccagaaataaagccaaatacttacagccaactgatctttggcaaagtaaacaaaaacaaagtggagaaagggcaccctattcaacaaattgtgctgggattaattgctagccaccaggcaaggaatgaaactggattctcatctct

SEQ ID NO: 696110 - DNA, 888 bp, Homo sapiens
  misc_feature (276)..(276): n is a, c, g, or t
  misc_feature (297)..(297): n is a, c, g, or t
  misc_feature (318)..(318): n is a, c, g, or t
  misc_feature (324)..(324): n is a, c, g, or t
  misc_feature (337)..(337): n is a, c, g, or t
  misc_feature (347)..(347): n is a, c, g, or t
  misc_feature (390)..(390): n is a, c, g, or t
  misc_feature (401)..(402): n is a, c, g, or t
  misc_feature (417)..(417): n is a, c, g, or t
  misc_feature (430)..(430): n is a, c, g, or t
  misc_feature (550)..(550): n is a, c, g, or t
aacaggcaatcctggctcgggtcacctccaggccacctatgggtgaggaggttaaaaacctcttacaggaataacagtgtccacagaaagtgcctgagctcagcccatgttccgataacctcatggaagcgaccacaattaaaaaaaagtgctgctgacacctctcagaatctggtggacatgaagctctcagctggacaaggccctgaaaacatttactattagcagagccatgcgctcttgagcttcacctgctgtggtcccctggaggaaaangctagcaattctaagaaaccnacacgagattcttggttcctnaaaacntgaggtcacaagntgtgggaccncacccaggtgaggaagacactggccttcactcatcggataggncaccgcccctnngcatctggcccaggnacctgggctactnttggaaagcacgaagcacgagcacgctgtagtgatatggttgatattggtcacatgaagaagaaggaaaacggtaggggaaccttcattcagcaagacataggccgttcaatggtgcttngtaccaatcgagagtgagaggatctgtgacaacaagagtgcagcaccttccgctctgggggccacacattcttagacttggaaaaccccacttgggcccacctgctcactgtggcctcctacaccaccacactgggatccagcagctccagtccctccacaggcattaagaggtagctgaagtgtgagtcaggcaattatgtgggccactgtaggcctttcccctctcttcaagggggaaggtgcatacctctgcctcttccctgcacctctctcgcctagcaaacactctgtgaggttggcagctcttgtaccagcttagccctagttctagatcgc

SEQ ID NO: 696111 - DNA, 1817 bp, Homo sapiens
  misc_feature (1)..(1): n is a, c, g, or t
ngtcagtgtattgatactcggccttgtgtggttgcgcattgccgcatcgtgcggatttttggggtgtcgacgcttggttgagtggccgtccgacggggtgctccatccgacagggtgttgtgttccgccattatatgagtcgcacgcgtcgttgtgtttgttataatacgtgtcggcgtccactgggttgtgcatatttgtacccggtgtcgcgttgtataatggtgtgtagtccgaggggccctgtggggggttgccggaaatttgttgcagtgatctacctgagaggcgtccgtggcgccctacataccaggcgctcgtcctcacgtgtgcttctctgtgcgccgccgttcgggaagtggccggcgggcggtggagataccacgtagttgtgggctgcccatagaggggtgtctcgttgggtgggtgggagtctgctctcttgtctgctggtggagtgtatttgtcgtggcgctggctgtcctgttgtgtcgtgcggtgtcacattaccttcacgctggtggatgtgtgtagtggggggttgtttgtgtgctcgctgtcgggggtgttctaccatagtttgtgtcgtcctcgcaggggtgctttttcactaactgcgggggtgggggaattatttggtgggggctagcgagcgtagcctccaaaagtgggctgccctgtctcttactctctctcggcttgtggttggtgtgcccgcccccctgttgtgtggtgtctgtcttgatgttgtgtggttattatctttgggatgtgggtgatggtgtctccatctgaccgttgttgttttttattgggggggccatcgtagccatcatcgcccctgcgtcgtttttgtttcttgatttggtgtgggattcctccacagctgggttccgtcttggtaaagtggtatatggtgggggtcatctgtctgtcgcctctcggaggtgtttgttgcgcggcggagacgccttgttcttgtgtttgttgcgtgttccctctcgggggtctcttcgtggagttttctctcactcatgtcttggtgcgctcgctgagtactgctgctccgcgccactcgttgtttctacacctcgcatgatctcccgcgggtccacacgcatgacctcgctttgtgctccggcgggaaagggggtcttttttcttctcgggagacactcccgcgcttgtgtggggtgtcgttcgcactccgggggcccccgggggcgcgccgagcgctgtgacacgtggcgcgcgcgagatgccgcttgggggcgccgtgtctttgtcgccgcgttgtgagcctctgtgctcttgtaggtgagacttctgtgggcgcccttcgtgcccgagatgttctcgcgaccggtgtacactgcggcgacgggctttctcggggggccacaccagaagagccagatgaaccacatagccccgcgcataaggatagctccctcggtaagggtctccctctcagaaacatctccccggatgtgtaaatagaaacaccagatagaagagcttttgagagaacctccgggataacatttagatgccatccagtgcaaccgaaggttcctaccagggcccaccaactgcgcccccgcccaccaaccccaccccgcgttttcgtgagtgttgtccattttagaaaatatagagctttttgaaaatgtcctgccttttaacgtagatataagccttccccccctaccgttaatggcccgattagatccgtttttatatatgtcttattaaaatgttaaaataagataaggaaaaatactcgagcattaagtcgggcgagtaggtatgtagct

SEQ ID NO: 696112 - DNA, 86 bp, Homo sapiens
gcggccgcctactactactactgctcgaattcaagcttctaacgatgtacggggacatgttgaagaattgtctatgaaagtcgtgg

SEQ ID NO: 696113 - DNA, 380 bp, Homo sapiens
cgccccgtattatggagatgaaccaagtggattcaagaatcaacaccgatgagattatgatttcactctaagtctgtgtaatggactaaatatgaacgcctcattagtacctgatggttctcgtttaaatctcgttagaaactgcatagaactgaaattctgccatcctgaactctagggtggagaatactgtgttgacccttcaccaaagggatggcaaatcggatgctatcacggtattctgctaattactggacatactggtcgaaacatgcataagtgccaatcctttgaatgttccacggatatactggtggacagattctaatgtctgtgaacaaacatgtctggtttggagagtccatggatggtgcgttttc

SEQ ID NO: 696114 - DNA, 610 bp, Homo sapiens
tgcaggatctcgaggctgaagaatgtcggtactcagagacttctctagctcaaggaggatgttcaaacccatcgcaaggaagctaaaaaccttgaaaaaagattagaccaatggctaactacaataaacagtgtagagaagaccttaaatgacctgatggagctgaaaaccatggcatgagaactacaggacgcatgcacaagcttcactagccgacttgatcaagtggaagaaagggtatcagtgattgaagatcaaattaatgaaataaagcgagaggagaagtttagagaaaaaagagtaaaaagcaacaagataaagcctacaagaaatacaggactatgtgaaaggaccaaatctacatttgattgttgtacctgaaagtgacggggagaatggaaccaagctggaaaacactcttcaggatattatccaggagaacttccccgaactaccaaggcaggccaacattcaaattcaggaaatacagagaactccacaaagatactcctcgagaagagcaaacccaagacacgtaattgtcatattcaccaaggttgaaatgaaggaaaaaaatgttagggcagccagagagaaatgtcgggttgcc

SEQ ID NO: 696115 - DNA, 129 bp, Homo sapiens
agccatggacaaagagagaaactggaaggaaagacaatcagaaacttcaacccaaagccaatctgactggtccagaaattttttactgtgatatataatctttaataaagtttcttttcccaccaaaaa

SEQ ID NO: 696116 - DNA, 341 bp, Homo sapiens
  misc_feature (124)..(124): n is a, c, g, or t
  misc_feature (136)..(136): n is a, c, g, or t
  misc_feature (222)..(222): n is a, c, g, or t
  misc_feature (244)..(244): n is a, c, g, or t
  misc_feature (306)..(307): n is a, c, g, or t
  misc_feature (318)..(318): n is a, c, g, or t
cgtgacttgtgtggtgttatggatgaatattattgagagagagagagagggagtcatttctttatttttataaagtcgaaaaaggtgggaataggattaggatcttccaagcatatgcttctcnaagaccattatnataaactttacctttacctttcttccatcttctatttttctattttttttctctccaatattccacgttttctctgcactattttncaatcctttacatatctaaatngcatactttaacttcttcaattcttcctaaagagctaagcttttgacgcttggaaagaaganntcacataacancacacattccaggagtcctgtgt

SEQ ID NO: 696117 - DNA, 100 bp, Homo sapiens
acggtttgccagttagcggcatctacggctcaacatttttgtagccacaggcttccacggacttcacgtcattatggctcaactttcctcaactggcaaa

SEQ ID NO: 696118 - DNA, 446 bp, Homo sapiens
attagtaccgagggaaagatgaaatatcaccaagcatatatcgcacgtactaacccctatcccttctgcataatgacttacctcgaaataactatgcaaggagagctaaagctaagacccccgaaaccagacgagctacctacgaacagctataagagcacacccgtctctgtagcaaactagtgggcagatcaataggtagaggcgccaaacctcacgagcctggtgatagctggttgtccacgctagaatcttagatcaactttaaatttgcccacagaaccctctaaatccccttgtaaatttaactgttagtccaaagaggaacagctctttggacactaggaaaacaacttgtagagagagtaaaaaatataccacccatagaaggcctaacagcagccaccaattcagaaagcgttcaagctcaagaaccactacctaaa

SEQ ID NO: 696119 - DNA, 353 bp, Homo sapiens
gaagcaatggatggtgtgtctgtgggtgttgggtagggccaggtgattgtttagagggtcagaagtccagggccggcgccggtggcttatgcccctaatcccagcactttgggaagctgaggcgggcggatcaccttgaggtcaggagttcgagaccagcctggccaacatggtgaaaccccgtctctaataaaaatacaaaaatcagccgggcgttggtggcacatgccggtaatcccagctactcaggaggctgaggcaggagaatcgcttgaacctgggaggcagaggttgcagtgagccgagatcgcaccactgccctccagcctgggtgacagagtgagactccatct

SEQ ID NO: 696120 - DNA, 206 bp, Homo sapiens
ggtcggtacctcctcagctgagttcatgctgccggcggacagcagtatcccttctcagttggaccgcatcgacgtggtggtggccagcaccctttccattacggtgatctctgggcagttcctgtcagtaacgcaggtgtgcgctcctatgtagaagtggtgctgtttggccttcctggtgaccccaagaggcgctatcgaactaa

SEQ ID NO: 696121 - DNA, 196 bp, Homo sapiens
agatgctgctgccttgagcgtgccctaaagagccacccaaggagctggacacggcctcctcggaggagaacaatgaggacggagacttcacggtgtacgagtgccctggcctggccccgacgagtgcaaatggatggtgcgcaacccctcttttcgaccacgcggcactgtccgcgcgtaatcgccttatgcgagc

SEQ ID NO: 696122 - DNA, 123 bp, Homo sapiens
ctcgcccagtgtcagccccatgactgggcagcactcttggtttcatcagcacacacgcacaggaaggacccttccacgttttcacagaaggcttcacaacacacccagtgcacaacgcagtag

SEQ ID NO: 696123 - DNA, 223 bp, Homo sapiens
gtgattagaggatcccgatggcagtgggattggtgtcctaagaggcataggaagtggagtgtgaataccatgggtgatgggtccaggagaactagactatggttcttgaatatctggtccacaaagaatatactaacttttggtcaactttctcagaaactcccaactgggagtcgggtgagaccataggattttctggcacttccacacattgcctggttcc

SEQ ID NO: 696124 - DNA, 223 bp, Homo sapiens
agactgagcacaggtttgcactggcatgctctgagaataggaatagaagcatgcacactgaaccatcctatgtctgggctccaaatggaactatagtttcattcaaatcttcaggcggctataggttctggctgcaggaatgacacctctcggcttagtaagggctgcttattgtgggaatatgactcccatctggaagagcagatagaggacctgaccaccg

SEQ ID NO: 696125 - DNA, 147 bp, Homo sapiens
tagttaatcgctctcccccctgtctctccgtgcagctcgtgacgactccctggtaacatgtttggggcttcgacctagggccacttagtggtctctctgggtctttactttgtcagatgtttattctacattgtaccccaggaacag

SEQ ID NO: 696126 - DNA, 812 bp, Homo sapiens
  misc_feature (175)..(175): n is a, c, g, or t
gggctccgtgctgcggtgcgctggtgcctgtgaggcgcggagcttgggagcggagcccaggccgtgccgcgctggcgccatgaagggcaaggaggagaaggagggctggcgcactgtgttgtggcgctggcgtgcggaagcccctgagaatgagcccgagctgctgcaggagctncaaggatgcatgggcaaatctgtctgttctgtgggcctgaaatgtacccggagtgcggctggccttgctacggccgcgctgatcaccctggaacccgctgggtggccgtgtattacaccaaccgggccttgtgctacctgaagatgcagcagcactgagcagtgccctggccgacttgccggcgcgccctggagcttggactggggcaagttctgttgaaagggcggcacttcttccttgggccggtggccaggttgggaaattggaaaaacgtatattagcagtaaggcgccatctcggccaaatcttgtggcgagggagaacgcttatcacagctcgtggcgccaagggagaacacaggcgggtcgtgaaatctgcggggagacagaatattcccacgaggcgctcttcgatattcgcgacaagagagaacgctcgttggaaacgagtatttcggaaagagctggcagtattccaatcagggaggaaggcggatgcttgaatctctacttactctcttccgaggcttcagtttggcccggaggaagcggttcaggacgggatgctagggaaataggtgccatacggaaaacccacgaggggtgatgaaggacggacaagcaacgttccggggccc

SEQ ID NO: 696127 - DNA, 104 bp, Homo sapiens
gaatagcaggtagaagaagaagaaaataaaagaaagggaaagaactgatgaaggaggaactgggtactagaagtggttgaatgaaataatcctgcttatctcct

SEQ ID NO: 696128 - DNA, 405 bp, Homo sapiens
tggtccttggtttctgcccaatgtatcggtaatgcgtgttcaacccctccaggacaacccagtttcgctgccgaacgacttggactactttgccttgcttcccagcatccttgccttctaagatttctaccatgtctccacagaataggtgccagtcttcatcagagatgggctctaccactacctggcgccgcctgctccatggaggattcttccttttgtctgctatggaacctggacggctcattccatagcggtagaagggggaggaagtggctttggatgccaaggccagcagggctgagagccgcatagctagattcaagaaatctcaccagggaaacactcaaaaactttgccagcggatttttgggagatgtagtcaaattgcggaaaggaaggctc

SEQ ID NO: 696129 - DNA, 292 bp, Homo sapiens
  misc_feature (279)..(279): n is a, c, g, or t
caaactttgatgctccagttctggttcatacatgcagacctgaaaactctgcctgatttaggcagagatctttatctgaccctcagcttccctctgtagatatatagatatataaatataaatatgaatataagtatgttttacagcacagcatctgacctgtagatggaggttttgttggttgtttattttcccctcttgcaagtgctacccatgtgagtgtgtgaagtttctctactaagtaaaacacaggcccttttccttgtttgctttgtgttngcttattgtaaac

SEQ ID NO: 696130 - DNA, 227 bp, Homo sapiens
  misc_feature (82)..(82): n is a, c, g, or t
gctctaaaaaagaactaaataaaccaggcatggtgatgtatgactgcagtcccagccactcaggaggctgaggcaggaggantgcttgagcccagaaggttgaggctgcagtgagccatgtttgcgccactgcactccagcctgggagacagagcaagactctgtctgggaaaaaaaaaaaaggcttctggggagggctgacctccaatacggagacagcattatca

SEQ ID NO: 696131 - DNA, 508 bp, Homo sapiens
gtgaataggcagcacagaaagacgaacatcgccatgtacacttagagtgagatctaaaaatcaaaacaaatgaaatcatgggcagagagtagaaggaaggtaccagaggctgggaagggtagtcagggatgggaatagttaatgggtaaaaaaaaattagaataagatctactattgattgcacaacaggatgactatagtcagtaataatagcatatttttaaataaagaacgtaaaaattagccaggtgtggtggcacacctgtagtcccagctacttgagaggctgagacatgagaatcgctagaacctgggaggtggaggttgcagtgagctgagactgcaccactgcactccagcctgggtgacagagcaagactccgtttaaaaaaataaataaaataaaaaataaaataaaagtgtaattggattgtttgtaacttaaaggataaatgcttaaggggatggatatctcattctccataatgtgcagttccgccccagcgag

SEQ ID NO: 696132 - DNA, 255 bp, Homo sapiens
gtgtacaggcaaaacaggaggattgcttgaggcaggagtttgagaccagcctgaccaacataatgaaaccccgtctctactaacaatacaaaaattagcctggcgtggtggcacatgcctgtaatcccagctactcaggaggctgaggccggagaatcgcttgaccctgggacgtggaggtttcagtgggctgagatcacaccactgcatttcggcctgagccgacagagggcgactacatctcaaaacacaaaa

SEQ ID NO: 696133 - DNA, 354 bp, Homo sapiens
agattgttgctcatctgagtatgatggaaacaaactgacagtgttttatatcattttgaagacagtataagcaaatgcatgcatatgctaaatggaaaatgaatttagaactattggctgttgggaattattcccagctctaaaatatagtgcaccccacatattataagagaatgcggtgtctatactggcttgaattggtgaaattaggattgaccgggaaggactgtctctgaaatctggttagtaagcgttcctgttcaggtagcacatgcatttcagttgtcaactgggaccattaaccgcggctatgccaatgacaacctgtccattccctgggatacagtagggaga

SEQ ID NO: 696134 - DNA, 116 bp, Homo sapiens
ccatgcagcatacatgatcaggttattggcctgctcgctgcctacggtggaattgtgtgtcaaagaagggaaatggccgtcgtaggcgccttcgccgcccaggcggtggcaactgg

SEQ ID NO: 696135 - DNA, 477 bp, Homo sapiens
  misc_feature (322)..(322): n is a, c, g, or t
  misc_feature (369)..(369): n is a, c, g, or t
  misc_feature (377)..(377): n is a, c, g, or t
  misc_feature (433)..(433): n is a, c, g, or t
  misc_feature (459)..(459): n is a, c, g, or t
gcgcggggggcgggttataaatttcacctaaaggaaatgtaggaaaactgaggctttcctacaagggagggtctgtggctcacaaaggcctgcatcactttcatgagcgacacctggcgttcctcttggcacatgatcatctcgataggtagcaggtttatgactgctttgcttttataagtgctgttgcataaaggttacctgaatgaggatgaacacaacgacgtgtacaaaacaaatataataaataattaaataaggtggaaaaaaactgaatggttcaaatgaacaaactcctactgctccgcaaagaaaacacgangagcttcagaaacatctcctctgagagatgcaagagatatgagtaantacaacantaaagaccttgataggataattgaggataccgtttaggtaacaagactttcttgantgcctcataacagaggtctatttttncactttttgcccttgcat

SEQ ID NO: 696136 - DNA, 1462 bp, Homo sapiens
  misc_feature (59)..(59): n is a, c, g, or t
ggcctgatccgggcccgtgtggcggcggtcgactgacacttcagtgtccggatcctcgnggagtcccgagtcgcggggatgtgcgagacctgatctgtgagccttgcgttgatccacgcgatctcgtgtcgtgacagtacctggtgagaacatcgagatgactccgttccgtgagttgacactcgagggcatttgcgattggagacgtccaaggtaaccatcgagcttttcactactcgttctggcaacactcatggacttctggacccccattggccaaagaaatacctagagacggaaaaccgtctagacgtggctccgaggaacccagtggagatcgttggggctacatttgcggattggggagaaatttgcgccgattccaaggcgattgcgtgtgctcacagccgattccaatataggagttccctcgtggcctaacaccagattgcaatagggttccgttcggtggcgggcatattccccctttgggggccggcgactaagaggatgcctccatcatgctttctcggaaattgggggaaagcttcgccgagtcctttgggggccagctacggggctaccatagggccccaaaacacacttaagcggttacgggataaccgcggaactatgccgggaagcgctaacggaaatgtaagtgtggcacagacgcccgtagaagcggatgtgtaggcgcccacgaggagcaccgcagacagttgtgcccaagtaattcacctttcggatacgatggttcgccaacggaacattacacgttgcgcccttttggaaaaaaccgtcggcagtcgcctgcgtcgagaaataggcggctctcctcgggctaccgcgaactgttggcggtactagccggttggagacacaacgcgcaccattggcaaaggtatcacggcgctgacggttggcaatttcaacggacacaccacagccgaagcccgtttacgcacagggcgttaacccttttccaccacgcttccaaaggcggccaacaacacatctgtagcaaccgctccatctgttggggggccattgcgagccacatttccatgtaggaaccttggcacccgttgttaaagacggcaaaccgcagccaacgcccttggcggcacggcacaaacgctgggaatatccgacgttccggcgggaatgttggggaacccacgagacgcagttgtgcatcctggcgagagttaacgattcgtccgtattgggtaggtaacacaccgataggaacgcgtgtccatggaggtgaggaaattccggcttgagaccaaagcggatcgccctatagatagtgcccccggagcgatcacgcaagccagcgttgtgcagacgaatagcgccccccacaagaaacggcggaaaacacacttgggtctagagagcaagtttgcggtagcacgccaaccttatcagcctgggggggggggcaagaacaact

SEQ ID NO: 696137 - DNA, 314 bp, Homo sapiens
  misc_feature (67)..(67): n is a, c, g, or t
ctgcacactgacttaggagagtgtactcgtaggcggacagctttagtggccggccgcccctctcatnccccgtaaggggcagagtcctttgtactgaccagatgagcacatttacatccaggagcctccacgaattggaagggtttattgaaaactacagctggagagttgacatagagtgtgtccaagagctcctaaagcttgcagaatttatccacttagttggagctatatgacatacattttcatagagtgtcctggttcatagtccaggccggatcctactggccaggagtgtgggatttatcaggagc

SEQ ID NO: 696138 - DNA, 920 bp, Homo sapiens
  misc_feature (833)..(833): n is a, c, g, or t
gataacagactgttctctagtttccttaggacttatcccactatttgggatactattaaatgcaacttgggctcgttcattttagggaaggcgttcacttgtgttttacaaaatgtgtttaggaatagtcaacaggattcataggacaaaaaaagggcagtcctggaatcacattcgttagcacaccgtacacctcttgggcagatagaacaacttggcagaattgagagtgattccgtgtcctaaaagtgtaagataagcatagagatttgttcgtatttagaatgggatcacgagggaaagagaaggaaagtgatgtgtttattccacaagatctgtaatgttatttccacttataaaggacaataaaaaatgcaaaacattatgttggatatcaaaagcaaataaaaacccaattcagtctcttctaagcaaaacttgctaaagagagatgaaccacattatcaaagtaatctgttggctgtaaggcattttcatctttccttcgggttggcaaaatatttctaaaggctaaaacatgctggtgaaccaggggtgttgatggtgataagggaggaatatagatatgaacaagactgaatcttcctttgttgcacaaatagaggtcctggataataagccctgctgaaaggtgtcttattgtgacttaatgtcttttgcaagtgatccagagatactacaatattaacataagtaaagattatatattatttctgaatcgagatgtccacagtcaaatttgtaaatcttattcttttgtaatatttatttatatttatttatgacagtgaacattctgattttacatgtanacaagtaaagttgaagaagaactagtgcgatagggaaagaaatgttaaaactgccgcgcctataatagggaattaatatccctttct

SEQ ID NO: 696139 - DNA, 376 bp, Homo sapiens
  misc_feature (13)..(13): n is a, c, g, or t
  misc_feature (16)..(16): n is a, c, g, or t
  misc_feature (79)..(79): n is a, c, g, or t
  misc_feature (190)..(190): n is a, c, g, or t
  misc_feature (368)..(368): n is a, c, g, or t
  misc_feature (372)..(372): n is a, c, g, or t
attaggcttgtcnatnaactacacccctgccatattgtgcttagcctattacagcatgtgttggttttactatacgtgncattgccctccatggcggccaaacctggtgccagcttatccatgttatcattaattaatgaccaggctgctgctggcgagggaggtcttgttaagcaaccaggttgccacntattacaggtgccaatgggtgccaattaaataggggttttacatgcctgataaccaataagtccttgtgccatgcgaccgcgccattgctacaccagttccgaccctgtttacacagtaacgccatttacatttggtccagtcttgcttttccgttgaggcagttgtggatgttgtgntttnccta

SEQ ID NO: 696140 - DNA, 1343 bp, Homo sapiens
  misc_feature (1101)..(1101): n is a, c, g, or t
cgctagccgcgctcccaccacccacacccaccgtgccctcggttcgcctcttctccgggagccagtccgtgccaccgtctgccgcccaggccatcgccaccctccgtctgcctatgcttctactcaggttccgtggtccttcggtccatcctacctgcaggatgttgcggcggttccgtggcactcgctgagccgtgccgatgctccagctcggagcttacgtgatctactgtccagccctggagccgtacagtggcgtgggcatgctgctgctgcggcccctaggcatccaagtacagcgaggtcctcgtacggccttccagtccccggtggctgagcagtagtacgttgctcagcgctgcttccttcatgtctctgaatgcctgtcgcatgacgagtagtctcagagcgagtgtctctcgtgagcgagtgacgagtgctctcagtgcctaagtgtaactatcgtggtgagtactctgtcggtcgcacagtgggggctcgagaacagaccctagtcccaatggatcgcgggatgatatcgaaatgtaagcaccaacactcggctcaatctcgatacgcagattcagaacgtgctgggaaggccctttgccagtgtggaggactctagaataattaggaccccgtgtcgtgtcaggccactacatactaaaccaggtacaagaactaaacgtggatagcaagacttgtcccatcgggaatgcccaatgtgcgaagcaaactacataaggtacttccccttgtacttctgtggcccaggaggcccttccgaaaaagcccaatagtgattccagagacccggggccccaaatggggccaacagggtctcgtcagaccccgttgtgacgggtggaaaccaatccataaccggaagttggaacgcagaaagcaactggccgaagggaaagaccttgggccgacccctgaggactagagcgcttgcagaaccccaagggcgttatatacgctagaagcggaagtcaaaaaggtcgctcggaaagattccgaagaggtttgggacagacaggccagaaacaataaccccttaggagtaccctcagatagggaagccacttcagttgngctgcgcccttccacgagggggggagcacacaaattcggccaagcggcacatgaaagaaatggcttttctggagaaagaaagaaaacaggaataagagccaggcagaaatacaccgccgtagggagagatctctctttccacaaaacaaccagggagtcgtctgttgacacacatatggcagatctgtctcacttgtgaccaacacggttgtctttgaaccctttcagaacacagcacaaga

SEQ ID NO: 696141 - DNA, 909 bp, Homo sapiens
  misc_feature (833)..(833): n is a, c, g, or t
  misc_feature (863)..(863): n is a, c, g, or t
  misc_feature (866)..(866): n is a, c, g, or t
gataacagactgttctctagtttccttaggacttatcccactatttgggatactattaaatgcaacttgggctcgttcattttagggaaggcgttcacttgtgttttacaaaatgtgtttaggaatagtcaacaggattcataggacaaaaaaagggcagtcctggaatcacattcgttagcacaccgtacacctcttgggcagatagaacaacttggcagaattgagagtgattccgtgtcctaaaagtgtaagataagcatagagatttgttcgtatttagaatgggatcacgagggaaagagaaggaaagtgatgtgtttattccacaagatctgtaatgttatttccacttataaaggacaataaaaaatgcaaaacattatgttggatatcaaaagcaaataaaaacccaattcagtctcttctaagcaaaacttgctaaagagagatgaaccacattatcaaagtaatctgttggctgtaaggcattttcatctttccttcgggttggcaaaatatttctaaaggctaaaacatgctggtgaaccaggggtgttgatggtgataagggaggaatatagatatgaacaagactgaatcttcctttgttgcacaaatagaggtcctggataataagccctgctgaaaggtgtcttattgtgacttaatgtcttttgcaagtgatccagagatactacaatattaacataagtaaagattatatattatttctgaatcgagatgtccacagtcaaatttgtaaatcttattcttttgtaatatttatttatatttatttatgacagtgaacattctgattttacatgtanacaagtaaagttgaagaagatatgtgaagnaanatgtatttttcctaaatagaaataaatgatcccattttttggt

SEQ ID NO: 696142 - DNA, 157 bp, Homo sapiens
tcgagcggtacctactgcggttgctctactccctgctacatttcccagcctctggtagcatcattctactttctagttccatgagttccattgttttaatttttagctcccaaatatgtatgagaagatgcaaaatttgtctttctgtgcctgacgc

SEQ ID NO: 696143 - DNA, 305 bp, Homo sapiens
attaggttggtgcaaaagtaattgcagttcttgcctttagtaatggcaactcaaatagtattttggcctcatgcagtgtggtggactagagcttacttaaccttgggctcttagaatcttacgttggggactgtgggcccagggcccttgttcttataaagctctattggacataccatgccattcatctgcatgttgactttggctgcttttgcataaaaagtcccaagggtaaatattgcttcaaccattaagaaaggtgcccactccgaggtaggagtaggcactcacatccctgtaagaga

SEQ ID NO: 696144 - DNA, 1221 bp, Homo sapiens
gtgtcttctttcttctctggtttgctggttgtgttatttcttttattttttcttggttgtgggtctcgctcttttgctgtgctttcttttgtgtgccctcgtttgtctgtctgttgtgtgtctatttcttttttttctcttttttgttcctcttgtgtttatggtgtttcttgtttcttgtccctcgcctctttgtgtttgttctcccactttgtcgtgcctgggtggcgcgtcttgcttctgtcttctactctgtcccttctctgttctcgtgttgtttcttcttgtgttttattgttctttgtgttggatttctttggtggtgtcggccctcctcctttcatcccctttgtcctttttgttctttgtgttttttcaattgttgtcattctcgctaactctcatttccttctttgtggtctttttgttgctgggtgtgtgtgtgtctcgtgttgttgtgtttatgctcttctctgtcgacgcgttggttcgttcatgttctttgttcctcttctccctacctctctcgcttttgtttgtgtgttcgccttccccgctggttggtggtggtgtttctccttggtgctgtctattttacttgtctttctttcctctccgctctccctcgttgtgctgtcgtgtctgtctgggcgccgatttctctggtgtcgttccgtacggcgttgtctcactgtttatattgtcgtgctcgcgcgcgctcgcgcgcaccgtctcccatttcttctccttctcgcgttgtgcgtcggctgcccgcctctgtgtctgtcgggtggtgtgtgtctaggcctcgtcacctctcctccgttcacatgttgttttgccgacgatgccgaccctccccccaccctccggtgtgtgtgtgtgtgttggtttctttttgtctgtggtgtttatgttgtgttgttttccggcactttctctatgtgtgttgtgcgtgggtgtgtgttgtctcttggcagtatgttgtttcttagtcagtcaccccccctctcctgtggatgcgactgactgcgcctccaccacgcacaagcagagacaagcagcagcacatgagtgtcatagcagggatggtggcatgcaggcgcactcacatcaagagcaagaagagtgaacgcactcaacccgtccctgggtgggggggcgcgccgcccccccccccgcgtcgggcgtcgccgccccaagagccccccccccccacca

SEQ ID NO: 696145 - DNA, 320 bp, Homo sapiens
  misc_feature (20)..(20): n is a, c, g, or t
  misc_feature (194)..(194): n is a, c, g, or t
  misc_feature (237)..(237): n is a, c, g, or t
  misc_feature (298)..(298): n is a, c, g, or t
  misc_feature (302)..(302): n is a, c, g, or t
  misc_feature (317)..(317): n is a, c, g, or t
tcagcattatccccggcgcnaactttcctgccgctgagaaaggcggggagcacagtctgcgggttcgcggccgaggcagtgggggccgcccggattcttggagagggcgcactgtgaccacccgctccgtgcagcaaggaacaacaaggcggtgcgcgccccagcccccgattggggcccctcagctcggatcncgagacctcaggggaccaggcccgccttttctgcctccttgtnccacgcgcgctcacctggctaaggcgcccggcatacgccctggccggaggggccttggcgntctngtccccagggcaagncgc

SEQ ID NO: 696146 - DNA, 134 bp, Homo sapiens
atcgcaatcatgcaatctaacgtaccacgcataagctgacagtactatccgccaacccaatactattcgccatcttttggttcgggaaaaaggactgcgccaccagagcccccgattatagcgcatcgttactg

SEQ ID NO: 696147 - DNA, 305 bp, Homo sapiens
cccgtcatgaggctccggtgcggcttctcagctgacctgccgttggaggttccaaacggatccacccaagggcatttccgttcgaccttaggcagttccttcttttaccttggggtccaagttttattccccgtttcaattacatttaactttcaaggttcccttattggagttaaggaaccttgggtttaaatagggtttttttcaggggaccttcatatatttattcttaagatacatccagccctagtatccttcatcaagttccagcgcatcctcatccagcatatgaccacctcttggcc

SEQ ID NO: 696148 - DNA, 1106 bp, Homo sapiens
ttcggttggtgggagtggaggggacggggggggcggcgtggggtgtgttgccgctgcgtgcggggggggggggggaagatggtcggggggggtttggtgtggggcccggggagggctcgtgtggcggcagcgcgccccgtgtggtgtttggcgcccggcgagcccggcgcggcaatggcctgtgtggtgggcggtcgttgttgcggccatgtattcttcggcggggccgttggcgcccggtccccatgcggcccccggcgcgtggggtccgggcggtggggggtccatagtggggtgtttggccatgtactgtgggatggcccccgtgagtgtggggtccccgggggtacccagggcaccccttgggcatccgggcctggtgcttggtcagcagggcccgaggttgccccagtggcgaggcgtggtgcccgagtctgtcgtcccgcggctgagcgtaaccttgtccgtcactgtttcaaatcgtatccctcattgcagcccattgaggtggatttaacccaacccaggtacgccgaatcttagcatactcctccattgacccccataggatgaataatagccagttttgaccgtacaacccttacatggcccattcttaatgttgaactatttatatgtatcctgactagctgcccgcattcctactactccactttaaactcccagccccccgaccctactacttatttccccacctgacaccaagctaacatggactgcaccacccttaattcccatcccaccctcctttcccttaggaggcctgcccccgctaaccggctttttgccccaaatgggcccattatcggaagaattccaccaaaaacaccaatagcctctatctatctccccacccatcatagcccacccatctcaccctcccttaacctctacttctacctacgcccgaatttactcccacctccaatccaccactactccccctaatctaaccaacgtggaaaataaaaatgaccagtttgaacaatacaccaaaaccccacccccattcctcccccacacactcatcgcccttaccacgctactcctacctatttcccctttctatcactaataattttata

SEQ ID NO: 696149 - DNA, 220 bp, Homo sapiens
cctgagtgtcccaagcttttaccgctgcatttggaagtttttgataactgattaaatctctttattaattattggtctgttcatgtattattcatgatacagtcttagaaagttgtatgtttctaagaatttaagcattccttctggttatccaatttgttggcatataattatttatagtagtcttttatgatgcggtaaaagcttgggatcctctaga

SEQ ID NO: 696150 - DNA, 330 bp, Homo sapiens
  misc_feature (17)..(17): n is a, c, g, or t
  misc_feature (26)..(26): n is a, c, g, or t
actaacattacagcagngtgttggtngctggtaggtaggcacggagtaacgctataacgacgcccaatcgttatgaatgttctactaactgctttttctctctctgctgttctagcgttcaccataaatataagacatcttcttcttctttcttcttctatggtgtctacgtgtagagcaagagtaagtagtgtactactacaccactagagagagatatagaactggctgaaagacaacaccttgttggaaccccccccccaaataaactgaagaaaatcaaaacaagagaatatactcaacaaaaacaataaataaaaaaaacataca

SEQ ID NO: 696151 - DNA, 1150 bp, Homo sapiens
gctgcccctcatttacataaactacttatactacgcactttaccatctcactttcttacggagctactagcctactactcgctcacacctcatatcctcccttacctatgccctagcacacggacactacactacttactctgctgtcttcactctactacgcctacctcttcataaccccctcaacaccccactccctcttagccaactattgtgcctatcgccatactacgtctttgccgcctgcgaaagcacgcggtgggcctagccctactagtctcaatctccaacacactactggcctagactacgtacataaccttaaaccttactccaactgcttacaaacctaatcgtcccaacaacttatacttactaccactgcacattgacttttccaccacacaaacacataactttgaactcaacacaaaccacccacacgcctaacttattcacgcatcactccctctactacttcttttacaccaaatcaaacaaccaacctatttagccctgttccccaacccttttccttccgaccccctaacaacctcccctcctaactactaacctaactgaactcctaccccctcaccaatccatggccaagccaacgccacttatccagctgaaccactactcacgcactcaaccctctacctctctatactaactctccctacaacactttccctttactttctaaccactctcacggcccacaagacattaacttactacttcaacactcttcctttcgacaccccacccttacatccccaccctgtgcgtcattcacccccgcatacagtcaaccagccataaacgccctaaccgccgcgcacaactctccaatctaaccccctattatcctccccttcccctccctccttcccacttactttccctttcacacccccctatgccaccctaccactcttatcacccccatctcactgccccgacatctcaacacttctaccccacttctcctctcgctctccccacacctctctcttcacccccccctcaccctcccttatcctaacccctataatcccacctgcacacattcttcccctctcacacccctctcatccccactacgcaacaaacccacacctacatctcactcctcacaatacat

SEQ ID NO: 696152 - DNA, 1003 bp, Homo sapiens
  misc_feature (178)..(178): n is a, c, g, or t
  misc_feature (180)..(180): n is a, c, g, or t
  misc_feature (193)..(193): n is a, c, g, or t
  misc_feature (227)..(227): n is a, c, g, or t
  misc_feature (724)..(724): n is a, c, g, or t
gcgtctttcgttctttcgttctttcgtctttctttctttctttctttctttctttctctttctttctttgctttccttctttcatctctttttgtaattgtgttgcaaatcatgtgaggccaattttctttccccttccttccttcctttttttctgtttttttttttttcccagagncntgcactccagccngggtgacagagaaagactctgtctccaaaacaanaaaattaaacacggtatgattccacttatctatcaagtgtctagagtagttaaactcatagagttgcaaactagaaaggtggcccccaggggtgggcaagagagaggagtggagagcttggtgaatgggtgccatttccattttgaaagataaaactgttccggagacgatgacggtgatggttgctaaacaatgtgaacgtacttaatgtcatgaaactgtaaactgaaaaacagtggaaattgtaaatgtttatactggccattctatatgaactgatatatatttataatttttaaacaaaaaaaaaaaaaaaaaacttgggggcttattgtcgggggggggaaaaaggggtttgaaagtggcactttggccaatacgtggttcctggccacgttttttttgtcacaagcggggaaactggggcgccccccaaatagggaggcgaataaaattcgaaacccgggtacctgttggcttctccccaaaacaaaaanccgaacacaacaaagaccacagtcaaagaacacaggaggggaacaacacgtttacaaaaaacctgcgtacacaacactatacactcagcacatactcaccatcatcacacaacaaaacgacgaacactatccatacacacaaaaacaaaatatttaaatacaagcgggacaaaagacaccaaaacaaccaacataacaagaacataaaaccaacgcaagcagatcaaaagaacgcacactaataacagaaataatcaaccaaaaacacaaggacacgaa

SEQ ID NO: 696153 - DNA, 878 bp, Homo sapiens
ccaatttttgcatcttttagtagagacggggtttcaccgtgttagccaggatggtctcgatctcctgacctcgtgatccgcccgcctcggcctcccaaagtgctgggattacaggcgtgagccaccgcgcccggccttggtgtgattttatatatagactttgacatgaatagcctcatactctctgagcaatcacacattcgacaaggtgcctgtgagcaggctgctggtctgacaccgaggcccgtggggacggcggatgtagcctgcatgcaggagggaaggctcgactgtccaccagtgacacatgctcagcaggatcgacatgtggctcctgagacaactgctgagagaatctgatccaggttgtgtgcaaaatagaagaggctggtatcaagaattagagtcactttactgcgaggcagtctggtatgcaggtaaaaggtgaaattaggaccaaagacggagaacatttgacaatttctattaacagtttaaaaagttgatctttatctttattgggaagctgatgtccagagaacgagccaagggattattgggaaattccctctatattttaacaatatataatggtgcgtgtgtgagcatggagtctacgctctggtaccccagactgtaagtgcagtggcacagaccttgggccagctgcaaacgtccaaactgcccagagttgcaagaggcattcatcacccgcgcctcaggcgtccaccaagtacgctggggaaccacagggggtgagccaacccaggcctggagtaaataggcggggcatgccaacagaagcgggtcgaaccaagcatggggaccaggcggaacaggaatacctggaatcaacggaacggacgcgataggcccgc

SEQ ID NO: 696154 - DNA, 370 bp, Homo sapiens
agcgggattgatggtccagagcgtcctcctccgagtaaccgaggccccagcgtcggttcgaccaccgggagacccgcggtcctctcagtggcacatccgggcggccatttctttctgtaaagagcaagcaagacattcagctcccaccagccactcctaaaaggggtgatgccaacagcatacacacggagacgcacaggcagagaaacgggcagctgggggcttccctgaacacccaaacaacaaaaaccacacagtgcaatggcacacctgagaccaggggcagcaggctaccccatgaggccagagagtcagcattttcagatctgtgggccagacggtccctgtcatgctggctcaactctgtctt

SEQ ID NO: 696155 - DNA, 601 bp, Homo sapiens
  misc_feature (178)..(178): n is a, c, g, or t
  misc_feature (180)..(180): n is a, c, g, or t
  misc_feature (193)..(193): n is a, c, g, or t
  misc_feature (227)..(227): n is a, c, g, or t
gcgtctttcgttctttcgttctttcgtctttctttctttctttctttctttctttctctttctttctttgctttccttctttcatctctttttgtaattgtgttgcaaatcatgtgaggccaattttctttccccttccttccttcctttttttctgtttttttttttttcccagagncntgcactccagccngggtgacagagaaagactctgtctccaaaacaanaaaattaaacacggtatgattccacttatctatcaagtgtctagagtagttaaactcatagagttgcaaactagaaaggtggcccccaggggtgggcaagagagaggagtggagagcttggtgaatgggtgccatttccattttgaaagataaaactgttccggagacgatgacggtgatggttgctaaacaatgtgaacgtacttaatgtcatgaaactgtaaactgaaaaacagtggaaattgtaaatgtttatactggccattctatatgaactgatatatatttataatttttaatatttatacatggtatattttcccacaataaagatgaaaattaaagcagttggatgtttaaaaagaaaaaaaaaa

SEQ ID NO: 696156 - DNA, 377 bp, Homo sapiens
cttcctcataatattttatactgagagtatcatttatatgagagctgtcccccgtgctcacagaagtgggttctctgaatcttggaagacagcagcgacaggattccccgaacccgtgtttgatgaagctctgactgaggagcaagcgagcaagcagcagttcgtggtgaagatatggaaaagagtccctgagcccctgcgatttggtgaaggaagctacgaagaaggaaggagcgctaacgatttggtggtgaagctaggaaaaaggattcccggaaggagcgagtgcaatatggtgatgaaggtagcaggcggcttggcttgtcaaccacacggaggaggcgagcaggcgttgtgcgtagaggatcctacaccag

SEQ ID NO: 696157 - DNA, 400 bp, Homo sapiens
taccagagtgaatgtcacagcaatgaaaataccaggtccattcatgcagtccttgtccacgtggagcttagagtctagtgcaggatacagataacacccactaaatgcacagttcacaatgtcttcacatttggctctgccactgccccaggcagacaggttgctgaactgactgggagcatctgataaagatggaaggaccctgcttcttaaagatctagcctctgatatttggcagtcctaatacattacagcctactagatcattttagacctttcttgaggacctattcttataatagccttattgaggctttgggtgtccctatatgcaaaggccgatcaaaatacactcttctcatttaaaaaaagaggaggggaaggaaaatctacagaggaa

SEQ ID NO: 696158 - DNA, 317 bp, Homo sapiens
tatgttacagaaatcagaggagagatagtgaagggagccccttggagaacaccagactcccaggccccctacatctatcgagtttgcaatgtcacaacctctctgatgttgtgctcagcatgagtctttaatagaagttatatatgtacgtgcactctgctaatcattgtgggtgaaccagtggaacagcgggaaaactttgctattattcacagattgcctcctaatgacgcgactcaaaaggaaaccaagtggtcaggagttgtttctgacccactgatctctacttacacaaagaaaatagtttggggagaaca

SEQ ID NO: 696159 - DNA, 752 bp, Homo sapiens
ttcctccacggttctgtgcagcgtgtaacaactcaggcctgtacgacagcagtaggttggagccatcaagcatgtatccgtatgctctacatgtgggatattaatcggtggagactacattttctcagtgatatactttgtagggttaaatacctgcacggcagggggctcgagatattccatttaaacacggagcagcctagttctaacctgaaactctgtgggtgaagaagacatctgtggttggatagcgaagaggctaaagagtctgcagcaggacttggagactgacggagtgactgcgggctgggggggcattacccagtaggaatgtgaagccagaggttccggattccgggacatccacccctgggcaagtgagagcatctgcaaaacgcaaagagaacgtacctcatagggacaggatgagccaatggcagtctcaagaaactgtactcgggcgaacaccttacctgtggaaagcacatcttttcaagataagccactgggactcggtaggtggagccccagctgctcttctagggactatgggcccttcgtggcatctctgtgcagtgtgctggggtaggaggcttgatgtcaatcggtgactctttgcagatccagcacgttggcggtgattcccaaggtcctagaccaaagcagagggccagttgtttcagtttaaacagacatgtctctagtctaatagattagtaacgccagtaaagtataactccgctggtgaagta

SEQ ID NO: 696160 - DNA, 221 bp, Homo sapiens
gcggtccttgatgatagcacgcacagagcgtaagagagctctgtaagagatttgaattcatcagtgaagttaaaagtcactggccgggtgccgtggctcacgcctgtaatcctagcattttgggagcccgaggcgggcagatcacttgaggtcaggagttccagaccaacctggccaacatggtgaaaccccatctttactacaaatgcaaaaattagctg

SEQ ID NO: 696161 - DNA, 394 bp, Homo sapiens
  misc_feature (8)..(8): n is a, c, g, or t
  misc_feature (20)..(20): n is a, c, g, or t
aatgtccnaaatgcaagtcnacactggggtttaaggggttttaaataaaatgaattttggggggacacaagtttaagtcccataacattctgtccttgacctgcccaaaatgtatgtccttctccccatacaagataaatttattcccatccccagccgggcatggtggctcacacgtgtaatcccagcactttgggaagccaaggcaggcggatcagaaggtcaagagatcgagaccattctggctaacacggtgaaaccccatctctactaaaataaaaaaaaaattagccaggcgtggtgcgggcgcctgtagtcccagctactctggaggctgagacatgagaatggcataaacccgggaggcagagcttgcagtgagccaagatgggcc

SEQ ID NO: 696162 - DNA, 633 bp, Homo sapiens
ggctcggtggtggccgtgcggctggatccgctcccgcaaggtttgtggactggcgccgtcgtttcggaacatctatcgtggcctggttctgtgaccgtccctgtgggtgggctgatcagtcgcatgcatgtctactggtctcattctcatgatatgggactccttccagtagtggtgttgagtttgtcattcgttccaggctgcaaacagcgtaaagggactggttcgtggtgttgagcgatgtgggagacatgtgtgactcgttgccagagacgatacagcgaatccatgagtccagtgcaacggccgtcttcgtcagtgaccgagcgtcgtcgtgccatcgcctttcacgaggaaggctcgctatcaccaaaacgtgttcaacccaaggctgccgggagtactcaaccatatggccgagacgtagaggtgtgaaaggtgacatggtacgattaaagtaaactaatggtagttgagaaactgggtaatcgctgggacggaatgaatagagtggtgaggtgacaggtgagagcgtatagtagtaattgtgaaaaagtaagtgcttaatttgggtaagtcaccaatttagcacacagtagagggaaggggagatgaatttaagagaaacattat

SEQ ID NO: 696163 - DNA, 589 bp, Homo sapiens
  misc_feature (1)..(1): n is a, c, g, or t
  misc_feature (111)..(111): n is a, c, g, or t
  misc_feature (135)..(135): n is a, c, g, or t
  misc_feature (149)..(149): n is a, c, g, or t
  misc_feature (173)..(174): n is a, c, g, or t
  misc_feature (183)..(184): n is a, c, g, or t
  misc_feature (187)..(188): n is a, c, g, or t
  misc_feature (193)..(194): n is a, c, g, or t
  misc_feature (237)..(237): n is a, c, g, or t
  misc_feature (267)..(267): n is a, c, g, or t
  misc_feature (278)..(278): n is a, c, g, or t
  misc_feature (284)..(285): n is a, c, g, or t
  misc_feature (290)..(290): n is a, c, g, or t
  misc_feature (298)..(298): n is a, c, g, or t
  misc_feature (306)..(306): n is a, c, g, or t
  misc_feature (310)..(311): n is a, c, g, or t
  misc_feature (328)..(328): n is a, c, g, or t
  misc_feature (333)..(333): n is a, c, g, or t
  misc_feature (340)..(340): n is a, c, g, or t
  misc_feature (343)..(343): n is a, c, g, or t
  misc_feature (345)..(348): n is a, c, g, or t
  misc_feature (351)..(355): n is a, c, g, or t
  misc_feature (357)..(357): n is a, c, g, or t
  misc_feature (360)..(360): n is a, c, g, or t
  misc_feature (362)..(362): n is a, c, g, or t
  misc_feature (405)..(405): n is a, c, g, or t
  misc_feature (424)..(424): n is a, c, g, or t
  misc_feature (435)..(436): n is a, c, g, or t
  misc_feature (450)..(450): n is a, c, g, or t
  misc_feature (464)..(464): n is a, c, g, or t
  misc_feature (468)..(468): n is a, c, g, or t
  misc_feature (471)..(471): n is a, c, g, or t
  misc_feature (478)..(478): n is a, c, g, or t
  misc_feature (484)..(484): n is a, c, g, or t
  misc_feature (490)..(490): n is a, c, g, or t
  misc_feature (519)..(519): n is a, c, g, or t
  misc_feature (522)..(524): n is a, c, g, or t
  misc_feature (563)..(563): n is a, c, g, or t
ntggggtttttcttacaaaataatttacagtatgaaaatgatataatgaaaaataaacccaaaagtgtaattcccttgaaagattcagtgttcccttgtttaatgtaaaangagggggggggggattcggggggngggggtgggggtgnggagggggagatgggggggggggnntgggttggnnggnngtggnngttcatgctgtgtggcctgtcactgtagaaagcctggtcaggnttaaccctcattaagtattaatctgctgtnccctcaaagtnatatcnngcccngtatgggntccgtggntttnnttgcaccaatgtatccntaagngtctcgngtngnnnnggnnnnngnggngngggcctcgttctgctgtttctggtatgttctcagttccaaatnatactatcttatcttaggngggaggggtgnngagtgggggggtgnctgggtgttatggnttcnggnatggganagggtngggggnttcataagcactgctgggtggggggggtngtnnngggggtggggtttcccatatgggcttttttttttttttngggctgggctgggctaggtggatagt

SEQ ID NO: 696164 - DNA, 526 bp, Homo sapiens
tgctgatggtagtctagagatcccgtgagtgtcactgtgtgctaatggaaagtattctgagcaagttgaagggaggctaggtgagctatgatgttcagtaggttaggtgtagtaaatgcattttggttaccatgtttcagcttatggtgggcttatcagggcataatcccaccatgagtcaaggagcatctgtggtactatgatatccaagtggttttacaccattcacgggcagtgcttaaacaaaataggtgggccgggtgttggcggctcatgcctgtaatcccagcactttgggaggccgaggcaggtggatcacttgaggtcaagagtttgagaccagcttggtcaacacagtgaagacccatctctactaaaaacacaaaaaattagctggatgtggtggtgggcatttgtaatccctgctactcaggagactgagggaggagaatccgggaggcagaggttgcagtgagcagagatggcaccactgcactccagtctgggtgacaagagcgaaactctg

SEQ ID NO: 696165 - DNA, 199 bp, Homo sapiens
tctgataatcccagacactattgggggccaaggaaggcagatcacgaggatcaccagtatcgagatcagcctggcaatatggtgaaaccccatctctactataaatataaaaattaaccaggcatactggcgagcgtttgtaactcccaactactcgggaggctgacgagcaaggagaatggcgtgaacccgggaaggt

SEQ ID NO: 696166 - DNA, 544 bp, Homo sapiens
  misc_feature (18)..(18): n is a, c, g, or t
  misc_feature (96)..(96): n is a, c, g, or t
  misc_feature (165)..(165): n is a, c, g, or t
  misc_feature (169)..(169): n is a, c, g, or t
  misc_feature (181)..(181): n is a, c, g, or t
  misc_feature (183)..(183): n is a, c, g, or t
  misc_feature (230)..(230): n is a, c, g, or t
  misc_feature (264)..(264): n is a, c, g, or t
  misc_feature (287)..(287): n is a, c, g, or t
  misc_feature (320)..(320): n is a, c, g, or t
  misc_feature (373)..(373): n is a, c, g, or t
  misc_feature (448)..(448): n is a, c, g, or t
  misc_feature (475)..(475): n is a, c, g, or t
  misc_feature (521)..(521): n is a, c, g, or t
  misc_feature (537)..(537): n is a, c, g, or t
ggccttgaggcggtggangcaggaggcttgctctgctggaactgctcctccaggggattgctggttttggcattttttttcctttcatcatatttnttctgattttttttagttcgttttttgtttaaaatctcttcttcctcaggggttagcttggctcccttnttgnggcccaggggcngngcatagtgggattggtaccattgtgggtagcggtgtgctgtggatgngcacgatgcaatttttcaccaggcgttttggtangaaccagctcgttattagatgcnttgtggaaaacatcgatgatccttgttttacgngttcaacactttgagccccaggggaaattccccacgtccaacctcaggcgcangcgtatttcttgttacctccccgcacacgcgactgtgtggatgcggcgggggcgaatgttgcgtgtggcgcagcngggcgccccaactcatacttccgcttnttgtggtagggctttctcttgcccccggttttgcggcgcttgttcnagttgttccgagaaangcccatg

SEQ ID NO: 696167 - DNA, 132 bp, Homo sapiens
tgtgtcgcgggcggacttcctcacccgcttctacaacagcctgcagctggcggcgctgtcggccaccctggcgacgctgatcgcggtgccggcggggctggccatcacccgctaccgctttcccggccaggg

SEQ ID NO: 696168 - DNA, 202 bp, Homo sapiens
cgcatagtcatgcgccggcaagccttgttaatgtatgcattacaactctaccctgctgtttaagatgaataggcagagttgccaggaaaagatagttgcccaatattattgcggagggactattattcatcatgcagaaatgtatgatgtaattccacctgtgtttatagtggggacatattgtcaggggtgcttggttgta

SEQ ID NO: 696169 - DNA, 848 bp, Homo sapiens
  misc_feature (113)..(113): n is a, c, g, or t
  misc_feature (773)..(773): n is a, c, g, or t
tggtgctagatttctctaagccatccagtgccatcctcgtcgctgcagagagacacgctctcgccgacgccatgactgatgcaagtatgcatccctatcgatggcgaccctcnaagggtccacaacggggtggcgttaaccacctaggatcggtcactgaccctcggcagagttcccaggtaccatggatcctcatcctgcgctctcagcagtagtaaggaccccatcaatccatgtgagaaactgaccaagggagatgcatggaccaacttatggatattccgacgagcgtgctctcgcggggtcgactcccacctctatgtgagtcgatgtggtggtctctcccgtcaggatggcccagtgtttgcccgtcctcaggctcctgcggcatggcaccctcgtgcgaccctcttggcgcatcgtctgctaaacggggtacccagcaacggcaaggcgcatcttggtcgggcccacttactccatagggaatgtgcttggagctggtgcgcctctctcatccttcattgcagtaaactcgggcccacgtaattgtccgtctgcggactccctccagcacgtagtgagaataagcattcgaacgctaattgcggtaataacgccctggcgattgtggtggccaagaattacagcgtggtaccccagggcttgggatggacgcccacctccatgcaggtggggggtggtacttgtggtttttccccggctttgctacagcccccgaaacaagaccagcataagccgttataccatcnggtcgtgcctagtgggctggggacgaaagcgtggtccacggttcttggaaccatgagtcaacttgggagcttgaa

SEQ ID NO: 696170 - DNA, 169 bp, Homo sapiens
atgatgcgagaaccccaggattgatgtagtgcaaaaatgacagatgctctccatatggcccttgaatatatttcaggtcagatagaacaagtaggggaggggaggagcattccaagatctacaggatcagagttgtgccttaggcctggtcagaacatttgtggggccc

SEQ ID NO: 696171 - DNA, 136 bp, Homo sapiens
aataacattgtctgatttactggtcagactgcttcaaggaaatccatgtagtacaaaatgcttgctcgcagttgctccataccaaatggttgcttaacccaaatatctagagcagcaaattgagctgatccttctg

SEQ ID NO: 696172 - DNA, 594 bp, Homo sapiens
  misc_feature (215)..(215): n is a, c, g, or t
  misc_feature (267)..(267): n is a, c, g, or t
  misc_feature (446)..(446): n is a, c, g, or t
  misc_feature (450)..(450): n is a, c, g, or t
ccaaagtcaccctgaagggttttgacttagcccccctgtggttgggaacagcaaaaagccttcgccagtctttcttttctacccgtcctacccagaaaaggtccgtggggtttttgctgtggggaatgaaaagaacaaggctcacttttcacccagggttctgcccacagtgataccactgcagaccctgcctgccacgcctccagttttttgantgttcatgagcccccgttgctttatgacctgtccaaggaccctggtgaaaantacaacctgttggggggtgtggccggggccaccccaaaggtgctgcaagccctgaaacagcttcagttgctcaaggcccagttaaacgcagttgtgacctttggccccagccaggtggcccggggggaggacccccccctgcaaatttgttgttattttgggtgcaccccccgcccagnttgntgccattgcccaaatccccatgcctgagggcccctcggttggcctgggcatgtaatggctcctcactgggagcctgtgggggaggctcaggtgtttggagggggtttgtgcctgataacgtaataacaccagtggagacttgca

SEQ ID NO: 696173 - DNA, 573 bp, Homo sapiens
agaggagacggggagtcacatttcagaagcacctatgctttaaataccatatatcttttcttcctcacaactcctcggagccagaacttatggtccccattttctaccaatggaaaatgaagccctaaaagagtcagtctcctcctgcacccaaaggcagggcatgaagggtgctgctggggcctgactgccagccctgggcctgcccctaggtggaagagcagctgatccgctacgtgcatgacgggagcgagacactgacagacagttttgtcctgatggctaatgcctccgagatggatcgccagagccatcctgtggccttcactgtcactgtcctgcctgtcaatgaccaaccccccatcctcactacaaacacaggcctgcaggtgagagcatccctgggaacacccccatgtctgcttcgagaaagaggccagcgtcccctacttcgcggctcagagctcccccagctctgatcctcagtttcctcctctgcaaaatggggacgctgccacatgcctcacggggttgttggaaggagagaagtgagattgtgctgaaatagaaaaa

SEQ ID NO: 696174 - DNA, 237 bp, Homo sapiens
aggtgatcgagctcgtaccggcatgtgctgtaggccagcggaccaatttaaattatgtaccgggagttcccattgtgactcagtaggttgagaacctgatgcagtctctgtgaggatgtgggttcaatccctggccttgctcagtgggttaaaagagctgacattgctgcaagctgtggtgcagatctggttggcatctggtgctgcgctggcctacagcacatgccggtaccgagc

SEQ ID NO: 696175 - DNA, 153 bp, Homo sapiens
actcttcagtcctcgagatgcccagtatttatatttaaaaggtactaaatcagaagtactgaatatagataacccagacttggctaaatatccacttttttccaaggctagaagatatgaatgttcccttgaagctggtgatgtattattcat

SEQ ID NO: 696176 - DNA, 614 bp, Homo sapiens
ttctcggccgcgtgaaacccccgcggctgcttcctgggcaaggtcgtgagtcccgctgagctgtccccggtgccgccgacccgggccgtgccgtgtgcccgtggctccagccgctgccgcctcgatctcctcgtctcccgctccgcccgtcccttttccctggatgaacttgcgtcctttctcttctccgcctatggaattctgctccgtgcttttagcccgtccgtgagccaaagaaacccctaggacaacgagatagcgccgatacgcaggcgctagtagtcagctagacgtcctccagactcgagtttctggtgccagtagtttacagctacttataagttttactataactactactacttactgttattatagcagtttttgataccgtcatagttctgtgttacacatcttgaaaggcgctcagtagttctcttactaaacaaccactactccagagcaatgggaacgctgattaccagtactacagctgctaccgccgcttctggtccttctggtggactaccctatggatgctcatcctgggcttcattattgcatttgtcttggcattctccggtgggagccaatgactgtagcaacattctttg

SEQ ID NO: 696177 - DNA, 186 bp, Homo sapiens
gtacaatttctacaccatggagttgttcctttggccacatatatgcgaatctataagaaaggtgatattgtagacatcaagggaatgggtactgttcaaaaaggaatgccccacaagttgttaccagtggcaaagacgtggaatgagtctacaagtgttaccacagcatgctgtttggctattgtt

SEQ ID NO: 696178 - DNA, 110 bp, Homo sapiens
tgactctgaggattctcacactagtcacagcaaacacataaaacacactagtttatcacagcatcgaactgattaaatattaccatttttcctgggccaccttcagacct

SEQ ID NO: 696179 - DNA, 115 bp, Homo sapiens
acaggtgatgtatgcacctctcctcccggggctggcggaagagatgcagtagctttcaactccagaaactggaatctggagcccatgagcgcggcgaatgcatcccccgcgcccg

SEQ ID NO: 696180 - DNA, 161 bp, Homo sapiens
gagaaaagtgaaaactcatatctgaaagattataaatatacttcatatcaatttcccagagaacttaaacttctaataatattggtgatattctcatggttactattttatattatttcctgcctttgtaggtactggtgtactatgacagtatataaggt

SEQ ID NO: 696181 - DNA, 339 bp, Homo sapiens
agccaaggttacttttatatgggtaggatgactgcagaaggaatggctacacatagcttccagaaccttgccatgcagtagtgctctccagaaggatgcgccaggtgtatacagattatgcatgcacaaagacaggtgtgcgccccacccaccctgggctgggcagcaagaggtctgctcacctactgcaccagacttcctagcctccttccacactccgaagtcttcaagcaggatgaaaagagaccacagaaactgaagcaagactaggatgctgcaaagaaagatgctctgatacacaaaagccaacacataagcacacaggcagggcaacagcag

SEQ ID NO: 696182 - DNA, 1185 bp, Homo sapiens
agaaaaaacaaaattcttccttctaatctacctgggcgtggtgatatgaggttatatagcgccagctactctgaaggctgacgtgcgaggatcagtagagcccaggagttggttaagtccaatcctatgagatttttaaggattttggatagatttttccctccagaatgtttgcatctcattccaccatgtgcgatcagccagtgccattcggtcagttaacatgtgtcagttacacagtccatggtttcctaacaactatcacaaatagtaagggccaggcgcccagggtatcctgcctagtaatcccaagaccacttaggggcaggctagaggcgggtggcatccacttgcaggtccaggagttcgagaaccgaccctgcaccaaactatggtgcacaaccctggtctctcactgcaacaatcaccaacacaatatagctcaggcgtaggtaggcacaagcctggtacagtcccaagctcactgggcaaggcctgaggccaggcagcaatccaccatgaaccccaggcaagtggagggtagcagcgcagccgagactcactaccagtaggcactcccaggctgggcgaacagcacgggacgaacatctctccaacaacaacacatacacaacacaccgtacgcaactgacggtgaataggagcgccagaacggaaggtccctccaacatccacaataagtccacgtcctataccattctcccactgcataaatgacgccttggacgtctcaagagcacggccacgctactccatcgcacgtacaaacgagcacaattatacaggacctcttcgtgcaagacgctgaggtgcatcttactcctcaaccttcttgggacatgtgcctggctaatccatacacacctgtgcgggcaagcacacgggatgggaaagaactggacacgcgtacacaactcacgggtgacaacatcagctcccgagggccaccaggctacgacaaaacgcagagaaccaataagagaggtgaatatagcaaaagaaacgccaccatagagagagcatacgccccaacacggactgagaaaatggaacacacaccaaacaagcagaaaacacaggcacaccagccggcaaagtcaagaacgacgcagaccaacaaacacacagagataaacccataccgaccggccgccaaaaacaaaa

SEQ ID NO: 696183 - DNA, 880 bp, Homo sapiens
acgcgtacgccggagtatgggatatcgtcgaccacgctcgattcaccttggacacgatatagtatttaatatatttttcactatctgagatacaaataaagctttattgataaaatatggaatgaaaacaccaatgtgtgttggcatatatagtgaggcagtgtgccttctacaatagtatatgttaatctttttaaagcatggatttttcatatatgccagtatgtctactattgtagaagattatgtttttaatgcctattaaaaaaataagtataatccaaatcttacctcttcaaacatcactaattctctaacctaaacccaatttctcagccacgccacccaaatgttaatttctggagaagtggtgtctttctgtcttagagttataggttcttttcttatttagaggttattgtaaggctagttggatttcttatctcatttgtcaatgatggcatattaatatttgttaaacttttcagtaatacatgaaggtaaaatttcaacagaacagtaaatcaaactgactttggtaacattacccaacaacctattcttcctccagagtaattttcctattggctgtagaaaatactactttttcttgtaattcgagaaattatgcttgcaactaatataatagcaaatcaaagatctgtattttcctgtatgtcagttgttgtcgactttttaagcaaaccacatcaaatttatgtgtcctaattggggtattcagcatccaactttacattttatacttcattcaacatcgtcgtgccctgtgtttctcagccaaaaggatattgacccttattcaccacaatgtacaggcttttccatggacctgaggtataatccctatactttgtggccc

SEQ ID NO: 696184 - DNA, 927 bp, Homo sapiens
tggaaacaaggtctcactctgtcacccaaggggggtgcagtgacgaattcacagttcattgcagcctcaaccggggttcaagtgatcctctaacctcagcctcccaagtatttgtgcctcctaggcacaaaaaattatgcccggcaaatttttggtatttggtatttttggtagaaacaggatttcgccagtgttgggccaggcgggtctcgaacaccgtgggctcaactttgatccgccgtgcctcggcctcccaaagtgcggggatcacagggtgtgagccacccgtgctcaaccaggtttatatatttaagctagtaaaacttgggatagatggtataatatatagtaagtgtaatcaatgcgccatattttttaaaggtaaattaaaacatttattaaaaaaaaaaaaagaaaaacctctggagggacacttatattgctggggggcgcggcgaacaaaagagggtaattgaaggtgccactgggccattagcgtgtttcttgtgacccaagttttttgtgttacaaggggggaaaaatcggcccggggcccccaaaaataggaagggcggaatataaattcggagaaaagcgccggcgttaacccttgcttagctgtccgtccggaaaaacgaatgaaacaaaacaaaacaccgacaccaacaacacaaaaaaagcaaaagagaaacaaaaccaaacgagaaaaaaaacaaggacagcacaaaacaaacaaaacgaacaccaacaagaacaacaacaaacaaaacaccaaagaatacggacaaaactaagaacaaagaaaaagaacaaacaaacacaaaagaaacacacacaaaaaaaccacacaaacaccaccaacaacaaaacaaaaagaataaaagacaacaaataaaaaaaaagacaaagcacgaagcaaagaaacag

SEQ ID NO: 696185 - DNA, 113 bp, Homo sapiens
tcaagcttctaacgatgtacggggacatgtgaaactgatctgttggtaactggaagaaaactcagcatctgtatttatacaataaaattgattagtatttaaaaaacaaaaaa

SEQ ID NO: 696186 - DNA, 177 bp, Homo sapiens
gcggccgcctactactactactgctcgaattcaagcttctaacgatgtacggggacatgtacttgggaggctgaggcaggaaaattcttgaacccaggagacggaagttgcagtgagctgagatcacaccactgcactccagcctggtgacagagcaagactccggctcttaaaaaa

SEQ ID NO: 696187 - DNA, 958 bp, Homo sapiens
gctgcttggaaagatggcgtccgcaaggagaggtaccggctctactgccatctcttccagctccaccgtgcgtgcgtcagtcagggcaaaggcaagaggcaaaggcggctcgggagattcagccgtgaagcaagtgcgagatagatggccttgtggatattcagagataatcacatagctattatcaagaagaaggacaaggaactgaacgttgttcaaggagtgctttggggtctggcttgtagaagatcggcgttgtaacattaccagctgcctttccttaccctcaggcatcacagaggatgatgctgactgttgatgaagtccgaatatcacgcatggaagatagatagcggagaccttacgccgatgtaaacattggatcatcttgcacggtgggctggtatcagtccacatactatggcctcattcgtacacccgggactactcctggatctctcagattatagttacgcagccatggcattcgaagaatctgtcgtactcatgaatgatcccatctgaactggccaaggatctctctcactaaaggcatagcagcaatgactcctaaactgatggaagttagtacaggacgcggcattgatcccctgagagcatcgacaagaacggccgaatatcagctttgagtacatgtactgacgcaagtgccgcatgtaatcaagacaatgcacatctgatcaatgtcctcactgtgggaactcggacacacgaagccagctgtctgcacataacccctgaattgctcaggccgtgggccaggcaggcaaatcacttgggggaagaaatcctaacaagttgccgaattggacagcatggcatgaaaccgcagcccgcatcatagttcaaatacacacacatacccttaggaatcactacccaaacaacagcaagccgagccagatcaatctcaccaagagtaccccaccacgaaaac

SEQ ID NO: 696188 - DNA, 136 bp, Homo sapiens
gttgtcagtgggttatgtttttattctacgttagttgttaggacagggaacagggccaagacctccacactcccctgggtaggaacagtcaggagaattagatatatctaaagtgggcactgacaacggcctgaga

SEQ ID NO: 696189 - DNA, 1597 bp, Homo sapiens
ctggcgctatattctgactgtgctcagaagtccatgattccactactgagtccttttggcctacattactgctaatcttgtgaagtcgtgtccgacgcttgtaatctgcgctgtcaaattgtgccaagtccgaaatctggtgccgcgactttaagggtctcaatgtccataactgttacatcgtgtgttgttcgtaatattgcggcctctacaggggactcggctcctcaaactggtgggaattactcagtctgcctccgttactatatttcacatcgttggagtggtatcacctcgtgcctatggcggtctggcataaatggggccactcgcgcgtataccacacggtgaacatacgtttgtggtgtgtacacttttgacacaactggggggctccttgttatatctgagcgccgccaagatgttcgtagtatgtaacgtgtattggccaaacgcttatgggttcctgcccaaacagctttatctgcaaatatgtgtagttacgggacactgtcgcggcgtgccaaggttaaaaggcattatcggaggcgccaccatgtaagcgcggttagtaactgccattcgagatgtcctaatccgaagcccggtgtaagaagcgcttcaagttgtagttgaatggcggacattatgttgggaatttctggggggtcctgtgtcaggagtcgtcggtttcttaatgccaatctcctgatattagtaacgatcatcggttcaatgtaagtattttctccacacatattggggccccaatgtctctaacccagtttcagtactgcaactccctactttggtctcgccatgtttaattagagcgggcccaccttgttccgcaacatacgcccgggcggaaattatatgtgctctgtaaattgtcttacgctttaacgcgccagttgcaaaggatgacgcttttttctgtatttttgcatcttgcgttcatagggaattgtatggtgtgttgcatcgtaaaggcccgcgtgtttgcaatacgcaaggcgtttcgcaactgttcgtcattatgggcccccacgtaaacgctcgcgcgcagaagtgtgatgcgatgttggtcaacacttgggtctccgccgagaggcatagttcagtcgatcgcctgcagctagaaatgtcccgctcttaagataaggtctccatcttgccctatatagcaccatctcgtacttaactcgcatgcatgggagtattcataatcagcgctgagactgcaaccattatgtcgtagagtaggaaagagcaagccgagagatccagagatatagattccaatgcgaactgcgtccattacaatatttaactagggtcgtcctatttattagccctacacgtagcaagcctgcaagagtagctgtgcgagtcatcaccgttcagccatttgccgatcggcatctaacggctcaagcattttgtacgtagccagcaggcttcgcatcggacttgcacgtgcactgtaatggctcaactttccatcactatctgcttcatcacgccaactaatatttcactttacatccaaacatcactttggcttcgaagccaatcgcctgatagctggcatttt

SEQ ID NO: 696190 - DNA, 120 bp, Homo sapiens
tggggcagatcacttgaagtcagtagtcaagactagccgggtcaatatggcaaaacccccctcggtactaaaaatacaaaattagctggggtggccagggcggggtgtctggtaatccca

SEQ ID NO: 696191 - DNA, 487 bp, Homo sapiens
gtaatatagaccagaaatggcaaaacacaaagagaacagaaacgccccatcgcgggaggatgactaaaagacatgtcttgataagatattgtacaggcctaggccaggcacagtggctcatgcctgttatcctagaactttaggaggctgaggtaggtggatcacctgaggttaggaggcgaacgttgcagtgagcctggatcgtgccgttgctctccagcctgggcaacagagtaagactccatctcaaacaaataaataagaaataaagaagcagcatgtcgagggtggtgctatgtagagttgtcgggtgtgattggcatccagcatccggaagcaaggtggggtagggtgcagagttgactgacagcagagtctactgaagcagatgggaagctggttatggagctaataagtaaattgattgagcaaataagtaaacatatggatagtaacacaagccaggctttgcacttctggagacggt

SEQ ID NO: 696192 - DNA, 133 bp, Homo sapiens
tagctcgagactatgcatataatccactcatcacaggcaatgatagcattgagggactcggggatatctacacagccatacctgatcactcacttcgcactaactttctccggtactcatgcatatatgtcca

SEQ ID NO: 696193 - DNA, 403 bp, Homo sapiens
  misc_feature (33)..(33): n is a, c, g, or t
  misc_feature (392)..(392): n is a, c, g, or t
gttattgttgtttgagatggagtttcacttttnttgcccaggctggagtgcagtagcatgatctcagctcactgcaacctctgcctcccgggcccaagcgattctcctccctcagcctcctgaatagctgggactacaggtgcccaacagcacacccggccaattgttgtatttctagtagagatggggcttcttcacgttggccaggctggtctcgaactcctgaccccaggcgattcccccacctcagcctccaaaagcgctaggaccacaggcgtgaaccactgcgcccagtcggaagtaatagttattaaccaatgtgatggccgggtgtagggaccctcgcctgtaatcccagcactttgggaggccaaggagggaggaccgcccgngaccaagagtt

SEQ ID NO: 696194 - DNA, 369 bp, Homo sapiens
atcccacccgacgggccaacaagagcaggtatgttcattgaattcgttgtgtatcccatgccatacgccatagcagcttgtggtccttttaaccttgctacaagctcctctagttcctcatgcttgtccaggtttccaatttcctgccgagtactgcacactccagctccatactcctcaaggactttggcggctgcttcttgacatgatccagtattccgtgcaaatccaagatagttgtaggaacccatgtttataacaccctttattatattccctgtatacttgaaggaccagttataatcatgagactgtctctccatgatgtccaccctggctccaggcacactacagattggccttatcgag

SEQ ID NO: 696195 - DNA, 1180 bp, Homo sapiens
tcttactacaagtgccagtcttcacttagtacctctaggcgcgcggtaggggttaccagattcctccagcttgtgcgttcttcgatggataacagtggaggcgaggccaccgggctgtcaggctgaagctccgtggcggccgggtcctgcacgcaagaagaccccagcgcctggtgcggctcagggctgggcccacgggactcgcggacgcgccgtggaaagcgttgtcgctcccggtaggcgtccgcagctgctggctgctcatttgctgcggtgacccggaggctcggggccagcatggcccccactgcctgcaaccaggcgtaccggagcgccgctgctggatggcctgcagcgggcttgtgctggaaggaaccttctttctcactcctgctgtacctccttgagggacctgggggcatcccctggttgcatccatctctgatggcaaccgaagggcattctacttccagcacagttgacacagcttgcagcagcaggctatccaaaaacgaccccagggcatgaagccaatccgtccaggtgggcccagagcctgttgacccagccagcgtaccgagaatgcttctaccccttggtacgcttacaacccaattggcgtatcctattcgtgccttcaaggtcgccacaacacacactccatgacccacatgggggcgaactcccatccatatgaaccacggccttttagggcatccccgccaggggaagccacagaaaagataggtggcaattaggggcatatggggagcaagagttggcccacttagcgtctcttacatacagttcgccgggttacgcaatagccaaaaccgccttcatcatttgcgggcccccattgtgacgacattcacccggcagcgaacactgcaggagaaacgcctactctttgtagtacttttctggtttgaaacttactttcccgttgtgtccagcccttgtgtctctcccgtatgacaagtctggtccattctgtgcggactacgacgaactttctagtgagcccttcaaaatagctattccaactctgtatgtctgcgttatccaacccgtctggttccccaacccccagttgaattacgtagcgaaaacaccgtcgcatagcctccccagcggttacgacatcgtgggcgctcttctctcagttgtcagtattagc

SEQ ID NO: 696196 - DNA, 952 bp, Homo sapiens
ggccgcaccgtggctggctcatttacagatgaggcttctgctgcttctcctagtggcggcgtctgcgactggtccggacgcgaggcctcggccaatctgggcggcatgcccagcaagagattaacagatgcagtacgccacggggccgctgctcaagttccagattctgctgttacctagagcgttactaaggcgggtgtttgacggagtacactgcgggcttatcacgccagcggaaacccacgacatccgccatcgacaggagacgaattacctccctcaaccaactatatagacacatagccatcttacctgtcagatctctcaagactagtattaataggccttaactaatcgctcggcaaggatcctatcatgctatcacttcggccatgcaacgcctcctagccatcatggcagctgagggcccaaagacaacacttacggtacactgcactgtactgaactggctacccccttcatcgcacccacccactgactcgcacaacccacccgtactgcctcacacagcgagtgcccatactgacgaataaccttttcacatgcattgttaccctggtgctggctcctacagcctgcgcaaccctgcaccacctttccaatccatgccaaacaaacattgccccaaactacctcgcacaactgaaacttgaacgctccacaagctgccctaatgcgcattcaattcctaaccacccatccggatcataagcaaccaccctaaataaagcccactctgcaataccactcctcacgcccattctaacggcgacctcaactctcccaccgaaccacccgatccactataacacatgaaacaacggcccagcatacccatgaacgcaaccagacaacaggcataacgcacacgacaccaaaaccctcctgagacaaggccaagaagcaacctcgtggcaacaccccccagtca

SEQ ID NO: 696197 - DNA, 609 bp, Homo sapiens
  misc_feature (61)..(61): n is a, c, g, or t
  misc_feature (179)..(179): n is a, c, g, or t
  misc_feature (239)..(239): n is a, c, g, or t
ggtatttagagaggttttttgcgggaaaaaccgcgctaaaaaggtgtttctgggggggganaataggaagaaaccccaaacgcgccacggggcgcgcgggatagagttggggggccctcgcgggcctaaacacaattttcccaagagggtgtttaaaaaagagggagaggtaaaaaatnaaaaaattgtggcggtctccggggccgagaaggaggggtgtgtttttctcccaaaaaaanaaaaaaaaaaaaagatgcgggggggggtgccgcgggggggtgtttttaaaaaaaaaaaatttttttccggggggggccctattaaaaaacagggggggtgggtgtaaacccccccctcctaaaaaaaatttggacaaaaagggggggttcggagggggggtttcaaaaataaatcccctttccatttaagaggggcccgggccccggggaaaaattccccttttcgggagggggaaaaaaagggggcgtaatttttttcccggggtttttaaaacaaaaggggtttttttaaaacccggggggaagaggggaaaaaaaaggcttgggagaaaggggtttaaaaaaaataaaaaaccctttttgggggcca

SEQ ID NO: 696198 - DNA, 592 bp, Homo sapiens
ctaggccagcctgggcaacatagcaagacctcatctctacgaaaacatgcaaaaaatagctactcaggaggctgaggtgggaggatcactggagcccaggaggtcaaggccatgatcgctgcactgtactccagcctgtgtgacagagcgagaccctgtcaaaaaaaattttttccttgcttttacatactggttaagaaggtggccttgctagtaaggtccaaacattcttgtcctttttttcttttttttttttttggccgcttattgaggacttcaaccccttttgttccctttttttgacgttttggtggtggtgttggtggtaagttctttttaatttacgcacttttaggcctctcttaaaggtttttgtgttttaccggctcttccaactagattccttcggccggggattccattattcatagagcgccaccaccgggtaggccaccacttttggtcctttaagggaggtaaatgaagcttgggtactcatggctagtttcctgttattttctcctacaaatgtaacatcataagtcaacattacaaacccaacccttataactcacaagcatacactctatat

SEQ ID NO: 696199 - DNA, 782 bp, Homo sapiens
cctcccatccctacggcactctttacatcacagacgaggtcaacgaatccctcccttaccatcaaatcaattggccaccaatggtactgaacctacgagtacaccgactacggcgcgactacagtcttcaactcctacattacttgccccgcattattcctagcaaccaggcgacctgcgactccttgacgttgacaatcgagtactactcccgattgaacgcccgccattgcgtactaactaattacgatcacaacgacgtcttgcatctcatgcaggctgtcccctacattaggcttaacaatatcagatgcaagttcccgcgagcgtctaaaccaataccactttcatccgctacacgaccgggggtacctactacggccaagtgctctgaaagtctgtggagcaaaccacagattctcatgcccatcgtcctagaacttaaattgcccctacatacaagtctttctgaaactacgggccccgtattttagcccgtataagcacgccaccttcgtaaccacccctactatggaagccagaaacagagaacaatggcccacagtacccagacaagaccgagtcctaatataaaaaaggaacaccaagctatccgaaaggtacaatcaaaatagtaaggagaaacgaaggacagggcaacttctccaaaaaagccgcagttcccgccgtaaggcaccatccccgagtcagtagcggccacacaggttggccccacacgcgcgcccacggtgctatcagttgcacgagaccagatatacgtg

SEQ ID NO: 696200 - DNA, 1437 bp, Homo sapiens
gagacagagccagtggaccctggaaggaagcaggatggcagcctggaacagcagttggatgcctggttgctggtcctcagtctgtggggggcagtagtaggtgctcaaaacatcaacagtccggattggctgagccacttggtgctgaacgtgtaacggtgtggcccccaaagaaagcaccccagcgtgctggacatggaaacttgaacacatgtgccggacagaagcttggaaggtcctgtttcccacagtgacggatggcccctggtgacacgtgtgggctcgttgtcctatccacaaatggactacctctttccttccgggattgtcgggcgcattccagcgcattgcacgggggacacatatcccgtgttgcgccaggtgcaacatgtacaccagctgcaattggtcaaagtgtatgagacaaaggtccgatgactaactgccatatcccggtgctctacctaggaattccctgtgtgtataggcacagcacaccattggtcagaattctggcctgctggaagttccaccgggactgggtaggtacccccaaccttaaaggtgtggggcggccacattagtagttgtaccacgaaaaggggcaactgcttaaacgcctgggcatgaggacactcctcttacagcgtggtgcacaccttgtgcgattctgagaaagcccgccttgcgatgggcttacacttggagaaagggggcagtaaatctaggatacaaagggcaagccaagacccgatcggaagaacatgcgctgcagacgatggcgctcttccgtacagaagccctggaaggacaggaagaaaaaacgggacttacaccccatagcccggacaaaggcacaagacacgcggacaaaacacgtatcaccatggaacgccaacaagcccccatgggcaaatcaccacgataaaaccgagcggcaacagagcggcgagagacgcccaaacagacaacgaccaggacagcagagagacaacctgacgcaatcagtgcaaggaagaggcaccaagcagggagaggtcgaccaccaggtgtgagcgaacaaacaaaccgaggcgaggacagcaacacgcgcgagagagaacgagcgagagcagcaagaagagcagacagccaggagcgagaaggagggagaacgagggaacaagcaacaccaacacaaacagcgaacgacacacaagagccacgagagaggaggaggcacaaccagaggacggagccgaagtaactggaacgcaaagaagacagaggaacaaagagatagggaagcgagatgcaacaaagaagcgacaaagagcagagaaaaaagcgaaaggaaagacgacagaagaacagagaacacagaccagggcagagccaaggactagccagagcgagagaggacgggaagcgagaacgcgcgacacgcacggctcactg

SEQ ID NO: 696201 - DNA, 1179 bp, Homo sapiens
gaatccaggaactggcttattgaaaagatcaacaaaattaataaaccactagtcagactaatgaagaagaacacgagagaagaatcaaatagatgcaataaaaaatgatacaggggatatcaccactgatcccacagaaatacaaactaccatcagagaatactataaagcccactacacaagataccctagaaaatctagaagaaatggatacattcctggacatatacagcctgccaagactcaaccaggaagacacttgaatctctgacataccaaataaggtcaactcccaacccaaataacagtccaggacccgcaaggattcacagcccgaatactaccgagaggtacaacagcagcaagctggcaccataaccttctgaacatcatacccaatcaatagcaaaaacacaggcagtaccctaacctaacctacatcaccatgacggaccccaccaatccaaattctgcactacccacaagcccatgaccagggcacacacaactcacacacaccacacccaccacctacataaagaacaatcatacccatgacttggcaccaatccgactagtagaacacgatcccttaccacattagggtacacctagggcccacaacacaaaaagcccaggccaggcgaacactcgaaaagaccagcataaattcgcaacccaaaaccaaaattcaaaaaatacaaacacttatctccatatacccataatcaaacaatacacaaaacaccacacaaatatcaaaacaaacatacacaacccaacacaatccaacaaaaacaacacttaacaatcacaaacccccacactctacatacaacaaaaaaacccacaaattctaaaaaaaaataactataattaccaaagaaaccataacacacactacaccatccacaacacgatattcaaacacctcacaacaacaacaccaagataccattaccacaatttaacaaaatacccaaagcaaaaccaaaagagaaaaaaacacacagcacgaaagccacaagaaaaacacataaacaaggccgacaacaaactacagagattagacaagcaaaaaatcagagccaacagacaaagacgacacaagaataccaaaacagcagactcgcaccgacacaaaaaccacacaaaacacaacaaacgaaccaacaacca

SEQ ID NO: 696202 - DNA, 118 bp, Homo sapiens
  misc_feature (3)..(3): n is a, c, g, or t
tcngggtgctgcaagtttccacccatggacctccctctaccccgttaaccaggctccccccgcccctccgggccccccatctcacactcgtcctcgccgaagccgtccctccccgggg

SEQ ID NO: 696203 - DNA, 157 bp, Homo sapiens
acattcagctcggtacccagcgccctagcctatataactctaaaattaaaatgaaagaaaaatcaaatatcaggatttagatgggccttaaaagctatttagttcgacgactgactcaattcctgtttttttgtttttgcttttgtttttttttttt

SEQ ID NO: 696204 - DNA, 278 bp, Homo sapiens
aggcctccggggggccggggtttcccatgtaggggaggggagatttatccacaaacctcaggtaacagggaggtgggcgggtggggggagggctggccggcccaaaggcccgaggggttgggccttggggaaaacaaaaggctttaaaatgggcccccttgggggagggaaaaggcaccccggcgaggggcaaacgggggacccacccggggtgggcccctgggccccgggtttgtacaaaacggtttgttataaaactcaaaattttccccccggga

SEQ ID NO: 696205 - DNA, 386 bp, Homo sapiens
acagggggaaaaaatgggggttttttgggggggggaaggggggtggaaaaaggggggtaaacccccggggcggggggggggggaaaaaaaaaagggggggggggggagacacgcctttttttttttatttattggggggggggggtcccccgccccccccgggggggggaaggggggaactttttggctcaaaaacaccccccccccgggggataaaaagggccaccgggttgccaccgggagaggcggaggaaaaagagcccaggcgcactaaaaaggaaattctttgggtccttccaaggggggggggggctaacactaggggaaggggggggacctcctaccttagggacattttggggagccaggtctcaaaaggaggggcg

SEQ ID NO: 696206 - DNA, 331 bp, Homo sapiens
aggtaatgaccagcaggctggtaatagcctggcatttttgggacgggaaaataattatcagcatgtgaaagactagatatcatactacaacaaagccgagaccatgatgaacacagatgagattattaaaaatgggcctgacgaaggagatagcaggagagaacacgcaggttccagattctcaatgatgagatcatcaccatcctggatcagtacctgaagtcagacgacgggtaggacacgccagtggtgcatgtgcgctgcttccagccgtccatacaccagtccctcgccagcagctgatggcacgcgctgcactcagaaactcaac

SEQ ID NO: 696207 - DNA, 650 bp, Homo sapiens
cgcagaggctcatgcctgtaatcctagcactttgggagcccaaggcgagcggatcacttaaggtcaggagtttgagaccagcctggccaacatggtgaaaccccatctccactgaaaatacaaaaattagccggtcatggtggcatgtgcctgtagtcccagtgactcaggaagctgaggcaagagaattgctggaacccgggaggcggaggttgcagtgagccaagatcgcgccactgcactccagcctgggcaacagaaagagactccgtctcaaaaaaaaaaaaaaaaacagaggagaaaagaggagactcccgacagaagagagatgccgtatcttgggatggtcacaaagtccttttccaacagattttaggaatcagggagcaagctgaagaggagaaggggaagccctgtcacggctctcccacaacaaagcaagatgggggtgccggcccccgcaaggagctcccatgatgtgggcttggtgcaccgccgtgacgttgccccgggggtggtcccgggcattactcaagggcaaactcagcaattgcgctggctcgccccctcggtgatgagcttgatactctgcgattccttcaaattcacttgctcaatccacggtattctcccttctggggttctctcga

SEQ ID NO: 696208 - DNA, 448 bp, Homo sapiens
ccacgcattgccagcaaccaggcaaataacattacttatatagacccggtgcatccaaacaaggcacggcttctaacagcttcccataatctgcatgctacagagccaggaaaccaggaatcaagatatatcaggctaaaatacagccgcctcatctttgaggcccaccagctgattctgagaacctcctgcaccaccatggaaaagggattccctagccttctactaaccaaataccccagaagatacgatttcagctaaaaaagatagtggttccattaaccttaggagccaggaggcgagaccctgatccggggcgctctctgccacctaccgccagagccaacctccctgcctccctcggaacccccaacaccccagaacctcatgacccttgcagagccagcctgctgcctcctttgaagagaaccataagagaagcttcagg

SEQ ID NO: 696209 - DNA, 681 bp, Homo sapiens
  misc_feature (59)..(59): n is a, c, g, or t
  misc_feature (75)..(75): n is a, c, g, or t
  misc_feature (78)..(78): n is a, c, g, or t
  misc_feature (81)..(82): n is a, c, g, or t
  misc_feature (151)..(151): n is a, c, g, or t
  misc_feature (166)..(168): n is a, c, g, or t
  misc_feature (172)..(172): n is a, c, g, or t
  misc_feature (180)..(180): n is a, c, g, or t
  misc_feature (202)..(202): n is a, c, g, or t
  misc_feature (205)..(205): n is a, c, g, or t
  misc_feature (209)..(209): n is a, c, g, or t
  misc_feature (223)..(223): n is a, c, g, or t
  misc_feature (238)..(238): n is a, c, g, or t
  misc_feature (262)..(262): n is a, c, g, or t
  misc_feature (264)..(264): n is a, c, g, or t
  misc_feature (269)..(269): n is a, c, g, or t
  misc_feature (271)..(271): n is a, c, g, or t
  misc_feature (279)..(279): n is a, c, g, or t
  misc_feature (281)..(281): n is a, c, g, or t
  misc_feature (291)..(291): n is a, c, g, or t
  misc_feature (298)..(298): n is a, c, g, or t
  misc_feature (301)..(301): n is a, c, g, or t
  misc_feature (312)..(312): n is a, c, g, or t
  misc_feature (317)..(317): n is a, c, g, or t
  misc_feature (328)..(329): n is a, c, g, or t
  misc_feature (401)..(401): n is a, c, g, or t
  misc_feature (407)..(407): n is a, c, g, or t
  misc_feature (422)..(423): n is a, c, g, or t
  misc_feature (439)..(439): n is a, c, g, or t
  misc_feature (444)..(444): n is a, c, g, or t
  misc_feature (465)..(466): n is a, c, g, or t
  misc_feature (475)..(475): n is a, c, g, or t
  misc_feature (480)..(480): n is a, c, g, or t
  misc_feature (517)..(517): n is a, c, g, or t
  misc_feature (520)..(520): n is a, c, g, or t
  misc_feature (523)..(523): n is a, c, g, or t
  misc_feature (542)..(542): n is a, c, g, or t
  misc_feature (561)..(561): n is a, c, g, or t
  misc_feature (583)..(583): n is a, c, g, or t
  misc_feature (587)..(587): n is a, c, g, or t
  misc_feature (593)..(593): n is a, c, g, or t
  misc_feature (599)..(599): n is a, c, g, or t
  misc_feature (604)..(604): n is a, c, g, or t
  misc_feature (607)..(608): n is a, c, g, or t
  misc_feature (616)..(616): n is a, c, g, or t
  misc_feature (621)..(621): n is a, c, g, or t
  misc_feature (636)..(636): n is a, c, g, or t
gggcggagtgaacatcccgcacacgcctgtgaggttcaggcaggtgatggcgcataggnttgggagccctacggnggngcnntcagtcagtgatgtctctccaagtccgcagagacctgagggacgggagcgaagtgagcgccctcaagtngcagggccagggcannncagngaggggtnacggggcccggaaggcattggnagnggcnccagcggctgcggntggcagcgggcggtncggaccgcagggtgtggagaaganancagcngnaaatgctngnggggcctccngagagcnggnacctgtccggnggtanaaggagtgganncgtttcagcatgacaatccctagcacagcaatgccagtgaagagcagggcgaccagcagcatgagcacgganactgcngtgttgcccttcggnnccaccagagcagaganccagnaactgaatccccaacctgggnnaccaatggnctggnggacaaagagcacatcctggacgaagaaaatgaaganganaangaagaaattgaatgaactntcactccggaaagccttanacatggggcggtaccagcaganaaangagcanggagtnaaaangannacccagangatanaaagcccaaagcctncgccattttttggtttccacacagaagctggccaggcaggcgagg

SEQ ID NO: 696210 - DNA, 92 bp, Homo sapiens
catgttggttcttagtcaacatatactataaatgttacattttattacttgatggaaaatgtctaaatatggtacccttctgtcgtcttctc

SEQ ID NO: 696211 - DNA, 315 bp, Homo sapiens
tagcctaacatatcccctgatacaggagtgacgggagagagatataagcatgagaaagagcaggaaggctggtttgaagctggaggggaccacataatacggaatgcaggcggccttgaggtgagagaggggcctcctgcttgagagccagtcaagaactgaattccgtcgacgacctgaatgaacttggaagcagattcttccccagagcctccatgaaggaatgttgtcctgccaacccttatttcagcctttaagaccctgagcagagaatccagccacactgtgccagactcatgagcgaactggactggt

SEQ ID NO: 696212 - DNA, 199 bp, Homo sapiens
tcgttctttgatagggtgaagctgtaatctttcaaaacagtaaaagctggtttctcctaaactattttccttgtggtagtggagatcagtgggtcagaaacaactcctggacacttggttttcctctttgagccgcgtccattaggaggcaatctgtaaaactagcacaggtctcccgctgttccactggggtcacccc

SEQ ID NO: 696213 - DNA, 762 bp, Homo sapiens
cccatctaggtcctggctggccgcatgaccacccctctcgcctcattactgtgaggagtctgggtccatcctggtcagctgccccaatgtgacctggggcagataaaatgccagtctcattggttccaccttccggttgaacccttcttgtgtccgagggctctctcttctcttccacagagtgtagtgactcctcagtccctcttgctggtcttccctattatttccttctactatccttctcctttggggggagtacctgtccaagacagggctcattttgcacttatctcgaatttgaagagattgctgacgcccgagagcctcgctttttcatccttctttccttgttcagcaggctagacagaaacatgtcttgactgttagtggtccacaaatcttcagtattttctccacttcatttttaagaaaggaagcaacagatagatgttgctctttcacctgggtgtctgggctcaagctttcccgcccagctcactttcctttgcccttcctcctgcctttctcaaactgtcccaagggagggggcctcattgtgtctccgtgcatgctctggaagcattgaagtatggtgtgtccacgtagttctagcagtccccagctgaatgagtgggaaagtactgatgtgtcgtaacggctgatcccgtgatacatgtcgcatatttggggtgcccgtgtgttgttgtctcccaccccctgtgttattccttaaaaaagtaccaacgggccgcttgggtacaa

SEQ ID NO: 696214 - DNA, 442 bp, Homo sapiens
  misc_feature (50)..(51): n is a, c, g, or t
  misc_feature (57)..(57): n is a, c, g, or t
  misc_feature (60)..(61): n is a, c, g, or t
  misc_feature (68)..(68): n is a, c, g, or t
  misc_feature (70)..(70): n is a, c, g, or t
  misc_feature (76)..(78): n is a, c, g, or t
  misc_feature (80)..(80): n is a, c, g, or t
  misc_feature (82)..(82): n is a, c, g, or t
  misc_feature (87)..(87): n is a, c, g, or t
  misc_feature (109)..(109): n is a, c, g, or t
  misc_feature (133)..(133): n is a, c, g, or t
  misc_feature (135)..(135): n is a, c, g, or t
  misc_feature (140)..(140): n is a, c, g, or t
  misc_feature (156)..(156): n is a, c, g, or t
  misc_feature (164)..(165): n is a, c, g, or t
  misc_feature (173)..(173): n is a, c, g, or t
  misc_feature (175)..(175): n is a, c, g, or t
  misc_feature (177)..(177): n is a, c, g, or t
  misc_feature (179)..(179): n is a, c, g, or t
  misc_feature (186)..(187): n is a, c, g, or t
  misc_feature (191)..(191): n is a, c, g, or t
  misc_feature (193)..(193): n is a, c, g, or t
  misc_feature (199)..(199): n is a, c, g, or t
  misc_feature (206)..(206): n is a, c, g, or t
  misc_feature (212)..(212): n is a, c, g, or t
  misc_feature (215)..(216): n is a, c, g, or t
  misc_feature (225)..(225): n is a, c, g, or t
  misc_feature (227)..(227): n is a, c, g, or t
  misc_feature (238)..(239): n is a, c, g, or t
  misc_feature (242)..(243): n is a, c, g, or t
  misc_feature (246)..(246): n is a, c, g, or t
  misc_feature (250)..(250): n is a, c, g, or t
  misc_feature (255)..(255): n is a, c, g, or t
  misc_feature (259)..(260): n is a, c, g, or t
  misc_feature (266)..(266): n is a, c, g, or t
  misc_feature (275)..(277): n is a, c, g, or t
  misc_feature (286)..(286): n is a, c, g, or t
  misc_feature (303)..(303): n is a, c, g, or t
  misc_feature (328)..(328): n is a, c, g, or t
  misc_feature (377)..(377): n is a, c, g, or t
  misc_feature (419)..(419): n is a, c, g, or t
cacatttctttctacagtctcattattatttccaaaaattacacagtaanntaaatnatnnataaaananataaannnantntattntttattagatccatccccaganttatatgtacatgtacatactttnanatgtnttttgttctttaattntattttannttattttnantnanttaaatnngagnangatttntaatatntcttanctnncaagaaaanantgtatcaagannttnnacncganaaaanctcnnctaatngaagaaccnnnaggcaggtntaaagtgccagtaaaancttcaacaaaaaagcaggaactctnaaacctcttaattaataactggccgaaaagcccgcccaaagctcctganaaataacctataattcgctgtacagtcatatcaaccccctcnggaatcccataatcagccgaagt

SEQ ID NO: 696215 - DNA, 147 bp, Homo sapiens
  misc_feature (3)..(3): n is a, c, g, or t
tanctactgccaggtggggtggtcacgtgatgtgtgttctgcatcccccactggcttctgagcgcgacctccattgtgtgttcacctctatgcctcagggaacgtgactggccccgtggacacaagggctgggttgaggggctgtcc

SEQ ID NO: 696216 - DNA, 353 bp, Homo sapiens
  misc_feature (85)..(85): n is a, c, g, or t
  misc_feature (87)..(87): n is a, c, g, or t
cacctggctaatttttttgcagtttttagtagagacgaggtttcaccatcttggccaggctggtcttgagctcctgacctcatgnantcaccccacttggggtggctgaggtgggagaatcgcttgaggccaggagttcgagaccagcctgggaaacatagcaagaccctcatctctaaaaaaagtttttttcaaattagctgggtgttgtggtatatgcatgtagtcccagctcttgggaggctgaggtgggaggatcatttgagctgaagagttcaagctgtgatcatactatggtggtgctgttgcattccagtctgggtgacaaagtgagattctgtctcaaaaaaaaa

SEQ ID NO: 696217 - DNA, 858 bp, Homo sapiens
tatctactctctcccagcacagtgttcttgcctggttcccccagctctgggtacccggctctgcatcgtgtcgccatgatgtgtgccatcgtccagtgctctgtgctcagccagaacacaaagctgtgaatcctggaagaaaagttcaatcttgtgcaaaccatcaaatgctagccaaagcacatatatgcagatatcagtcctgacacatgtaatgggacccaagtcccatgattgaacatgctattagtgaccccaatgtggcagagccatatgttgatgacccaatgcatggcaaattgccatacttcgcagcagatacaagtacaagcatccagacggaccaatgatccactgatcgacacatacagcccggaccccagtgatgacagacggtatggaagcttgttcgaaccacaatcatgtacaaacatactatgacattgggaacaactggcttgacctgtcagcatgaagcaacattcaacttggaagccaatccagaattcccaccaccaaacaagcaggatgaaacactgtgcatttaacctgcacgtgcatttggatgaaattgaaacaaaaaaccctcaacagaacaataagatataccaagatcagaacatcaacgatgaccagactaacttatgatcccttgacacccatcaaatcaaacaatcatcaataataaagaaaaccaaaaaagacaaaacaagctcagaacgagacaaacctattggggcaattgcaaccaaatatacgcccctgtcaattagtatagccacagaacatgcacaccgcgatagagtacacaaatgtgactgtacaacacaatatcgaacaccacacacatatactcaa

SEQ ID NO: 696218 - DNA, 512 bp, Homo sapiens
taagattgggaatagggaaagatgtctgttctcatcatttctacttaacattatgccaaaagtcctaaccagtgcaagaaggcaagaagaaagaaaggacataaagattggaaaagaagaagtaaaacattatttgaagaccatattattttttatgtagaaagttctaagaaattgaaacaaaaattaatagaactaaaacataagtttagcaagatctcaggatatgaggtcaacatgcaaaaatcaattgtacagtatttctatatactaacagcaagcaatcggaaacatttttatccatttgtaatagtgtcaaaaataaaatgctcaggaataaatttgacaaaagacatgcaaaatatgttgaaaactacaaaacatgggctgggtgtggtggctcacacctgtaatcccagcactttgggaggctgaggcaggaggatcgtttgaactcaggagttgtagaccagcctgggcaacatggtgaaaccctgtgtcttgcaaacata

SEQ ID NO: 696219 - DNA, 811 bp, Homo sapiens
gagattttaatcagttttctaggcacaacctttgggatcgctagttagtgacccagttcctgcttagtctttcctctcagggcctaatgatcagagaacgttactttccctgaatggataatcttttaacttcttgaagcctattttaaaagcttttctcaatcttctcaaataatttcaccttgatccttcttttcctttgggtttttcctctgtcagttctcttcccctcactgtggtagcaccaacctctctcctcatattgcttgtgttccctccagcttctcctcagctatgatgtcagatttttaaattatccattttatactctgctttttaatttcatttttagctctgagaccttaaagcagtaatggtcttagagttcattttctttctctgttaaagaaatggatttctaagtttcagcaatcagtcatagcaaccctttaatattatatactcaatacagagctaggtattctgtggaaagtatagttgaagaaatgacaacagtcctcaggtgcttgactgacttatggtgaaagtataaaagtattcttggtaattccagtaaagcagaaatagcttggtttagggggtggggagggactaaaatttacaaagaggcagaatctcagttctaaggggagagcttgtggaaaacacaatagattctttgcacaaattgggttttcccctccaagggtcttttctgatgtggtggttcttcacttaggaacaggtattgtttcctgagtcttcctgattttccagggaacagcatcgggtttctattaaaggtagccga

SEQ ID NO: 696220 - DNA, 519 bp, Homo sapiens
tagtcggaccagaatgtgtacaacgacggcaaatcttgcttgtttaggatcacatcaacatctagaaccacacaagaggcatcagaaaatacttgaacgggctgggcgcggtggctcatgcctgcaatcccagcactttgggaggccgaggcgggcagatcatgaggtcaggagatcgagaccatcctggccaacatgatgaaaccctgtctctactaaaaatacaaaaaattagctgggcatcatggcgggcgcctgtagtcccagctactcaggaggctgaggcaggagaatggtgtgaacctgggaggcagaggttgtagtgagccaagattgtgccactgtatttctgcctgggtgacagaatgagaccctgtctcaaaaaaaaacaaaaaaaaaaaaaatttcgggcctcgtgatcctaaagcaggggcagcataattttttcccggaccccggttgggccgtttgttccacattcggggggaacccctataaagttcaacctggcgggctttc

SEQ ID NO: 696221 - DNA, 311 bp, Homo sapiens
ctcgagcggccgttataattattgcatagaatatttcaagaagtcccaggtcaaaaggacacatctggtgagggccttcttgctactgggaactctctacagggtcccaatggcctggggcatcacatggcaggagggctgtgtatgctaacttgctaggtcaggtctctcttcttatcaagccaccagtgccattcccatgatagtgcattcatccattaactcattaatcaattagggcagaactttcatgatccaagtgcctcttaaagggatcgagtctcaatactgccacactgggggttaaattt

SEQ ID NO: 696222 - DNA, 242 bp, Homo sapiens
  misc_feature (81)..(81): n is a, c, g, or t
  misc_feature (193)..(193): n is a, c, g, or t
  misc_feature (210)..(211): n is a, c, g, or t
ctcaatggcgccactctggataaccgcgatggcggtacggtaggcagcacaaaagcgctgacactcgaagtggccgaggtngacaaccgcggcggggaaatctccagctccgaagggctgagccttctgggcacacgcctggataacagcgacagcggcaagctgcttgccggcaccgacttgggcctgaganaggcgcaggtcatcaannagaatcggggcctgctgtttggcaaaggcag

SEQ ID NO: 696223 - DNA, 186 bp, Homo sapiens
  misc_feature (150)..(150): n is a, c, g, or t
  misc_feature (160)..(160): n is a, c, g, or t
atgcgggctttcagtctgtgaaatgctgtaaagagtcttcatcccagatatcatgtttttttattttagtgtgtccatatgactctttttagagtttacatttctctgctgaaattccccaactgttcatgcatgagggcctattttttnctacttgttncctgtcacatatatcaatcataatta

SEQ ID NO: 696224 - DNA, 1541 bp, Homo sapiens
  misc_feature (284)..(284): n is a, c, g, or t
  misc_feature (302)..(302): n is a, c, g, or t
  misc_feature (334)..(334): n is a, c, g, or t
  misc_feature (357)..(357): n is a, c, g, or t
  misc_feature (453)..(453): n is a, c, g, or t
  misc_feature (474)..(474): n is a, c, g, or t
  misc_feature (508)..(508): n is a, c, g, or t
  misc_feature (532)..(532): n is a, c, g, or t
  misc_feature (625)..(625): n is a, c, g, or t
gataatgccggggccgacaggtgccatcatccctggagcgtctcccgatcctaccacttagcgtcatgcgtctgcctctgatcgatatgaatggctcactttccactgagggcctcactctctaagtaaggccactaagttacacccaacgagtattccaaggtagttcaagcctcgagatggagatgtcggatacgagtctaggaagcaaagcaagcttaattgaagagtggcacagttaccacacaggcctgcttcaagatagaggccttgacgggttcctnggaccctaacatcgctantgaaacctcatctcgtcgaaagacgtcttttntcccttgcccaacgaacagcatngatgtggtcgaacacaccttatctagtcgagcctctctatagatctctagagactcgcgatagacacacgcactgaaattgacgtttcgagcgcanaccttgggaaaccccaaagcnttgtgccaatcagatcgcccgtcctaataaatcntcggtggacccataggtcactcgnttgctcgctgtgagaaacaccaaatcccgggtgcttcatcgtcggcaagctactatggtgaagtctagtgcaaagacaagaaatcgcaacgtnttccctgcgagtagggtcgtgagggtgttcacccgtgacatattccgccccattacctccatgatagtataacgaaggcaccatcgccttccattgttacaacactctctataatttttggcgcttgtgcatgactctattcaccccccatacacgggaacgagaagggcgacgacgcacctaaaggtaagtccgccacttatgtaaacacatgtaccaattcgaatgtaaccttgcacttgcgcagtggatcccctggtctgcgcagggactttggggggttaatctgggttggtcaacccccccgcatggtgtctagggggtgaaagtctccctattgctcctttccaatttcgctgtgttccgagtcttttttctgtttcaagcactcagcctgtgggtaaagcgagggggcccctgggcgaggaccttaccccttttgtgtttccaactttatatcacttggtccgcaccgttctcaattcttacacttaaaggggtccctcacaccgggggccccggggcgtttccctcggatgtgctttgcggaatttccccggggtgacccccgttggaggttagaaaccaggctctttctttgggattttgggtcttccccctctgttttggggacggaagagcgccgttgtaacagaagcgttaccccttgggcgaaaaattacacttttcaaggagaggcccttataaaaggtcgaattccttggcgccctttggagattacacccccacactgtgctgccccaagggcgcctgaagaccaagaaaatctcataacaccctatatttttggggtcggcgccacgagggggtcgctctgaaaaacgagtgccccaacacatgggagggaggggcaggaaaatctattagggacgatgcaactgcgatgcgaagatag

SEQ ID NO: 696225 - DNA, 554 bp, Homo sapiens
gcccaccccagcagagtgtggacctcccacgctgtcctgtgggtgcctgtgtcttcacagctctggcgacggcgcttgacgtgggcttgtccaactggagcttcctgtatgtcaccgtatcgctgtgagtactggccatgccctgctgcctcccttcaggctgaagctgtctgtctgtccatcgaagctgattgcacacccggctgctaggccagccactccaccactctgggaccagcccttgttctctcagcctctccctggcacccagcagctctccgggaagtcgccagtctcttccgtaagcccagcgcataggagatgctgtgcccacctgccaggcatcgtggggaagccaaggagctctcccagaaccccatcatcagagcagggtaaggcagactgttaggccacattcaggtggccacaggtgggtgagtcacgcacctgcaatacatacctatgtgagctgtgggctacacaagaattttttctttgcattttgaagtaacagctttcacagagccacttgttcctggcacttttaatgtttt

SEQ ID NO: 696226 - DNA, 161 bp, Homo sapiens
aattaaaaaaataagaagtcagtcaggaaagccttccttggagtgacatttgagcaagaaaccgagaaacagcaaagagagtcctggtacagggaaaagcacaaactaaggccctaagggcagaaggaaatacaatgagtacaagggactagaagaatgaa

SEQ ID NO: 696227 - DNA, 946 bp, Homo sapiens
gccggaaacctgccattcttcgctgctgatcgcgggattcttttggatagggtgacgtcgtggatagactcatatctgtgaccagtgtccgccaccgggatggcaagagacctgatcggaccggccctgccggccccggttcaagacccgcggaacagcggaggacgaaaagcgggacccgagcctgtttgcaggaccaagctctgcccccctaattataaacagcagtagttcagattcatcagacccagcggtgaaggacaagtagttctttgtacgaagaagggacacatcaacgaatctgagagaacgatgacatgtgtgcccaacgtgcaagaaaacagaggaaacactcaggatgctgccgatagcatgatgactggatgggtaatatggaccccaagccatatccctccctgaattctacaacacgccggatgattcttcctccaaggcccaattaaatagggtcctgattggccaccttggtttccattaaaatctacacaaggaatacgtggcaaggggcagagattgatcccaggacaaacagggacacaggaacaagcaggtgacagatgacggatcatatgggaccaatgcctggcacaaggaccagtttaacttataatgtgacgacggagttgacaaaaaagggcccagaggatggaaagaaaaagtggaccaaggaggatgctgatcatctaacacatggtaagaaagtcatgggtgatgaaattgctccagaaaggaaagatgggtctgggcccaggatttaagaaagggttgtgacccttgggatcgaacattggagaactccagtgtaggaaggaagtagaaaacaagagaggacgtccgagagaggaactttgtggagagagagaagggagtttccagaaaacacttggcatacaggagggtgcgcacacaaaacaggagacaagta

SEQ ID NO: 696228 - DNA, 270 bp, Homo sapiens
catacatccgggtgactagcattctgccgggtgactacatacttgcgggtgattacatacttccgggtgactacatacttccggactacatacttcctgagctacatccttccggcctacatacttccatgattacatactaccggactacatagttcctgaatacatacttccggaatacatccttcctgactacatacttccggactacatacttcctgactacctacttccggactacatccttcctgactacatacttccggggaa

SEQ ID NO: 696229 - DNA, 151 bp, Homo sapiens
acatcaaccctacaacaatttaaaacagctactatgaaacccatataaatacgatcagttaatgcacaaactactaaaaaacaggaaggtgcaggtgatatatacgaaggtgcgcagaaacagctggaaacatgcaaaactaatttctgga

SEQ ID NO: 696230 - DNA, 988 bp, Homo sapiens
ggtggtccactcgtttaccataacggctctaacatcctccgtagtacgtccggacttcggctgtacctacccctacgcgccgtaacgacagacctgccccaggggccccagggacccggtgcggatcccctccaaagagcgcagatttctacatccaggatctcatgacgtcgtcaggctttcttggtataagccttgaggtttcaacgccgactctcctgcgctagtgcagtgcagctaggtctaaccagtcctacactactaggcgcggccagttctattcctcttcgtcagtgatgctcctcttgttggatattcgggaccgaaataatcgcctggcccctcctgtggccccggggaaacccgcagctggtacttgttctccttgtattgctgtaaagcaccgcctgagaactgaccaacagcgagatcatcagggtgaaccacgccttggacctgtacgacacggagatcctcaaacagtcggagccagatgactagccaatacctgctgcttaagcccgggtactcctctggccatggacttttcctgttgttagtacacacagcaacagaacaatcatgaagcgaaaactaagaacaagattaaacccgactcaagatttgtaaaatgtaattaatattcaaagaaaaggaggaaaatcttcagtttgttggatatgaacagcgtgtctagcaatcggtataacacagtcgttgggcatcgttgtgttactgtgctactacgtgcattctcgtgcatgaagagagggtcctcagcctgtttgtggagcattagacgggagttgtcttctgtacggcctcacggtcgctgtattgggggagaagggagatgaagcagtatgcaatgaaattgtacagatctttgctgtgcaggtgctaagagttaaacactcctatgaaagagagatatatgtaagtgtacaactgacactgccatgtgttcatactcggagggaatgacata

SEQ ID NO: 696231 - DNA, 159 bp, Homo sapiens
  misc_feature (38)..(38): n is a, c, g, or t
  misc_feature (56)..(56): n is a, c, g, or t
  misc_feature (81)..(81): n is a, c, g, or t
  misc_feature (111)..(111): n is a, c, g, or t
  misc_feature (154)..(154): n is a, c, g, or t
aagtgaaccagggtctcatccgcatgtataaggccgantgcctggagaagttcccngtgatccagcacttcaagttcgggngcctgctgcccatccatcctgtcacgtcgngctaggaggcgccaagccgaagagccacccaggcccacagttnctgtg

SEQ ID NO: 696232 - DNA, 153 bp, Homo sapiens
tgcggaagaagaggcgacagtccaacaataagatcactgtagtgggtgttggacaagttggtatggcgtgtgctatcagcattctggatagtctctggctgatgaacttgctcttgaggagttttggagataagcttaaagggaaaatgatgg

SEQ ID NO: 696233 - DNA, 315 bp, Homo sapiens
gtatgtattatcaggtttcaggaataaaactttggcccatcaacttcagtcatgacaatggccctttctcaaagggagaaattgttttccccttgcctgggcctgcggagaggcggtctgtgtggtgagatgtgatcatgggggggcacggatcatgtatgaacgtgggatgacaacccccttgcatctggcaggcagtcatggacaccggtgatattgtacagaaggtacgtacaaactccttcgtcatccacatcacatacatgccatgagggtcagtcacaggcactggtaacatacagtagaaagcatgtg

SEQ ID NO: 696234 - DNA, 270 bp, Homo sapiens
ctacctagaggatccgctgaccgcttaggtgtgtgcataagtcttgtatctgcttagtcagtttccatctggaagcatttgttcgcaaacgccacagttacagactacagcagtttagaaaccagactaccacctgaatatactacacattgcttcacctggcttttggtgattggtatgtagttgctgattctttccacaaaaggtacttctttcttggttttctctttagggcttaagcggatccaggggtatcgagcctccaattcg

SEQ ID NO: 696235 - DNA, 450 bp, Homo sapiens
  misc_feature (22)..(22): n is a, c, g, or t
gaatgggccatcatggtgcctnccgagagggccttgtacagggatgtgatgctggaaaactatgaggctgtggcctttgtagggccacccccttccaaaccagctttggtttttcatttggagcaagggaaaaagtcctgtttcccccacccccagggagtcctaaacaggaattcttggaaagcaggctggataggatccttggaactaaaaagatatcctttcttagctaaaccagtgttcggtagaataggatcaaaaatttttcgaaatcgtcaatgctgggaagacaggaaaaaagcttaattcttgccatttaaaaaccagttttccaagtaaggagttgatgtaaaagcccccttaaacgatgtcaaaaaccccttttctttttttggagacggggaaatttaatgtttttcattcattaaaaaaaccccttttgatggccca

SEQ ID NO: 696236 - DNA, 425 bp, Homo sapiens
tatcagtatcctatggaggactgactcactggtactgcgtcccactcctacaagactactccatctcctcggataaaaaaagtgattcttcaggtcatgagtacagttgtgaaaactccacccaaatgaataattgttcggtacctttagattaaagttaaactttactgaatttcagtacattagtttttacactaaaactttacaagataaaattggacttcatttagtatctttttaacagaattacttggaataatgagatacaataatcatatctcttttgacattttggaaatttttttaattttacaagtacatttaacagatcatttataaagcaggagtccattttaacacttaccgactttttttggtttggaaacatattaccacgtcttaataggatggtgcccatataggtg

SEQ ID NO: 696237 - DNA, 424 bp, Homo sapiens
atctttttccccgtttgcccatttgcccatttttaattggattgttcatctttttcctgttgagatgtttgagttactggtatattctggatattggccattcttttgaataaagccgtttacactggggttagagttgtggtttgcatttgcatttccctgatgattagtgctgttgagctttattgatttactttagacagagatcttgggtcatggtgcgcaggggtggaattgatgtggcgtagatcacgtgtccacttataagctacgacatacctgggattaggcaatctctcctaatcagcagggatgagggtgggagcgatcacctgagaccgggagagcagagggttccagtagagccagagattgtaccactgtactcccacatgagcaacagagcaagaccctgtctccaaaa

SEQ ID NO: 696238 - DNA, 916 bp, Homo sapiens
  misc_feature (552)..(552): n is a, c, g, or t
ggggcttgtcagtcggcgccgcgtgcgggctggtgtgctctgtgtggcagtggcgggggcatgggactccggtcactatgaactggttgtcagcaccgaggagcgcgccgcgcccttctccctgagagtaccagaggtcttcctcagaaatgagaagggacaatatatatctccatttcatgatattccaatttatgcgagataaggatgtgttcacatggtcagttgaagtaccacgcgtggtctaggtgcgaaaaggtggggattgctaacaaagtgaccctttaaccctatagacaagatgtgatacaaggaaaaacttcgctattttgcgaattggttcccgtataaatggatatatctggaactatggtgccatccctcagacttgggaagacccaggcacaatgataaacatactggctgtgtgtggtgcaccaatgacccaattgatgtgtgtgacattggaagcaaggtatgtgcacgaggtgaaataattggcgtgaaagttctaggcatatgggctatgattgacgaaggggaaccgactgnaaggtcattgccattaatgtggatgatcctgatgcagcccaattataatgctatcaactgatgtcaaacgggctgaaacctggctacttagaagctactgggactgcttagacggtttaggtgctgatggaaacccgaatgaggttgcgttactgccgaattcacgatagggcttgcccttgtttttacagcgctctgcctggagcctgtgcctaaaccgtgagggccgtgtgctccactgttggaccttagtgtctgtgtgcgccttggtttccccctgttctgcgcaccggttgtgcccaaattcttacacttttgctcgtagaccgcgcacgtccccctttccctttgtgttcttctcccg

SEQ ID NO: 696239 - DNA, 318 bp, Homo sapiens
gaggagtgagtggaggtggtaagcgagtcaaacccaggacttcagttggtgggctggattgggaggtcaggagggcagtattccctgcatttcatgcgccttgcttggatgctggcttatggcagtggctgtttggtgatgatgcagcggatgtggtctgagaagatgaaggtgtgctggaggatggggaagggcttggaatgggggctggacgcaggcttgtggatggtgatgtatccagggcacggctgacgacctctcacgccagtcaccttgcatgtcctgcacatattcctgcacaactatgaccactcccca

SEQ ID NO: 696240 - DNA, 147 bp, Homo sapiens
tgtttgccaggttgtcttgaacttctgggcctccagcagtcctcctgccttgacctcccaaagtgctggtattacatggtgtgagccatcatgcctggcctgttaaagattttttaaaattagcagccttgtgccatgtgcatgtgg

SEQ ID NO: 696241 - DNA, 447 bp, Homo sapiens
agtgtctaagactgtcttcatttgaaaacaaaaagtctgataattttgcttaggcaaccagctttatcaacattatcaaaggggagaatcccccggtctctgggatttatctaaaaattgggaaaaatcttccggtttttttctctttgcctttaagaatgttaaaacaaaaattttggattttcaactgggctctttaaaaggggaaaaaaaaaaccccaaaatgtataaaaattttatccccaaatgttttttaaacctttttggaaaaataaggaaaattttggccccggcggtaaaataactaaagaatgatgaaaaagtgttttttttcccaattgcatcaaggtgggagggttgggcttttccccccagaagcccctaaccatgggggcctgttgagccctttaaatgtggagtagtttaaattttaaagccataggcccc

SEQ ID NO: 696242 - DNA, 539 bp, Homo sapiens
tgtattgcaacagtttcttaaaaagcgccacgccgtcctcgcatggaaggcctgacccagctcacatgaatctgatgctgtgttgcttttcctgagcacgtgtcctgaagacagagccatttttgactgcgtgctgtgtgttttctggggtggcccctactatctgtctggtccctgtcactgtgtcccccaggaaccaggtcacccttggctgttcaccccagaaaatagcagttgttccccctcttggttgtggacccctctctagctggagctggagctcctcgggggatttgcagaggacagtttctggaggtgggaacatgtgaggaagatgtcatcgcagaggtcttctaggataatgtgtggccttaggtactgccacccaagccagaggagaggttttattctctgcatccagagagctcctggctttacccttgagtccagaaacgggcccaagcagcccgagtctgccaagtagctcagctggctaagtggctccaggcatgggcaacagagcgagactctgtctcaaa

SEQ ID NO: 696243 - DNA, 688 bp, Homo sapiens
atttaattattcatttttaactgtgtggactcaagtgttactagtttttttttaaaaaaaagaagcagcttgtggtttgtttatcctatttgtttcttattccattggctttgctttaatcttttatttccttaggtgtttgttatagagagacggggtctcagtgttgcccaggctggtctcaagtgatccatgcaagtctcaactcccgacctcaagtgatcctccttcccaggcctcccaaagtgctgggattacaagtgtaagcacccggcccttagttttgtttctttaggatcattctgttttctttaattttggagttgaagctttacctcactggttttcattctttttttttttttgggagacagagtctctctcgttgtcgcccaggctggagtgcagtggcgcgatctgggctcactgaacctctgccccccaggttcaaattttggtattttacagtagggaaagggttcactcgtgtgggccaggctggtcttgaactcctgacctcaggtgatcctcccgcctccgtctcccaaagtgctgggactaacaggagtgaccactgtgcctgggcaccattctttcctcttggataacttgcagatatctcccactccacccttaatcctctcaagcacattgaaaccaccttggcaaagatcatgacaccgagaga

SEQ ID NO: 696244 - DNA, 227 bp, Homo sapiens
atgctgaccaggtttcatggttcccaggctcaacctgcagttctcagccctcattcaggaggggcctcggcaaggatggggggtgccgtctttcccttgccggtagccccaaggactctgccggctccctcgccttgtgcagcagtactgcccaccctgtctctggaggttcccccgtcctcatatccacccagactaccccgtaaaggcacaatcatatggccttt

SEQ ID NO: 696245 - DNA, 443 bp, Homo sapiens
gcacgagggtgaaattctgcgatactttacctgcactggacaataaaaaaatattaaaagacaaaaacaaatttagaaaaaaatttaagccacaaaaaaaggctcatatggaattatgtcctatgtgtaagggcccttaggcaaagctggtggatatttgaaatgtcacagtagtcaaaatacaaatactttttgacaagttcttttactttgaaggaacactgaattcttctgtgcatatgtacatatgaatacaaatcgaaggcctctacctcctggagttatacaacttggcttgtttacctccacatgctgatcatgactatttgatatttttgagttcagtgtggagacttgaaacataagcgttctttgaaattgctatatccaaaataaattgacaagaaaattgaagatcatttttcacctgtacaaggaatact

SEQ ID NO: 696246 - DNA, 335 bp, Homo sapiens
tacgcctggcgcaagtccaagctgagtgatcctggcgggcctgtcgccctctccagggaggagcggtggagaggacccctgctgcccccgaatgcctaccaggtggggccaacagcctaagcaccgccatggacaagtgggggttggtccaccctcctggagatctgctttgacgagagacccctctgcagagccgcagccctccgagagtagcatttctaccagaggcagcaccggctgcccgagccctctgccacagtggcacactcaccagccagtgtctgacctatgagccaacccagaggccatattctgaccatcctgcgtgaccttac

SEQ ID NO: 696247 - DNA, 229 bp, Homo sapiens
  misc_feature (56)..(56): n is a, c, g, or t
  misc_feature (141)..(141): n is a, c, g, or t
  misc_feature (181)..(181): n is a, c, g, or t
  misc_feature (191)..(191): n is a, c, g, or t
  misc_feature (224)..(225): n is a, c, g, or t
taaatgaaatccggcccaacgccccggggggaagagggcggttttggcgttatttngggccgctctttccgctttccttcgcttaacttgaactccgcttgcgcttccggtccgttccggcttgccggccgaagccggtantcaagccttcactcaaaagggccggtaaatacccggtttntcccaccagnaattcaaggggggattaaccgccagggaaaaannaacc

SEQ ID NO: 696248 - DNA, 293 bp, Homo sapiens
ttagcataatatatgggttacttagaaccaaagctagctcaacatattacagcaaatacaaaatatacagcaaacataaaataaaatcattcacctaacattaaagtataggagatataaattggatcctgacgctatagagatagtaccgtaagggaaagatgaaagaataaaatagaagtatcaaaaagcaaagattaccccttctaccttttgcataattggtttaaccagagataaatctaacaaagagaacttgagctagataccccgtaaaccagacgagctaccta

SEQ ID NO: 696249 - DNA, 884 bp, Homo sapiens
aggaggagaaggttgccgggtgccgggtgcgatttgaaagatcaaagtgaggaaaatggacagtgaggttcagagagatggcaggatcttggattgattgatgatgctgtgcgagaagacaagctgccttatgaggatgtcgcaataccactgaatgagcttcctgaacctgaacaagaccaatgtgtggcaccacagaatctgtcagagaacaagacatgacgtggaacagacttagccttacagtacctccatgagaatgtcccccccatttgacaactgactgctgtggtcctttcttgtggatggattttctcaaagtacacagatcacagcatggtttgtgttcagtctccaaattcaaacctttgagtactcaactcaggcacccaaaaattgtaccacccatttagtttgtggtagcacaagtgcactgcgacattgcctgagcaacacgcaggattctcagtcgtgggcgcactatttgcgctctttaaacctaaaacttcttcccttgcgtaggctcatattttgcacctgcttggtcaaaacatttgcctctacctctggatttgttggtggtcaagtttaacaccttccactaatatgtgttgtcctgtaacacaggtgatggacgtatgaacggaacggcatgaacagggagcagcactatgggactattaccttctcatcttcccaattgagacgctccgaggatcagcgcactgtggtatccacaccaatcctggatggcgccacatctcacgatttcccccggccccacaccacgtctgagagaaccgcccacaactcgcggaaatcgcaagacgacaacctcactctacccaggcgaatgtgccaacactacagcactcagagaacaa

SEQ ID NO: 696250 - DNA, 530 bp, Homo sapiens
ggagcacccccgggacctcaagttcagcatcgactacatcctgtcctccccagaccccttccctgggctcaagccgccctgcctcgcacaagagggcagatacccgcggctggagaacgtgggactccacttttggacaatgtgatgtggagccaccctggaggcccctgcagttcagtctggggtcttccccggaccctccctggaaagacgattccagccccaccttgagccaggaagccagggttcggcaaatcctacaatttctcctgcagacagaaggtcaggtgccacaccaggcctggactggggggacaggcggaggtggagctccttaaagatggaagcaggacagcggcagatttgagagcaaccaccaggtccctgagtgcaaactgaccacagatgagcccctcctccccactgctgacttgctgggtatagcggagcagcacccctccagagacgctcctgggctgacacctgccctttgcacccagctgaaataaaactcttggaatctgctgtca

SEQ ID NO: 696251 - DNA, 629 bp, Homo sapiens
  misc_feature (14)..(14): n is a, c, g, or t
  misc_feature (71)..(71): n is a, c, g, or t
  misc_feature (75)..(75): n is a, c, g, or t
  misc_feature (79)..(79): n is a, c, g, or t
  misc_feature (125)..(126): n is a, c, g, or t
  misc_feature (128)..(129): n is a, c, g, or t
  misc_feature (131)..(131): n is a, c, g, or t
  misc_feature (134)..(134): n is a, c, g, or t
  misc_feature (141)..(141): n is a, c, g, or t
  misc_feature (149)..(149): n is a, c, g, or t
  misc_feature (153)..(153): n is a, c, g, or t
  misc_feature (155)..(155): n is a, c, g, or t
  misc_feature (158)..(159): n is a, c, g, or t
  misc_feature (161)..(161): n is a, c, g, or t
  misc_feature (165)..(165): n is a, c, g, or t
  misc_feature (174)..(174): n is a, c, g, or t
  misc_feature (182)..(183): n is a, c, g, or t
  misc_feature (185)..(185): n is a, c, g, or t
  misc_feature (218)..(218): n is a, c, g, or t
  misc_feature (221)..(222): n is a, c, g, or t
  misc_feature (224)..(224): n is a, c, g, or t
  misc_feature (233)..(233): n is a, c, g, or t
  misc_feature (237)..(237): n is a, c, g, or t
  misc_feature (239)..(239): n is a, c, g, or t
  misc_feature (242)..(242): n is a, c, g, or t
  misc_feature (261)..(261): n is a, c, g, or t
  misc_feature (267)..(267): n is a, c, g, or t
  misc_feature (321)..(321): n is a, c, g, or t
  misc_feature (363)..(363): n is a, c, g, or t
  misc_feature (391)..(391): n is a, c, g, or t
  misc_feature (399)..(399): n is a, c, g, or t
  misc_feature (401)..(401): n is a, c, g, or t
  misc_feature (457)..(458): n is a, c, g, or t
  misc_feature (522)..(522): n is a, c, g, or t
  misc_feature (539)..(539): n is a, c, g, or t
  misc_feature (563)..(563): n is a, c, g, or t
  misc_feature (601)..(601): n is a, c, g, or t
gaaagcagggtgtngggagcgagatggctccgggggtttagacactgctggcttcggtcccggccgccacntgcntttnattccagttgcgagcagcttcacttggggccctgggcctccgattnntnntngtngtttttntatatttngccntnttnntnggcngtggcgtcntggtattnntnttactcggacaccaggtcgttcattttgctctnggnntnggtgaattncatntngtncatgcccttgcccgtgtanaagtgnaggaaggctttgcaccggaaaatggccgtgaattgttcggagatgcgcttgaanagctcctggatggccgtgctgttcccgatgaaggtggagganattttgaggccgcggggggggatgttanaaacggcnantttcacgttgttggggatccactccacgaagtagctgttgttcttgttctggatgnncagtatctgctcgtccacctccttcatggacatgcggccccggaacacggtggccaccgtcagnagcggccgtggcgcggntcgcaggcggccatcatgttcttngcatcgaacatctgctgggtgagctcgggcacggtcancccccggtactgctggctgccccgggct

SEQ ID NO: 696252 - DNA, 126 bp, Homo sapiens
ggtgctcagacctgagctgacttggcaggtgtcaaggacaggctccttgttggagcacagaagtgctatgggccagaagcctcccttcaagatctcaccttcacaggtgagagtgagctgcagtct

SEQ ID NO: 696253 - DNA, 384 bp, Homo sapiens
  misc_feature (26)..(26): n is a, c, g, or t
  misc_feature (37)..(37): n is a, c, g, or t
  misc_feature (203)..(203): n is a, c, g, or t
  misc_feature (325)..(325): n is a, c, g, or t
  misc_feature (333)..(333): n is a, c, g, or t
  misc_feature (355)..(355): n is a, c, g, or t
gaggatcgcttgagcccgggggattnaggctgcagtnagccatgcagtgagccatgatagcaccactgcactccagcctgagcgacagagcgggaccctgtctcaaaaagaaaaaaaatggaaaatgtggtgtgtatatatacacaatgggctactattcagtcataaaaaagatgacatcatgtcatttgcagtaacatgantggaactggaagacactatgttaagtgaaataagccaggaacagaaagttaaacaccacatgttctcactccatgtgggaaactaaaaaaagttgatcttgccaggcatggttggctcacgnctgtaatnccccagcacttttgggaggccnaggtgggtgggacccttgaggtcgggagt

SEQ ID NO: 696254 - DNA, 103 bp, Homo sapiens
cgtccgtcacacggcacaggagaatccacaccgggaagaagccttacgagtgcagcgactgctggaaagccttcaacgacccttcagcccttaggagccatcg

SEQ ID NO: 696255 - DNA, 338 bp, Homo sapiens
  misc_feature (35)..(35): n is a, c, g, or t
gttggccaggctggtctcaaactcctgaccttgtnatccacttgcctgcgcctcccaaagtgctgggattacaggcgtgcatcgcgccaggccttagctgttgttttaagagcagggactgtcttgccatttatgctgatcattttctgtgtcctttattagagttttaaatttattaccacaggagtcttatgtggtgttaggtaagttaattcctatgaacttttatcattttttcgctgctgaaaatgtatgttacttcagtatattttctaagttggttgtgctgggataaaaaaacattattgtttttaaaaggaaattgttttattgaagta

SEQ ID NO: 696256 - DNA, 763 bp, Homo sapiens
gcagcagcctcgctgcttgagccccctcgtgtgccgagcgtaccgttcccccctgcccgtcttctcccgtcagcgcgcgccgcttccgcaggccgtttccaccgaggaacaaggaactcgtatcgtatgatccagaatatccagaaccatccactctttcgacccctattgctgatgcaagtaagggtgatgacctgcgttcctgcatggccactgaggattatatccatatacagaacttcaccagagacaacggcaggaagacccttactactgtccacagggctcgctgcacttgcattacgataaaacacgacaactagctgaacgcgttcaacggcaacacagctttgccctgctaactggtacctgtacctctagacgcattcccgggaactcttggacgcaacgtaacttcccagcatacaagcgggtgaccccaaacgccaagaaccatattgtccagatcacctcgctaccagaaatatgggacacctgcccttacgtgacacgcacttccaagccgtgcaaaaagcctaccactgcccgcctctaaaacaggtgactatggctagcgaagtcacactgcacaacgccctttcacagcctttaacgccccttcacacccttgctcccaacacgcacagctagaaaacaattctctcaccgctttgctaatacccccttcgtgcttccgacaggggctcatccacaaacacccgttcccccagcactctgccaacttacaactcgctacagccca

SEQ ID NO: 696257 - DNA, 274 bp, Homo sapiens
cctcacagtgcctggggcttcaaaggcactcgcattctgtttgagctgtcagccagcacaggacgacatcttgtgatgcggatgacgtgaaggggtggagctgcacccggatatggaagcatctttgcacaacttttaccatgtacttattggcacaaattcgggcagcctccagggcttcagaggacagctgctcatattcatctgacaccatgtggccacagagcggaaactcatccacttttgcctttttccgccccaggtcaaaaatgcg

SEQ ID NO: 696258 - DNA, 369 bp, Homo sapiens
cgtgagcgctagcgtgctctgtgagactggggaaagtagtctgagcaagctctgcgggctgtattttagagctctgtatcgtgaggacatgtgcagagcacagaccctgatgatacgtgtatatgacagctagggtccttctgtactgtggccctaactctctggccggactttccagatctctgagagcttcaactatatgggaacgaattggataccaataggtcaccgtgagggcccaagtggctcaaagacctaacagggatacttttcaatcagtgctggaaggatgcgttatacctgtctgaagctacgtcatcctttggcattgatgtctcattgggtgtggaacatgtcacgctcatggtc

SEQ ID NO: 696259 - DNA, 546 bp, Homo sapiens
gggcagtacggattgtgtcctctgatacagattaatagttcagatcatctacttgacatctcaacctcaacaagtcgcaaaaaaaaaaaagagaagaattcggattcttctaaaaatatttctatggttatgggggggcattcgagccaggtctcatcggactggctggtcagtcttcagcaatcattggggactatttcgagatgggatgacctcatgtttcaggcttaaggccacattccccctcaggctaggggcctatgtggccaaaaggactagatgactagaaggggataatctaagaggcacggttgccagttcttctccggtcatttctctgggacccatccttggtggccttcaatccctccagtccacagaactcgggtccgggtcacagatgattccaggggttacccagggttggcttctctggagggccaacacatcacgtggtagaccatgtcccatctttaggagacaccggtctcttggcttctggaagatctcttccatctcacaagcttccttatgagctcagtgggt

SEQ ID NO: 696260 - DNA, 997 bp, Homo sapiens
ggcggcgggggcatgaatatgctcaggcttcacgtaagaggctcgtcctctagtgtcctccgcttgtggcaagaaaaagcgtctggatttagcacgcccatagtgacgacccaatgagaatcgaacgcgaactgccaatttccgcgtcagcagatcctggaatgctcatcaaagatgggctgatcgatcctgcaagtcctgattggacggtccacttcccgggcctcggatgtcgcgagaggaagatatcttggtccgtcgtgagagggcatgcacatgggcatagagttcagcgggaagggctacaggtcaaatgcccgaatggcagtattaaggctcacatggatgatggagaatgagggattttggggcgcgaagcttgcgtcaggagagattgcggtggaagtcgttgtaatagtcgaatcgccaaatgtatcgccgggacgggttgccgtggaagggtggaacgggagacatgtcgtctccagaacaaaccaagaagtcgcgtatgctcatggtaaacaccatccgaacaccagtcggaggcgggagactaaggcaaccagcgctcaagctcgctggtcgtgaaccgaggcatgatggcccgacaagggatctaagaccaaagggaaggcactgcaaagcgccgttgaagagcgcctccaggccaagaaggaggagatccatcaagactttatcccaagtggaggaacgaagaccaagaggattaaaaacctccccacttggtcgtgtacatactgggctctgtgattacatagatgcagcattacacataaacaagccttaatctgcaaaggagggaaaaacaaaactggaggtttggagggagagcagtcagttgcaggttatgtgcaaaatttatgaccgaggagaggggaccggaaaaacacgcgggccaggagcagggtcgcacacacaagggaccagagaggggccaccggggggggcctccacccccgagaaaaaatgggggcct

SEQ ID NO: 696261 - DNA, 205 bp, Homo sapiens
aagactaataggatgtccatgtaggtgtatgcatcgagggtcagtccgcgtaacgtcggtgtcataccggataggccgcgcaagtgttgtgggaagacagttagatttacgccgatgaatctgctagtgacattggcttatggcgtaggtctggtctagggtagtacctgaagcaatcggggaaatcaatttttatgaagcctcc

SEQ ID NO: 696262 - DNA, 193 bp, Homo sapiens
tcggtacccgctcgccctctctgtatagtcattctgagacggagtttcgtcagcccctcagcctcccaagtagctgggactataggctagcaccaccatgcccggctaatttttgtatctttagtagagacggggtttcaccatgttggccaggcttgtcttgaactcctgaccttgtgatccgcctggctca

SEQ ID NO: 696263 - DNA, 908 bp, Homo sapiens
tccccctgggttccacctctgcctttacccgcctgttggggttaacaaagccaaaggaaaagagaggagaaaaaaaagaaaaacaaaaccagccgtttctcacccggtgttgtgtcccacgtcaggaatgtttcagcagaggtggtgaagaggatcttctgctggacccttctatcctctctggctgaggcagcgtgcctacctgatctctggccagcccaccttctcctgtggtccccgcggttgccccaagttctcttacatctgggacggggccccaggtgttccctcaggggtccagtccttcctgtggggggccccaggctccgggaacaattaactgcaaccggatgtgataatggagttgtccgggtgtggtgaaaaagcgatgtgccccaagactcttgttctcagggccatctgatttggtgtcgactgcccccagtgaactctcctccaggattgggggccgtgtgtgccccctcaccctacggggtaactatccccccgttgcaccacgctacaagtgtgccctctcagctaaagttcacccgaggggctgcaagtgggcttcctgtggggcaccccgtctcagggagaattcccctcataacaaggtggcttcacaaagacgattgttatctcaacaaacggaacagggctccttgggaacccccctccgcgaaaaattcgccccttatcatcaatttcggggtgcgggaggacaaccacataaaaaccaccaagtacgaggacaacatacttggtttctgtggagccccgttggaactcctgaggtgtacatccgaataacatgtgggtcgggaacccctatgcatattagcaatatatcattaaccaacacaggggtggagcaaaatttgctcccaataaaataattggccccc

SEQ ID NO: 696264 - DNA, 108 bp, Homo sapiens
  misc_feature (1)..(1): n is a, c, g, or t
nttcttctggtcgtctctgaggtatccccggtactgcgctcgactctatctgtctgcttttcctgttgacaaccctggcgaccctagcgggtcgtgactgggacaccc

SEQ ID NO: 696265 - DNA, 394 bp, Homo sapiens
  misc_feature (258)..(258): n is a, c, g, or t
  misc_feature (282)..(282): n is a, c, g, or t
  misc_feature (309)..(309): n is a, c, g, or t
  misc_feature (373)..(373): n is a, c, g, or t
  misc_feature (389)..(389): n is a, c, g, or t
gtcgaccaaacttcctatctggctttatttttctacacagaatgtgtgtaagatacccacagacagatatgtgtctacacatctgtctgtatcccacttcccagttgattttatctctgtgtgaacacaatcaaggtccattttgttccttatcatccctgagcctctaagaagtatcatatttccgaagtacttaaaaacaaaacttactaagtaaatgacagagtggatgtcagctaaatgtgagtatggcacagnaacaaatggccctgaaacatcagnctttacgggattccttcctagctccgngaaaagattagcatgctctctcctttgcatgttggcacatccacagccaacaggcacacaaagnatacttgcactgtctncgtcg

SEQ ID NO: 696266 - DNA, 412 bp, Homo sapiens
cggggccaggaattgaagtgatgggctcacgcaagcatggttaacgtccctaaaacccgccggactttctgtaagaagtgtggcaagcaccaaccccataaagtgacacagtacaagaagggcaaggattctctgtacgcccagggaaagcggcgttatgacaggaagcagagtggctatggtgggcaaactaagccgattttccggaaaaaggctaaaactacaaagaagattgtgctaaggcttgagtgcgttgagcccaactgcagatctaagagaatgctggctattaaaagatgcaagcattttgaactgggaggagataagaagagaaagggccaagtgatccagttctaagtgtcatcttttattatgaagacaataaaatcttgagtttatgttcaaaaaaaaa

SEQ ID NO: 696267 - DNA, 851 bp, Homo sapiens
cggggccaggaattgaagtgatgggctcacgcaagcatggttaacgtccctaaaacccgccggactttctgtaagaagtgtggcaagcaccaaccccataaagtgacacagtacaagaagggcaaggattctctgtacgcccagggaaagcggcgttatgacaggaagcagagtggctatggtgggcaaactaagccgattttccggaaaaaggctaaaactacaaagaagattgtgctaaggcttgagtgcgttgagcccaactgcagatctaagagaatgctggctattaaaagatgcaagcattttgaactgggaggagataagaagagaaagggccaagtgatccagttctaagtgtcatcttttattatgaagacaataaaatcttgagtttatgttcaaaaaaaaacacaaaaggggccgccgctcgcagatctgagaaactagtcgaactaaccctggggtccccgtgggcatgggacaagcttatcggtagatgggcagaggcaaccgcaacaatttctaatggatgggggccacaattcttgaaacttcttggatgttggtccatcctgcagcaaagacttgggtagactttggccaaatcccaagaatgctgaggtgggtgatggccccacctcagtgaccttgctgggcttgcagagttttctgaagcagggtgaaaacccttatggtggggggagggtttacacccccagatcataattccgagctttccgcacagccaaccagctgggcggtttacccagatcaaggagatggtggtgaccgtgaagaaggcgaataccgtgggcaaaggaacctgcttgaaagttgtgccatagccc

SEQ ID NO: 696268 - DNA, 495 bp, Homo sapiens
cggggccaggaattgaagtgatgggctcacgcaagcatggttaacgtccctaaaacccgccggactttctgtaagaagtgtggcaagcaccaaccccataaagtgacacagtacaagaagggcaaggattctctgtacgcccagggaaagcggcgttatgacaggaagcagagtggctatggtgggcaaactaagccgattttccggaaaaaggctaaaactacaaagaagattgtgctaaggcttgagtgcgttgagcccaactgcagatctaagagaatgctggctattaaaagatgcaagcattttgaactgggaggagataagaagagaaagggccaagtgatccagttctaagtgtcatcttttattatgaagacaataaaatcttgagtttatgttcaaaaaaaaataaaaaagataaaactccagggggtggcccggttacccaatttcgccctaatatgaaagtcgtaattaccaatctcactgggc

SEQ ID NO: 696269 - DNA, 664 bp, Homo sapiens
  misc_feature (347)..(347): n is a, c, g, or t
  misc_feature (353)..(353): n is a, c, g, or t
  misc_feature (358)..(358): n is a, c, g, or t
  misc_feature (375)..(375): n is a, c, g, or t
  misc_feature (379)..(379): n is a, c, g, or t
  misc_feature (450)..(450): n is a, c, g, or t
  misc_feature (466)..(466): n is a, c, g, or t
  misc_feature (477)..(478): n is a, c, g, or t
  misc_feature (537)..(537): n is a, c, g, or t
  misc_feature (629)..(629): n is a, c, g, or t
  misc_feature (633)..(633): n is a, c, g, or t
cggggccaggaattgaagtgatgggctcacgcaagcatggttaacgtccctaaaacccgccggactttctgtaagaagtgtggcaagcaccaaccccataaagtgacacagtacaagaagggcaaggattctctgtacgcccagggaaagcggcgttatgacaggaagcagagtggctatggtgggcaaactaagccgattttccggaaaaaggctaaaactacaaagaagattgtgctaaggcttgagtgcgttgagcccaactgcagatctaagagaatgctggctattaaaagatgcaagcattttgaactgggaggagataaaaaaaaaaaaaaaaaaccaanactagngcctntctctcctcctcgcggngggnagaaggaacgcgcagccagcctttgggaagcccaggcccggcaagccatggcggtggaaggaggaatgaanttgtgtgaagttctgnctctacgtccnncctgcgggcctttggcccctgtgcagggggactgattgccgtgggtgtcggggcacagnttgtcctgagtcagaccataatccaggggctacccctggctctctgttgccagtggtcatcatcgcagggggtgtctcctcttccgggaggnctangagggcagctgcgggcctgcacggagaactt

SEQ ID NO: 696270 - DNA, 110 bp, Homo sapiens
gatgctcaccgctcccactgttgccagactcgacgaccgttggtacaccactggtgggaccgatgacgtcactgcctcatctgcctctgtgccgtgtgcacccgtgtggg

SEQ ID NO: 696271 - DNA, 319 bp, Homo sapiens
  misc_feature (51)..(51): n is a, c, g, or t
gaggcctattggactcacttgatgtaacagcctcaggcttataagacggtngactactgatcagaatagctcgaggcgtctgctgtcagggcttagctaccggggttgtatcggctaaaggctaaaactacaaagaagattgtgctaaggcttgagtgcgttgagcccaactgcagatctaagagaatgctggctattaaaagatgcaagcattttgaactgggaggagataagaagagaaagggccaagtgatccagttctaagtgtcatcttttattatgaagacaataaaatcttgagtttatgttcaaaaaaaaa

SEQ ID NO: 696272 - DNA, 448 bp, Homo sapiens
gggcttcccctctgagggacgaggaggaggaggaggaggagatggtggtgtcggaggaggaagaagagaaagggccaagtgatccagttctaagtgtcatcttttattatgaagacaataaaatcttgagtttatgttcaaaaaaaaaaaaaaaaaaaaaaaaaaaaaaaaaaaaaaaattaaaaaaaaaaaaaaaaaaaaaaaaaaaacaacaaaagggtgcgtgggcgcgcgcaccacgcggcgcccccacgaggaagaaggtcttcccagaaacaacaacgtcgtggtgggcggcgcggggggggcccaccagtaggggagcaatggagacacaccgggggcgacaaaacacgagcggtgtcccccaagagagaggagacctgctggggggcgacgacgagaacgaggggggggggggggggcttctccccccccaaataacagc

SEQ ID NO: 696273 - DNA, 712 bp, Homo sapiens
cggggccaggaattgaagtgatgggctcacgcaagcatggttaacgtccctaaaacccgccggactttctgtaagaagtgtggcaagcaccaaccccataaagtgacacagtacaagaagggcaaggattctctgtacgcccagggaaagcggcgttatgacaggaagcagagtggctatggtgggcaaactaagccgattttccggaaaaaggctaaaactacaaagaagattgtgctaaggcttgagtgcgttgagcccaactgcagatctaagagaatgctggctattaaaagatgcaagcattttgaactgggaggagataagaagagaaagggccaagtgatccagttctaagtgtcatcttttattatgaagacaataaaatcttgagtttatgttcaaaaaaaaaaaaaaaaaaaaaaaaaaaaaaaaaaaaaaaattaaaaaaaaaaaaaaaaaaaaaaaaaaaacaacaaaagggtgcgtgggcgcgcgcaccacgcggcgcccccacgaggaagaaggtcttcccagaaacaacaacgtcgtggtgggcggcgcggggggggcccaccagtaggggagcaatggagacacaccgggggcgacaaaacacgagcggtgtcccccaagagagaggagacctgctggggggcgacgacgagaacgaggggggggggggggggcttctccccccccaaataacagc

SEQ ID NO: 696274 - DNA, 498 bp, Homo sapiens
cggggccaggaattgaagtgatgggctcacgcaagcatggttaacgtccctaaaacccgccggactttctgtaagaagtgtggcaagcaccaaccccataaagtgacacagtacaagaagggcaaggattctctgtacgcccagggaaagcggcgttatgacaggaagcagagtggctatggtgggcaaactaagccgattttccggaaaaaggctaaaactacaaagaagattgtgctaaggcttgagtgcgttgagcccaactgcagatctaagagaatgctggctattaaaagatgcaagcattttgaactgggaggagataagaagagaaagggccaagtgatccagttctaagtgtcatcttttattatgaagacaataaaatcttgagtttatgttcaaaaaaaaaaacaaacacgcgacaaaaaacaacacaaacacacaaccacaaaccccaacaaccaaccacaacctgcgcccgttggggctttggcc

SEQ ID NO: 696275 - DNA, 426 bp, Homo sapiens
agctgcagtttgctcagctgtgaaatggggagaataataatgcctatttcatgggggtattgtgaggagtatgttaagtgtctctctggctcatgctgagagctgaataagtgatgattagatagttttaacatgaaggccaggctctgttggatgaaaaatgtacgctgggctcatccctgtaatcccagcactttgggaggctgaggcgggcagatcacttgaggtcaggagtttgagaccagcatggccaacatggtgaaaccccgtctctactaaaaatacaaaaactagctgggtgtggtggtgcgcacctgtagtcacagctatttgaaaggctgaggcacaagaattgcttgaaccagtgagccaagattgcatcactcccctacagtctgggtgacagagcaagactctgtctcaaaa

SEQ ID NO: 696276 - DNA, 655 bp, Homo sapiens
cggggccaggaattgaagtgatgggctcacgcaagcatggttaacgtccctaaaacccgccggactttctgtaagaagtgtggcaagcaccaaccccataaagtgacacagtacaagaagggcaaggattctctgtacgcccagggaaagcggcgttatgacaggaagcagagtggctatggtgggcaaactaagccgattttccggaaaaaggctaaaactacaaagaagattgtgctaaggcttgagtgcgttgagcccaactgcagatctaagagaatgctggctattaaaagatgcaagcattttgaactgggaggagataagaagagaaagggccaagtgatccagttctaagtgtcatcttttattgtcttcataataaaagatgacacttagaactggatcattgcctttctcttcttatctctccattcaaaatgctgtgcgatctttcttaagtgagccgaggcagttcgtactgtaagattgctagcaagattctgagacttcatactgccaacttcgaaggcccttttaagcaacaaactcttttcctctttggtaaggtttgtggagcccttgtttgccgcgtgagaaaatacggcgcttaagtttgtgcggcgtgcagtaggctgcagtgcgggttatcccg

SEQ ID NO: 696277 - DNA, 242 bp, Homo sapiens
actgtgtcactttatggggttggtgcttgccacacttcttacagaaagtccggcgggttttagggacgttaaccatgcctgcgttgagcccaactgcagatctaagagaatgctggctattaaaagatgcaagcattttgaactgggaggagataagaagagaaagggccaagtgatccagttctaagtgtcatcttttattatgaagacaataaaatcttgagtttatgttcaaaaaaaaa

SEQ ID NO: 696278 - DNA, 446 bp, Homo sapiens
  misc_feature (352)..(352): n is a, c, g, or t
  misc_feature (446)..(446): n is a, c, g, or t
ggtgagccctcattttgagttatcaccttaataaacatttccaagccctttagttagaagacttgaaacatgtttttcaaggcctagtgaacgctgtacaggagaacctgaaaagcaaattccgtgaaatgatttttagttttaagatttgggttctggcccagacgtggtggctcctgcttgtaatcccagcactttgggaggctgagacaaggcggatcacttgagtcccaggagttcgagaccagcctgggcaacatggcgaaaccccgtctctacaaaaatacaaatattagctgggcatagtggcccacctgtagtcacagctactcgggagactgaggcagaaggntcacttgagcccaggaagtcgaggctgcagtgagctgagattgcaccactgcactttaacgtgggcgacagagtaagaccctgtctcaactccn

SEQ ID NO: 696279 - DNA, 115 bp, Homo sapiens
cctcgctaggccatcagagagaggaagaagatttcatagggcgcttttggcaggatgcctgatgactgttttttcttctgactggacactcccctgctggctgcagtgcaggttc

SEQ ID NO: 696280 - DNA, 744 bp, Homo sapiens
  misc_feature (482)..(482): n is a, c, g, or t
cgtggtgactcactcctgtaatcccagcactctgggaggccaagacgggtgaatcacctgaggtcaggagttcaacaccagcctggccaacacgttgaaaccccgtctgtattaaaaatacaaaaaattagctgggcgtggtggtggatgcttgtaattccagctactcggaagtctgaggcaggagaatcgcttgagcccgggaggcagaggtccgaagatagcgcgagatggacgtccatgctgtgcagacagtgagcgatacagtgactgtctgtagcaaagaaaaaaagattaaatctaggctgggcactgtgggctcaagccggtcaatcccagcactttgggaggctacaggtaggctgacgtgtgttcgcattgtgaatagatactttggacagccttggtatcgctctcgagtaacgcacgagatgtcctaaattcaagtcctttcgcaggagttaagaagacaacaccttggngcctgagtaatcattaacctaaaaatgagtctcgatagggttggacgagatactgtgacgagcaaaatcctgtctcgtacacgaagagtgcgacataaattacgctggactgtcgcgtgggtgggtggtgccttgttgtccccagttaacggggaggctgaggcaacaaagatcgacaaaagaccaggcagggtaagaaggctgcagtgagcctgggataaggccacctgcaatccaatcttggggcgacaggaggcaagac

SEQ ID NO: 696281 - DNA, 745 bp, Homo sapiens
agcctgacggttgccatagggtcttcctcccctgactgggtttgggaagcagttagggagatagcgaaccggagtttccccagaagcggggtgggagggtgtgcatgctagtgttggcgcgtatgcaatgtgcatgaggtgtgcaccgttcctaaggaaggggcctctgggagctgcccaccctacctgccctgcctgacctgctgcccctcccatgacctgtcaaagaaaatcgagtatggaggagcattgatgggtgcctttgagggcagtggttcagcagggacaagactcacgactttatgatgcaccattctgttcccattctgcgcctgctgctgtgacccgatttttgtgaaaactgtgtgttgtaccgaggcgctgacttgtcacggctgacctgcctgctcgtgccttcattctgcatgcggcatggtccctcccattctgtgctccacctgcagcctccctgggtggcctatggctcccccgatctatgagacctccctctcatgatcactggtacctgggggcctgaattctggcccccggttccccatacagactgggacttggctggatggctgtcctgtggagccgctgcccaccctgacagagggatgctgggcatcccctcatcctctgtaactccctgtcttcaccagactcaaggacaccctggccctgctgaggaatacatgagcttcagaccagacagaagcaagacaaatatcagttgctctag

SEQ ID NO: 696282 - DNA, 364 bp, Homo sapiens
cctatgaggctgcagtgcacagagacagtgccactgcacatcagcctgagtgacagagagactttgtctcaaaaaaaaaaaaaaaaaaatattaatttaaatggtagacagtttaatttatctggtcctggcagtgggtggcttttggatggctaatttaataaagtggttacaatatttaacatcttctccggtaagctggtccagtttttcctttcatatggaaaacactaacacagtggctgaagtccagcgtgtacacacgggggtgacccctgggctgcatcggtcctcaccagtcagacatttcttctaatgggtggatggcggggctgaaccgggtggcaacatatggcccgtcatt

SEQ ID NO: 696283 - DNA, 320 bp, Homo sapiens
tgaggatcttgcgggacatcgtggaaggacacacccaggttacacggggcattgtggaatgacacacccaggttcacacggaacgtcgtgaagggcacacccaggttcacacggaacgtcgtggaagggcacaccccaggttcacacacacatgcatcgtggaacgacacacccagggttcacacggaaccatcatggaaagggcacacccggtgttcacattggaacgcctgtggaaagcacacacctcaggttcacacgggaattgtcttagaaagcacggagaaccagtttactccgggtaccgaggctcgaaattc

SEQ ID NO: 696284 - DNA, 342 bp, Homo sapiens
tgcgattgtgaatagtgctgtgatgaacatatgtgtacatgtgtctttatggtagaatgatttatattactttgggtatatactcagtaagggggtcctgggtcaaatgatacttctgtttttcacttctttgagaaattgccatactgctttccacaatggctaaactaatttacattcccaccagcactctttttcctgcagcttctaaaacaatgaatattttaattttttcctgacaataggcaaatatgatatctcaccactttatttgcatttctttgattacttttgaggttcagccctttcatatttattataacttgcctgttctgtcaattt

SEQ ID NO: 696285 - DNA, 493 bp, Homo sapiens
ggggatagagcagactgctcgttaggtgtcattgagtgcatcatagtagttatctaattataagaatgtatgtatgagttggaggaggtggctggtggcccatcacgtgtatctgtaaaggtttcagctgtgaggtagggccgatgtatggcaatcctgaagaatgacgatgctccactgccgccattctgacccggttgcaaagaggctttcttgcagaaggggtgattttgcatctgtagtagtcctctgcccgccgccgcaacgcttgcgcacgttgaaacatttccatgtaggtgtgtatttctttcatatccaatttcccattttcctctgcctctgacacctgcctctccttttctccgtgctcacgttctttcatgcttagtttcctcagatgttctttggcggtcttcctctttccattgattttgtcatgacggttgacttttgttgtcaccttcatcttacggattttagctcgaactttggt

SEQ ID NO: 696286 - DNA, 254 bp, Homo sapiens
  misc_feature (6)..(6): n is a, c, g, or t
  misc_feature (67)..(67): n is a, c, g, or t
  misc_feature (248)..(248): n is a, c, g, or t
ggtggntgggggcggtggatcacctgaggtcaacggttcgagaccagccctggtcagccctggtganccctggtgaaacccagtctctactaaaaatacaaaaattagcagggcgtggtgttaggctcctgtaatcccggctactcgggcggctgagacaggaaatcgcttgaacccgggagtcggaggttgcagtaggccgagatcctgccatcgcactccagcctgggccacagagtgagactccntttcaa

SEQ ID NO: 696287 - DNA, 946 bp, Homo sapiens
  misc_feature (68)..(69): n is a, c, g, or t
ttgttgtttttgagtatttttgattatatatctattacaatgttttcctctctggcgcgcgaacagcnncaccgtatgtttgtctatcgaggctcacaggtatattacaaagcttcttttacagaaacgctcagtacattaatttaaactggaatgacaaacgttatgattacagttttgggcaaaggctgtgccttgcttttttaaaaaatgggtacatcgaatgttcattttaacatcctggcataaaatcccactaattggctaataaaatcagatgcatatatttaacatttaaagttattgcacttcattttctgttcattttacaacaaaggggtgatacggaaagaaattacaattcaccgcatagcactttgcttaactcatatgttcatgtttactggcgtataacataaaaaacaaaaacagaagaataagttacctatttttaggttgccaatttttaacaactaattacgtctattttatttccccccccttttctttttttattattttataaagggacaaaaacgtcactattgtctatcccgcatctttttattagtttttctttcccatcaaagctcttttaataaacaaaaaattaaacatcatttcatacctcacactcgttctatacttccaatatgttttgtaagtttcttcttatatatcatctagttattgacgattctttattattttgctctcattcttttttcccatgtggttcataatccattttctcctctctaccaattcgcttgtcattacataatgaattgtatcttttctttattgtatgtttatgcagattacgttttctcatatccgtgaattattaatttcttttggtatcatttacacattggaaattattatgaataagggattgaactttatatcatcgtaagcattatcattaatgagtatgaaggag

SEQ ID NO: 696288 - DNA, 180 bp, Homo sapiens
  misc_feature (20)..(20): n is a, c, g, or t
ggggggggggaaaaaacccnttttttttttttgggggccccgggggggggtttttttaatttttccggcggggggccccaaaagcccccctttgaattttttttttttggggggggggggggttttcccccctttttaaaatttttaaatttttaaaaaaaggggggcctttttttttta

SEQ ID NO: 696289 - DNA, 683 bp, Homo sapiens
ccggctggagggaattagtaccaggcccggagttgtttgaaaaagcaatttttggcaaaccttgccagctgacacaaaggtggtggaagacttccttggggagcggaaaagtcaacatgcttgccagggactggagaattaatgaaggcgtttcaagaatacacacccaaacaatatgtcagcttccctttggccctgagattggaccaaaatccctaattttttcctgatgagcacgcttttcttaaaagatgctctctagtcatttggtctcatggcagaagcctcatgatactaaggagagtcttcaggtgtgacaatcagtatatagacaaacgtagtgttgtgatctggttggagactgggatgggaacaagttcatttacttaggggtcagagagtcttgaccagagggggccattcccagccctaatcagcaccttccagagacaaggctgcaggccctgtgaaatgaaagcaagcaggagccttggctctgagcatcccaaagtgtaacgagaaagcctgcatctttttttgtgtaagcatttatttttggaaattgaaggaacattaggccccagtgcgtgaaatatcttacagctataaatgaagggcctttcgatatagagcggttgtgatccacgccctcgaaggccgggctaggttatttttcctttttt

SEQ ID NO: 696290 - DNA, 219 bp, Homo sapiens
ccaggtcctgtacagcgctactgcaagagcagctcaccaccattgagaagcgctttgggctctccagttcttcatcgggtctcatttccagcttgaatgagatcagcaatgccatcctcatcatcttggtcagctactttggcagccgggtgcaccgtccacgtctgattggcatcggaggtctcttcctggctgcaggtgcattcatcctcacccatc

SEQ ID NO: 696291 - DNA, 170 bp, Homo sapiens
gcatctctcacttcgctcatgcattcccaggtaactgctaaaccctagttccgttgcacctgggcacgtgtcctgatagcaaccggcaacttatacagcctctggctagttcaagcagccagcatgtgctgcctgaacagcctaccggttgtcaccgtcctccagtctcc

SEQ ID NO: 696292 - DNA, 530 bp, Homo sapiens
  misc_feature (224)..(224): n is a, c, g, or t
  misc_feature (226)..(226): n is a, c, g, or t
acgcacccgttacttaagaaccttctttcccagagaaaaaagaggatttcttaaagaggttgcaccaagaggtattcccggaagcacacaagaatacccctggagtggcgctcttctttagagtcccaccattcttgttccacctttggtataataaacatggcctgtgaagaaagacactctctcgagagtgtgtgtaaataataatcaccgcgcggatgtgngnttttcttatcacgcgttctcacacataagaggaacccacactcattgggagtagttaaacactctggaggaagactctttgggggtccaaattcttctggaaacaatccacagggtggatggaagaccgcaccacttcttttttaaaatccacacatggacccctctctatttcctttttcagcaaatttcactcccacttttaatttaaaagaaacataaattgtaattttgctttattttttgatcatgaaactggttgtaaagactttttggccaaaaaaaaaagttttgggaatttctta

SEQ ID NO: 696293 - DNA, 1972 bp, Homo sapiens
  misc_feature (775)..(775): n is a, c, g, or t
ggtcacgacctaaaacattgacttctttaaatcttagccacgtgctttacctactcacttcgtagagaggctaatacaaataacatctacataacacacccattcaattgattaaaaaaatcccactctgtccgataatcccacacatttatcactaaatcgacgctccttctttccgctccatcgaaatcacagttactcttcaattgctagccacgtaggatcccataagatatgttcactttagtgcgttctgcacaccatggtaccatcatggcatggcctagcgaaactcccaacataactaaacctcacattacatccatgcaaccctgaacagactcttccaacaacaatcacgaacctaatccttttcctgcacaaactcacagtacctgtgccagtgaccgtgaggaggccactattgtctcagttaatcaccaaatgaggtcctcatttccatttgaagatatttttcctgcgatcctagctcgcattgaataagtttatataacttacttaatgacatctcactacacatcactctaagagtctatggctgtgcatatatcaaagatacttattccctaatccttctagttcatattctcgtaacaattatcatccacagtgacactagagtccatggcaggctctaatctctgggggtaataaccaatcacgtgattattcgcgatactggaatgtccaaatcggagtcattgcaagcaaagtgggggccggtttaacgccgtaaacgttggggactttattnactcctagttccgttgtggaacgtccaactacaacgatctagtaaattggaataaacacagggctcacggagaaggaactcaggaattcggcttcaaagaacaacccaagcggaaaggccaactatttcacaagaaccaacattcgccgtaaattaaccccaaatgcaccagttacatacccggggctggaatttacgctcccgaaggatctggtgacagtttccccttcacgaggctcattttacgaacggcctgggaaatcttgtcagtccccataaaacaatacttacacaagaggcataacgatggaagtgattgcaacagacctagaatctttttttgttatagtgaccacttattgcattaccataggcaggaacttcaacatttacgcacgagaagacacacgtatccataacaccccgtaacataaacgcataacaggggacgtgcactgttgccatatggacacatcggagcgacatgtgtccaaatagaatcgaacagaccccatacaattaaagggcgtacttgcaccacaccaccggataggacaaattcacgcagagtgacaagcggcatcaatatagaacagttgggtcaccacgaaaccacaccagaaggtacatcaaagagagcggctacacatacacacaggtacagaggaggactgagataagatgcgacaaagcaagagagaaagcgaacgcgaattaaagattacaagtccggagatgatcccacccacacacttaaagcaagagagaaaaatggagcccattacagataaatttacctcacgaccactagaatccctaaggcagaagttacgtctagatgttcaaatgaggtgtagcaacagtatttaaattagatagcaacaacgcaatagtatcactgtggccaatatggcgaaattgcgaccagagcaagaaaacaaagacaatacgcacagtaaatcatagagactagcagtaaacgaggtataagatacagtgcagaaggcgacataagtttttagagagcaaagaaataatagacgtagagagattggcagcaccgattatagacggtaaatacaatagagacacaccgcacagaagagtgaatatagcgcgaaccacacataaagaagagtaaaataaaagagcgacatgtaacacagtataaacacacgtgagaacgacgagatataa

SEQ ID NO: 696294 - DNA, 345 bp, Homo sapiens
  misc_feature (93)..(93): n is a, c, g, or t
  misc_feature (102)..(102): n is a, c, g, or t
tctttccccttcagtgtctcagaggaggggacggcagcaccatggacccccgcttgtccactgtccgccagacctgcagaaacccctccgtcncggttttanccaccgccctggccatctaccatgtgatcatgcccgtcttgttgttcatcgagcactcagtagaggtggcccatggcaaggcgtcctgcaagctctcccagatgggctacctcaggatcgctgacctgatctccagcttcctgctcatcaccatgctcttcatcatcagcctgagcctactgatcggcgttgtcacgaacccggagaagtacctgctgcccttcctgtccctgccaatcatgg

SEQ ID NO: 696295 - DNA, 360 bp, Homo sapiens
  misc_feature (17)..(17): n is a, c, g, or t
  misc_feature (32)..(32): n is a, c, g, or t
  misc_feature (43)..(43): n is a, c, g, or t
  misc_feature (54)..(55): n is a, c, g, or t
  misc_feature (64)..(64): n is a, c, g, or t
  misc_feature (66)..(66): n is a, c, g, or t
  misc_feature (81)..(81): n is a, c, g, or t
  misc_feature (84)..(84): n is a, c, g, or t
  misc_feature (97)..(97): n is a, c, g, or t
  misc_feature (101)..(101): n is a, c, g, or t
  misc_feature (132)..(132): n is a, c, g, or t
  misc_feature (135)..(135): n is a, c, g, or t
  misc_feature (138)..(139): n is a, c, g, or t
  misc_feature (142)..(142): n is a, c, g, or t
  misc_feature (151)..(151): n is a, c, g, or t
  misc_feature (153)..(153): n is a, c, g, or t
  misc_feature (159)..(159): n is a, c, g, or t
agtcgtccagcgcagtntgctcgtgctggtanagacttatcgnctaccgaccgnntgacgatancntatctgttggagccntgnctctctataatgntctntcatttccaatgtgtcgcctatcgctctggnacnggnntgnccgccagtntnacaganctcactgaccagtacaggcatggttatttcaacattaatagcatgtcaactggactcctatttgtaaatgttatcaatctaagcaatccagctcatcagtctactagtttgcttctttccgagagatgtcaagtcctcaagaatttgatggcttcttctgcagctataaccacaaggaacctacacattgtaactcaagtc

SEQ ID NO: 696296 - DNA, 131 bp, Homo sapiens
gcggccgcctactactactactactgctcgaattcaagcttctaacgatgtacggggacatggggggtggatgactccactttggttccctgtgttttgatttctcattaaagttcctttcctacaaaaaa

SEQ ID NO: 696297 - DNA, 298 bp, Homo sapiens
agacgaagcacttaaagcgtgcttgcagcaccgaagcattggatgcttgacaaactaacgggtgtatttgcacctcgtccatcgccaggtcccacaagctgagggtaatgtcttccactgatcgcttcctaggactagctcaagtatgcgttgactggagatgaggtaaagaagatatgtattcaacgtttcatcaaaattgatgcaaggtcgagttgatttcaatacctctgttcatggatgtcatcagcatcgagaggcaggtcacatttcgcatggatttaccaaggccggtttt

SEQ ID NO: 696298 - DNA, 704 bp, Homo sapiens
  misc_feature (47)..(47): n is a, c, g, or t
  misc_feature (54)..(54): n is a, c, g, or t
gcctatttcatgaggttgatttgaaggtagtatataggaaaacattntgaaaantgatgtattatatagatgtaagatcatggttttattttattttttaaaattaaaaaaaaatttttttccccaggttggtaacttgcccaagatcgtgcttttatgggcaaagatacttttccagttgattcctaaacacagaaaataagtatcacataggaacatggcatgctttgaattgaatttagggtggagataaatttttgcagaatttcagtcagtatgatggtattaataaatgaaaacattcactaataatacattgaaaaacattttaaactacaaaattaattatttgagggaatagcttcctagagggatatctcaggtttaaaaccatccaattaaaatattaaagcacactattgttattatttaagggatatttatttagtgtctgcatatttatgcacgtctggccttttaagcattttgaaaggaaggtatggtgctatggctcttctaaatattagctgaatctagtcagtagtaacttagtaaagttgaaaatatttagagtatattatttgactgttaactgtttggtttcagagaaatacactaacaaaaatgtcgaaaatgtacgacatgtctttgtgttgaacatatcataatccgtggggtttttgaatgacagaaaacccagagat

SEQ ID NO: 696299 - DNA, 615 bp, Homo sapiens
  misc_feature (30)..(30): n is a, c, g, or t
  misc_feature (36)..(36): n is a, c, g, or t
  misc_feature (57)..(57): n is a, c, g, or t
  misc_feature (91)..(91): n is a, c, g, or t
  misc_feature (116)..(116): n is a, c, g, or t
  misc_feature (123)..(123): n is a, c, g, or t
  misc_feature (247)..(247): n is a, c, g, or t
  misc_feature (323)..(323): n is a, c, g, or t
ccagctccagttaggtggggttggggcccnaagaanaaccttaaacggcccattaanccggtaagatttgaaaaagtcctcagaccattangaatggtcttgaaggctcagtcctngtgtganctgtactatcaggtgctggagccccatccagaggccctcttcttgtgggccgccagcaaagaaggttcctggagaggacgttggatggggagcctagatatgggccaagataaggcttggaagnagaaaggcttttccaagaccagaagtctgaaggtgacttttctccagggctttgcaaagacctgcagatccttgtnaatggttccctgttttcaccctcttgcaattttttatggaataaggactcaaatgggtcttctcttcagctttgtttgctctcatggtgtatgactgtgttttgtaaaaatatatataggcgcaacgatgctgcctttcaccacttctattcaacatggtattggaaattgtagccagagcagttagggaagaaaaagaaataaaaggcatctcaatgggaaaggaaggagtaaaattatctctgttccctgatgacatgactttacatgtagaaaaccttgaagataccac

SEQ ID NO: 696300 - DNA, 213 bp, Homo sapiens
  misc_feature (153)..(153): n is a, c, g, or t
aaaggctgccccgcctactgagacagtccacatgtattgttcctgcccaacttaactgagtgattaagcctgggaaggtccttctcctggctcagaagctcccccactgagcaccttgtgacccccgccccttgccaccatgagaacaacccncctttgactgtaattttccattaccttcccaaatcctataaaacgtgcccctctcccccg

SEQ ID NO: 696301 - DNA, 121 bp, Homo sapiens
tgcaggtttgcgggaactcgatctgccttgcgctaaatctgctggactacaatgggcgctcaagcttcatggctgtatcagatcgccgccgccgggatgcgtacgtgcagcctagccggcc

SEQ ID NO: 696302 - DNA, 731 bp, Homo sapiens
  misc_feature (421)..(421): n is a, c, g, or t
tggaagagggtggggaaaagatttcctcccaaaattcacagcttctattctccatccaaagagtgcacccgggagaaaaagccatacaatatgtgatggagtgtggggaagggctttcagctgtggtctccctcaactctcgtctgtgacccatctaggagaaagcccaccagcaagaagaaaacaccctctctcaaatgtgtgtgacgcagcatgtggagaagaccacttgtgtcacagaaattcaattcgtcctaaagggctgccagcaaaaaagcgctcccccgagcgtgttgaaaagacgccattaccaatatgtgttgcaggcccgggtgcggacaggggctacaaacgggggcgctgtgaaatctcgtgtgaatatgtgactctcaagagggggctccccctttgggggcagagnaaaaccaccttggacacgttgttacgggcacgggggtgacataagtgggtgccctttagactcgaggggccctcaaaagaccttttcggaactttttccactccgaggagagtggttccccgtgttgggcagaaaaaacacccttttagtgtgcactggtgcatgggggtcgccaatttaaagagtgtcttttcacctccaggtcctctcacgtgaaatgtgcaggtcctcacctcattatgagattttagccaaaacttttatattccttccaaaaaccggggggtctttctcgcctgggtgtcccctt

SEQ ID NO: 696303 - DNA, 111 bp, Homo sapiens
gggaaggcttcggaacagcaggaagcctgagacgaaggtcagccacatttgcatgccccaggcacctgacaagagcagtagatggaccatcttaatcaggcctcctaggtt

SEQ ID NO: 696304 - DNA, 770 bp, Homo sapiens
  misc_feature (638)..(638): n is a, c, g, or t
gggctgcttcggtgtgcaggagatgatggcggtctccagcaggagttaagagttcctcgtaaagttggcgcttgtcgtcaggaactttgataggaatgtgacagcacagagcgagatagtgcgacggctcacagattagcgtggggcccttggaagatgcactgaagatttgacacttacaacggtgtgacaggcatgcttgatgggccagcaaggacgacttatgagaacagaatatatagccctgaaatgtagaatgtggacctagattacccagaagctcctccgtcagggagatgtgtaccgaaagaattaagtatgaccggagataatgtaattccatgggggactggtgggtgcccgggagcataccagtgttagctgcactgggcaaaattcatactcgcataactcggtggtacttcaagagctaagcggtctacctgatgtccactgaagttagtgagggctttccagcagccaccacgaaggacaaaggatacaaacacttgatttttagtggctctcaaactgtgtcgtttaaattcagacaaccttctacgtcatgttaatgtctgtgatttcaagtatcaccagatgccagaattacacgtttaggtaaaatgaattccagcttntgaaacatgacctggaccatttgtcacgaatatatttactatatgttcacccattatgtgtccgggtaacagggggaaacctgcggcggaattctttctcttgaacggctgtcatttaacgtagctggggac

SEQ ID NO: 696305 - DNA, 664 bp, Homo sapiens
  misc_feature (531)..(532): n is a, c, g, or t
tgtggtggctcacctgaggtcgggagttcgagacaagcctgaccaacatggaaaaaacctatctctactaaaaatacaaaattagcagggcgtggtggcacatccctgtaatcccagctactcggtgggctgaggcaggagaattgcttgaacccgagaggcagaggtcgcagtaagtggagattgctccactgcactccagcctgggtgacaggtcgagactacgtctcaaaaaaacaaacaaaggctgggcgaggtggctcacacctgtaatcccagcactttggggggccaaggcaggtggatcacctgaggtcaggagctcaagaccagcctgaccaacatggagaaaccccatctctactaaaaatacaaaattagtcaggtgtggtggcacatgcctgtaatcccagctacttgggaggctgaggcaggagaatcccttgaacctaggaggcagatgttgcggtgaaccaagatcacatcattgcactccagcctgggcaacaagagcctgactcggtctcaaannaaaatagaaaaatacagtgattcaagggcctaggtgaaataaaactatctataactgagcagaatcccattcagattttagcccaaagaaaaaactatgttgaaaggacccattctttcatatggctctcgg

SEQ ID NO: 696306 - DNA, 185 bp, Homo sapiens
gtggattatggagttagcctaaagacaaataatctggcataaattaagagtaagagagaagagttaatagaatttcacttcacataacttaaaacatggctatttcaataaaggctaaaggttctcctggatccagaagttcactgtatttataaatgtataatgtatttgctactttttggctt

SEQ ID NO: 696307 - DNA, 457 bp, Homo sapiens
ccactgcgaggtgcagcagaagaagatgacctgcaagcaaacatgtggccactttccgccaaatgcagcttgagaacgtgtcggtggcgctcgagttcctgtgacctgtgagagcatcaaactggtgtccatcgacagcaaggccatctgtgtgacgtgaacctagaagctgatacctgggcctcatctgtgaccctagatcctgcactactaccatactccatgcccatagtgggacgaggatggaggatgagtgaggccaatgaagcagacccccaatgcagaggctcctgtggctggatccatgaacaagctgcctgcagctgcccatacaccaagcatcagcctgggactggcatgagcggcctgggccctggtgcgccctggttggacagctagtgccccgggcctagtgtcctgactagggactctatgggacgccaacattgcgcctggg

SEQ ID NO: 696308 - DNA, 482 bp, Homo sapiens
  misc_feature (33)..(33): n is a, c, g, or t
  misc_feature (85)..(85): n is a, c, g, or t
  misc_feature (92)..(92): n is a, c, g, or t
  misc_feature (115)..(115): n is a, c, g, or t
  misc_feature (151)..(151): n is a, c, g, or t
  misc_feature (210)..(210): n is a, c, g, or t
  misc_feature (220)..(220): n is a, c, g, or t
  misc_feature (226)..(226): n is a, c, g, or t
  misc_feature (231)..(231): n is a, c, g, or t
  misc_feature (253)..(253): n is a, c, g, or t
  misc_feature (324)..(324): n is a, c, g, or t
  misc_feature (334)..(334): n is a, c, g, or t
  misc_feature (337)..(337): n is a, c, g, or t
  misc_feature (345)..(345): n is a, c, g, or t
  misc_feature (350)..(350): n is a, c, g, or t
  misc_feature (359)..(359): n is a, c, g, or t
  misc_feature (363)..(363): n is a, c, g, or t
  misc_feature (382)..(382): n is a, c, g, or t
  misc_feature (384)..(384): n is a, c, g, or t
  misc_feature (402)..(402): n is a, c, g, or t
  misc_feature (405)..(405): n is a, c, g, or t
  misc_feature (414)..(414): n is a, c, g, or t
  misc_feature (476)..(476): n is a, c, g, or t
tctctgcctgcagagatacaaagaaagtaactntccccctcatgaaaagcaaccaggaaccccaccccagtaatgagggccaccnagggggngggagagccatcaagaagattcnccccagacggggggcaaagacaggaagaacccaggnaaacacacccacgggacactggcccccaccgccaccaccccccaccccaccccaacccnggccccaccnaacccnacganaaacaaaagaagggaaaaacanggagaaaatcaaagggaatgggaaggtgggggggggaacataaaagaagaaattgaaaacaatcaaaaggntctcagttcngcnttcccgcnctgtnatagaaatntctnatccaattcttcatatgtntnaattccaaggagcgggcnaanagcacaganataggatccaagggatttttggtgcggagatctaagtagtgggcccccccttatatggttanttcaac

SEQ ID NO: 696309 - DNA, 689 bp, Homo sapiens
  misc_feature (8)..(8): n is a, c, g, or t
  misc_feature (126)..(126): n is a, c, g, or t
  misc_feature (214)..(214): n is a, c, g, or t
  misc_feature (289)..(289): n is a, c, g, or t
  misc_feature (463)..(463): n is a, c, g, or t
  misc_feature (467)..(467): n is a, c, g, or t
  misc_feature (496)..(497): n is a, c, g, or t
  misc_feature (522)..(522): n is a, c, g, or t
  misc_feature (557)..(557): n is a, c, g, or t
  misc_feature (559)..(559): n is a, c, g, or t
  misc_feature (683)..(683): n is a, c, g, or t
tctgcggngacgcagtcccgtgctccatctcctccgaagggaatgaactcctcgtccagttcgtctcagatctcagtgtctaccgctgatggcttttcagcctcctacaagaccctgccgcggggnactgccaaagaagggcaagggcccggccccaaacggggaactgagcctaaagtcaagctgccctcccaagtcccaacctccggagaanacagaggaatctccttcagcccctgatgcacccacctgcccaaagcagtgccgccggacagcaccttgcagagcnacttctgtgccagcagccttgtggtgactgtcgacagtgtatagtccatggttcgggtagtctcaggtgagggccttgccgtttactgtcagttctttattggtgcttataataactgtgaggtactggacctgccttctccacccactggtgctctccctgaagttttacgtncctngcaagcagtgcccctctccatgaagaaannagtcatttttctgctgatgggccangtagaagagaacagaggccccgtctcttcctccananagctttttggtttctccaccggcccaatccaggaccagatctctctatccaacctaagcaagaggaagtgcccctctctatactctgtgcgggctgctgcgtccctatgtactgagtacgcagnccagcc

SEQ ID NO: 696310 - DNA, 978 bp, Homo sapiens
agcggagttgccgtttgctccgcaccaaatcgcctggaccgccgatgcgaactaaatgcatggcgctatctaaactggtgctgtttgcgtgcctcgctattcctcctcgcagttctgcattctgtcgggcggtgaaagtactggagatccctagcttatgtgatgaagtgtccgacaaaggtttgtgtagcacgcgcggccgtgtcaggactgtatagactagcatcagaccaacatatctccatggtaacctatgcggaagcctgtcactttcgattgtgcagtgaaaccatctgttacctgtgtggatcaagcacttcacatccgaaacaagaagcttcatcatgaacatgacttgcagatgtgctggcagcttcctgaaacagattacgagtgtaccaacatccaccgcagctgaaatgacggtgtcctgtcctcggcagtgctacccatgccaacttgcacggtgcgggaccacgtgcactgcttgggtaaccgtacttttcccaaaatgctatattgcaatggactggaggctataagtggtctacgtggtctggctctacagcatcaccctcggtgggttgtggagcagaccgtttctacctgggcagtggctgggaaggcctcggcaagctcttcaagcttcgcgtgggcctgggaattatggaccgccgattagaaggttcgtgctccttggggggtggctaggtaaggaccaggcagcatggacgcttggtacatttagctggggagatgtgctgtcgacaagtgaccaggcttaaaacaaaccgctggcccaccgacattgcagttgaggaaggtggatattctaggtatacgggggacccccgctcacttgtcgccgaacagcccaaataggacccacacgccacatcaatataactagcacatgtttccgcacagatagcacaacgaaaaatcgagagaaataacacctctatttaaaaacaatct

SEQ ID NO: 696311 - DNA, 159 bp, Homo sapiens
ctccatctaccctcactaaagggcgaagagtgtggtgaggaatgatgtgggtttcgcttgttcaaactgtcattttattttcacgctgttcgatatctatagtagcgtgactgaggtgcattcgattaggcgtagatagaagtagagattaagtaggcc

SEQ ID NO: 696312 - DNA, 282 bp, Homo sapiens
gttttttttttttcccccgggggggggggggggaaaggtggggggggccggtttttttccccccccccgttttggttttttccgggggggggggaaggggccgggggggggggggggtttttttcccccccccggggaggttttggccccggggcccccccttggcccccccggggcccggtcccccctttccctttttttttttttttttcctgggggcccccttttgggccccagaattgccccaaaaaaaacctaaaaatatatatataaatataagga

SEQ ID NO: 696313 - DNA, 217 bp, Homo sapiens
aaaaaaaaatttttagggggggggtaaagggggccccccggttaaccccccccggccttcccaggttccccggtttcaaaattaaaagggggggggggggggccccccttgggaaaattggggggggggcaaaggttgggggggcccccctaaacaagggggttggtttggtttttttttttgggggggtaataaaaaaaagggctttttttcccca

SEQ ID NO: 696314 - DNA, 838 bp, Homo sapiens
agtagcgctagggagaatccctgaaggtaatacttgacttttgcttcatattaatctagagatggaaaataccaagtggaccctcttctcctctcgcttccctgcctgggcacgtgcgtcccagtgtgtcggagagctcgtcgtgccgagctgggctgtcctgccggatgacgcgcgatcgcgtcagcggcgctgtgaccggctcctcgtcgcccggtgggcttgactctgggcccgcgagcttctcgaactatccgggcccttcagtacgccccaggcgttggcgcctcagcccgagctgcgcggctgaccgtagcttctccggcttgactgggctcgccggcttcaaggtgtccctgcatgacggctgctgctccagactccatggctgcggattcgttgactgcggtgcctggtactgtgctggcccccgcgtgggccgtgggcctgctggggtggccatggcctatgtgcgtcccgatggaatgccggcctagccgtgcctgcgtagccggtgccccaagtcgcccaactctattactcgagccgctcttggcgacgatacgggcgcattgtgcagcgtaccttgctgttcgagtaacccctcgtagagggcgaacgggggcgtcgctagatacacgtggatgacgatgacccagcaggacattactttaatgcccctaagggtagcaatgcatccctcacattgatggggggctgccattgacttgttgccgatggtgcttgagatgacctcttaagccatggcggattactggagtgtgacaaccttttgctcgttaatcgaacggtcagccagaagattaattaggacgga

SEQ ID NO: 696315 - DNA, 945 bp, Homo sapiens
  misc_feature (945)..(945): n is a, c, g, or t
atccatgtcttacctaattaagcaacatcatagtgccataactcaaggaagttgaatgaggtgaacatagatacagctctttccccttccccgcgttttgaaatgtagcaagatactttttatgttcccgcttccgccccattccctgtgccctttcccctttcgggaaacgtgtcaggaaccaaatagttacaagatgagcagttgagggcgactgagtagagtgatcgtacacagaacactggcttcttcgtgcttctatcataagtcgtgctgccggccaggttacttaagcacccttttaacaaggaaaccttgtgggagatccagctggcgactcagagttcagaaacaggaccacagaggtgacactctgggatcctggccactgaggttgcgatgtcctcaccttacctgaaaggagacactggacctaaatggctgcaccatgatttgttcctgatatggctaaatttctcaagacacagtcagataagtacatctactgccaccttcgaaaaacacagagagcacctacccagaggagaacgtagattaggagtaaagcagcgcgaaataattcctcagatggtattagtcacaatggtccctaacgaagtgaggagattcttggcaccagacctacctgtaccgcatgatctgtggactccggagtcaaggagcataagtgactcaggagaccaactggaagaaagcctccaagggctgaaggaaaacaagacaggaggcgacggacacacacatgaaagagaccaacccgcaaaggtgaagagaagcctgttgtggtctcgacgccgggcgcacatcaagaagaacaaagaacggagagacacacaggaagcagagaggagaccagcaacacgaacacgagcggcgcaccacaagagacgacgacacccgacacacccaaccaccccacacagn

SEQ ID NO: 696316 - DNA, 321 bp, Homo sapiens
  misc_feature (18)..(18): n is a, c, g, or t
  misc_feature (180)..(180): n is a, c, g, or t
  misc_feature (286)..(286): n is a, c, g, or t
tgtataaatatgttattngtgtatgttccaaaattatgtgaaactcctataattctaatataacttagtgtacattatcagtaataatcataattgttatattaaaattattgtgtgccacagaggtaaaaaatttccttgtcagttttgtcttttgactatggctgccttaaaactttnttcttccatgcacaattgttgttttggtcctcttttttaaatatatttgtattatttttgagatggggactcactctgttgcccaggctggagtgcagcggcaganacttgggctcactggcaactgccacctcccaggtt

SEQ ID NO: 696317 - DNA, 1548 bp, Homo sapiens
  misc_feature (136)..(136): n is a, c, g, or t
  misc_feature (165)..(165): n is a, c, g, or t
  misc_feature (171)..(171): n is a, c, g, or t
  misc_feature (184)..(184): n is a, c, g, or t
  misc_feature (210)..(211): n is a, c, g, or t
  misc_feature (214)..(214): n is a, c, g, or t
  misc_feature (251)..(251): n is a, c, g, or t
  misc_feature (258)..(258): n is a, c, g, or t
  misc_feature (264)..(264): n is a, c, g, or t
  misc_feature (271)..(271): n is a, c, g, or t
  misc_feature (274)..(275): n is a, c, g, or t
  misc_feature (280)..(280): n is a, c, g, or t
  misc_feature (283)..(283): n is a, c, g, or t
  misc_feature (289)..(289): n is a, c, g, or t
  misc_feature (293)..(293): n is a, c, g, or t
  misc_feature (298)..(299): n is a, c, g, or t
  misc_feature (304)..(305): n is a, c, g, or t
  misc_feature (325)..(325): n is a, c, g, or t
  misc_feature (329)..(329): n is a, c, g, or t
  misc_feature (335)..(335): n is a, c, g, or t
  misc_feature (344)..(344): n is a, c, g, or t
  misc_feature (359)..(359): n is a, c, g, or t
  misc_feature (499)..(499): n is a, c, g, or t
  misc_feature (519)..(519): n is a, c, g, or t
  misc_feature (547)..(547): n is a, c, g, or t
  misc_feature (549)..(549): n is a, c, g, or t
  misc_feature (553)..(553): n is a, c, g, or t
  misc_feature (1072)..(1072): n is a, c, g, or t
  misc_feature (1093)..(1093): n is a, c, g, or t
  misc_feature (1118)..(1118): n is a, c, g, or t
  misc_feature (1202)..(1202): n is a, c, g, or t
  misc_feature (1288)..(1288): n is a, c, g, or t
  misc_feature (1290)..(1290): n is a, c, g, or t
  misc_feature (1373)..(1373): n is a, c, g, or t
  misc_feature (1421)..(1421): n is a, c, g, or t
  misc_feature (1424)..(1424): n is a, c, g, or t
  misc_feature (1427)..(1427): n is a, c, g, or t
  misc_feature (1432)..(1433): n is a, c, g, or t
  misc_feature (1452)..(1452): n is a, c, g, or t
  misc_feature (1527)..(1527): n is a, c, g, or t
gcgcgggccgcgcgggcgggaagcgaagaggctgggcgggccagcgagtgagcgcggagagaacaaggctgctgagctggccaggagggctcagtgccgagacaccttgcagctgccgccgccgccaccgagccgncgctgtgctcactgatccgcctccagggncaccgncatgtcgagccgnggtgggaagaagaagtccaccaaganngtncaggtctgccaaagcaggagtcatctttcccgtgggngcggatncgtgcnggtactntcnnagaanggncacccncagngtacnnggatnnggagtgggggcacccgtgtncatngccgcngtcctggantacctgacagcgganattctggagctggctggcaatgcagcgagagacaacaagaagggacgggtcacaccccggcacatcctgctggctgtggccaatgatgaagagctgaatcagctgctaaaaggagtcaccatagccagtgggggtgtgtnacccaacatccacccgagtngctagcgaagaagcggggatccaaaggnanagtnggaagccatcatcacaccacccccagccaaaaaggccaagtctccatcccagaagaagcctgtatctaaaaaagcaggaggcaagacaaggggcccggaaatccaagaagaagcagggtgaagtcagtaaggcagcagcgccgacagcacaaccgagggcacacctgccgacggcttcacagtcctctccaccaagagcctcttccctgggcgagaagttgccagttgtacaggctgacattgcctcgatcgacagtgatgctgtcgttcacccgacaaacactgacttctacatcggtggtgaagtaggaaacacgctggagaagaaggtggcaaggagtttgtggaagctgtctggaactccggaaaaagaacgggcccttggaagtagctggagctgctgtcagcgcaggccatggctgctgccaagtttgtgatccactgtaatagtccagtttggggtgcagacaagtgtgaagaacttctggaaaagacagtgaaaaactgcttggccctggntgatgataagaagctgaaatncattgcatttccatccatcggcagnggcaggaacggttttccaaagcagacagcagctcagctgattctgaaggcatctccagttacttcgtgtctacaatgtcctctncatcaaaacggtgtactccgtgctttttgacagcgagatatagacatctatcgtgcaagaaatggccaagcagcacgccaactagncngagcaaccacagaaccagcagcaccatgtaccccaccatcagtttaaaagaaaaaaaaaaaccccttcactcccactgggagntgggacccctttcattaccagtcttgctcaactagggaaaaaaaggcnttngtntccannttaattgttttatgacctnctaaaatcgtttttatgttagcactgatagatggcatcactgttgttaacgcactgagtctccagaccgtgtctnacttagcgtaaccaaggagat

SEQ ID NO: 696318 - DNA, 240 bp, Homo sapiens
ctagaggatccccgtggtgtattataatccctgagacattggaaaattatagtgcaaatcaccctaaagtattttggtgtttaattaagaaaaaacctttttttggaggggggggggtctggctatgtggctcaggcggtactcgaactccggggctcaagcaatcttccggtctcagcttccagagtagctgggataaaagactggtcccacggcaccggccagcacaagaaccacagg

SEQ ID NO: 696319 - DNA, 158 bp, Homo sapiens
tgctgggattacaggcgtgagccactgtgcctggccctggtaacttttaatgttcctttgaaggtgtttcctagtatgaggatgggcagcttctgagtcgttgtgtgtctgcttacacacaaacggtttcacaaagctgaaacacttacaaaatggtt

SEQ ID NO: 696320 - DNA, 1536 bp, Homo sapiens
  misc_feature (136)..(136): n is a, c, g, or t
  misc_feature (165)..(165): n is a, c, g, or t
  misc_feature (171)..(171): n is a, c, g, or t
  misc_feature (184)..(184): n is a, c, g, or t
  misc_feature (210)..(211): n is a, c, g, or t
  misc_feature (214)..(214): n is a, c, g, or t
  misc_feature (251)..(251): n is a, c, g, or t
  misc_feature (258)..(258): n is a, c, g, or t
  misc_feature (264)..(264): n is a, c, g, or t
  misc_feature (271)..(271): n is a, c, g, or t
  misc_feature (274)..(275): n is a, c, g, or t
  misc_feature (280)..(280): n is a, c, g, or t
  misc_feature (283)..(283): n is a, c, g, or t
  misc_feature (289)..(289): n is a, c, g, or t
  misc_feature (293)..(293): n is a, c, g, or t
  misc_feature (298)..(299): n is a, c, g, or t
  misc_feature (304)..(305): n is a, c, g, or t
  misc_feature (325)..(325): n is a, c, g, or t
  misc_feature (329)..(329): n is a, c, g, or t
  misc_feature (335)..(335): n is a, c, g, or t
  misc_feature (344)..(344): n is a, c, g, or t
  misc_feature (359)..(359): n is a, c, g, or t
  misc_feature (499)..(499): n is a, c, g, or t
  misc_feature (519)..(519): n is a, c, g, or t
  misc_feature (547)..(547): n is a, c, g, or t
  misc_feature (549)..(549): n is a, c, g, or t
  misc_feature (553)..(553): n is a, c, g, or t
  misc_feature (1060)..(1060): n is a, c, g, or t
  misc_feature (1081)..(1081): n is a, c, g, or t
  misc_feature (1106)..(1106): n is a, c, g, or t
  misc_feature (1190)..(1190): n is a, c, g, or t
  misc_feature (1276)..(1276): n is a, c, g, or t
  misc_feature (1278)..(1278): n is a, c, g, or t
  misc_feature (1361)..(1361): n is a, c, g, or t
  misc_feature (1409)..(1409): n is a, c, g, or t
  misc_feature (1412)..(1412): n is a, c, g, or t
  misc_feature (1415)..(1415): n is a, c, g, or t
  misc_feature (1420)..(1421): n is a, c, g, or t
  misc_feature (1440)..(1440): n is a, c, g, or t
  misc_feature (1515)..(1515): n is a, c, g, or t
gcgcgggccgcgcgggcgggaagcgaagaggctgggcgggccagcgagtgagcgcggagagaacaaggctgctgagctggccaggagggctcagtgccgagacaccttgcagctgccgccgccgccaccgagccgncgctgtgctcactgatccgcctccagggncaccgncatgtcgagccgnggtgggaagaagaagtccaccaaganngtncaggtctgccaaagcaggagtcatctttcccgtgggngcggatncgtgcnggtactntcnnagaanggncacccncagngtacnnggatnnggagtgggggcacccgtgtncatngccgcngtcctggantacctgacagcgganattctggagctggctggcaatgcagcgagagacaacaagaagggacgggtcacaccccggcacatcctgctggctgtggccaatgatgaagagctgaatcagctgctaaaaggagtcaccatagccagtgggggtgtgtnacccaacatccacccgagtngctagcgaagaagcggggatccaaaggnanagtnggaagccatcatcacaccacccccagccaaaaaggccaagtctccatcccagaagaagcctgtatctaaaaaagcaggaggcaagacaaggggcccggaaatccaagaagaagcagggtgaagtcagtaaggcagcagcgccgacagcacaaccgagggcacacctgccgacggcttcacagtcctctccaccaagagctctccttggcagaactgaacttattccagtgaacagtattagcggctttgaggtgaggcataatcaatctaccaatgctgacattgacttaagatgactaggaaacctggagaagaaggtggcaaggagtttgtggaagctgtctggaactccggaaaaagaacgggcccttggaagtagctggagctgctgtcagcgcaggccatggctgctgccaagtttgtgatccactgtaatagtccagtttggggtgcagacaagtgtgaagaacttctggaaaagacagtgaaaaactgcttggccctggntgatgataagaagctgaaatncattgcatttccatccatcggcagnggcaggaacggttttccaaagcagacagcagctcagctgattctgaaggcatctccagttacttcgtgtctacaatgtcctctncatcaaaacggtgtactccgtgctttttgacagcgagatatagacatctatcgtgcaagaaatggccaagcagcacgccaactagncngagcaaccacagaaccagcagcaccatgtaccccaccatcagtttaaaagaaaaaaaaaaaccccttcactcccactgggagntgggacccctttcattaccagtcttgctcaactagggaaaaaaaggcnttngtntccannttaattgttttatgacctnctaaaatcgtttttatgttagcactgatagatggcatcactgttgttaacgcactgagtctccagaccgtgtctnacttagcgtaaccaaggagat

SEQ ID NO: 696321 - DNA, 364 bp, Homo sapiens
tgagacgcattcactcgtcttttagctaccataggcaggctttcaatgtatcctgttggtgtttctaccagtccatcaagtctttcttgaaggaccgcaagagtctgaggatttggcttcatgtgaacagtgatctcacgtgctttcagttgtgtttcttcaccagtttcctcttgttctacttcttcaccttcatccaaatcttgatcaggttcagcctgttccttgtgtgtcaatgtctgccatgttgtaagaactccaaatatcggcgattagtatgggtatccaggcgaccggagctgcgcagtcagtgactcagggcgtcagcgacagcaacagcggcagtagcaggaggcggcgtcgt

SEQ ID NO: 696322 - DNA, 167 bp, Homo sapiens
atggacactcggaagactacgaacagcacggaacactgatgaccatacttcgtcttcacctcggagcctgaattccaagtaaaagccattggctatctaccaggccaactggctgctcaatagaagcagtggtaacacgaagaactcgtcccctttacttcaaaact

SEQ ID NO: 696323 - DNA, 114 bp, Homo sapiens
taagatcataatatgagctgcctctacaaccgatgtttcattttttacatcccttaaactgttttacggcaccttttctatgtttagatacacaaacactttaacgctattatt

SEQ ID NO: 696324 - DNA, 655 bp, Homo sapiens
ggtctggtctgtatttcgatgtccggataccgatggacaaagccaggactacctgaacgcagagtagcacagtaccatgacagctgagaatcggactcagatatcgtgagcgttgctgcttcttgcccagcttcgagtgctgacctcgatgctaccactctacaacttttgattcgtgagcgtgtcgctctaaactgacgcttgccatgattagctcaatggactattattcatcccagtggctctattgagggaacgataggtggcgtcgttatcgtattcgggtttaatgggtatatctctgtataatactgcagcccagcatgatctcacaaagtttgagaatcgcttacttgtcctctatgtcgatcagcacaagcacaccatcgcctatgttcgggcacatatcagcggctgaatggaaagagtctcagagatcaagtgcaggattgcgcaagctggcaatgatatttgtctcggcatttcttggcttggattatgaggcttacaactcctgtgagattcacgtccatataccatttcagtcttgtgtcactatgtgtctattaaattgagttccactttgtataaagggttactctcatactccttatgtacagaaatcacatgaacaaataaaggttccataatgcgt

SEQ ID NO: 696325 - DNA, 359 bp, Homo sapiens
aaggatctattgcctccctcgtttacttttaccgcctggtgaatttgcagtccattagaaaatgtggatgttgtgggccgggtgcggtggctcacgcctttaatcccagcactttgggaggccgaggcaggcggatcacaaggtcaggagattgagaccatcctggctaacacggtgaaaccctgtctctactaaaaatccaaaaggatttggccgggcatggtggcggacgcctgcggttccagctactcgggaggctgaggcaggaggatggtgtgagcccgggaggcggagctggcagtgagcggagatcatgccactgcactccagcctgggcgacagagactccgtctcaaaaa

SEQ ID NO: 696326 - DNA, 171 bp, Homo sapiens
ccatatctataatggattgctacgacatgttcatcccaatatacatgtgccagtgtcactgctacactaattgaattactataaatgtataaatgttttcctatatgttcgtggtacatttattatttgcaacgttctcccaaggatctgcaggaacacatatgtcaaggc

SEQ ID NO: 696327 - DNA, 341 bp, Homo sapiens
  misc_feature (196)..(196): n is a, c, g, or t
  misc_feature (201)..(201): n is a, c, g, or t
  misc_feature (266)..(266): n is a, c, g, or t
  misc_feature (280)..(280): n is a, c, g, or t
  misc_feature (295)..(295): n is a, c, g, or t
  misc_feature (319)..(319): n is a, c, g, or t
ggagggcaagaaacccccaccccttctccgtgtctctactcttttctctggacttgcctccttcactatgggcaagcttccaccttccattcctccttcttctcccttagcctatattcttaagaacttaaaacctcttcaactctcacctgacctaaaatctgagcatcttattttcttctgcaatgcgcttgancccangtacaaactcgacaggtaagttccaaaatagcccgggaaaatggcacttttgaaattttttccantccctaacaaaggnttctaaaattaaatncctttgtcattaaaattgggggcnaaatggggtcttgaagggtggc

SEQ ID NO: 696328 - DNA, 993 bp, Homo sapiens
  misc_feature (820)..(820): n is a, c, g, or t
gtgcaagctcagcttgtgagggtgatcactcgttacaccccccaagtgcatatgggtctgtcacagcctatactaatctttgatgctgagcgggatgcttcgaacatgaaacagccatcgaagaccaaaggtgtggatgaggtcaccagtgtcaacagttctggaccaaccgacagcgaatgcacagagacaggatatgccttcgccgtaccagagaaggaccaaaaaggaacttgcatcagcactgaagtcagccttatctggccacctggagacggtgattttgggcctatgaagacacctgctcagtatgacgcttctgagctaaagagctttccatgaacggggctgggaaccgacgaggactctctcgatgagatcatcgtgcgtccagaaccataccaggagctgcaggaaattagacgagagtctacaaggaaatgtacaagactgatctggagagaggacattatttcggacacatctggtgacttgcgaaggtgatggttgcgctggcaaagggtagaagagcagaggagggtctgtcattgagtatgaagtgattgatcaagatgctcgggatctctatgagctggagtgaagaggaaaggaactgatgttcccaagtggatcaggatcgatgaccgagcggaggtgggcactggcagaaagtatatgctgaggtacaagagttatagccctgatgacatgtgcgaagctcaggcaagaggttagggggacctggaaaaggttcctgaacctggtgcagtgcttcagacagccggtattatgctgtcgggtgttgaactcctgatggcangggagcgagaaaggctgatcgagaggtccgcggaatggcagtggatccggcgatcaaaaaacggagccgcaataccaagactggggtccaaacgggccggggggaaacccggaaacaaggggcgcccagaaaggaacagccgggggggcccaaggcgctctgcacagaacacg

SEQ ID NO: 696329 - DNA, 288 bp, Homo sapiens
tggtgtattgaattcatcgctattcatcggcaccccccctaccctaggctaggctgtgagggaggtcagtgcgacttcctgggttctctccttggctccactcacgcacttagcagtttcagtcctggacttcccctggagatgcactaaacctgttgcttgcggtgccgatgaagcgaggtgccgatgaatagcgaggtgccgatgaatagcgaggtgccgatcaatagcgaggtgccgataaatagcgaggtgccgataaatagcgagatagccgatgaataggga

SEQ ID NO: 696330 - DNA, 1010 bp, Homo sapiens
gtggctcactgaagtgttgaccctgggctcaagctatccttccacctcagcctcccacgtagctgggactgcaggtgcatgccaccatgcccaactaatttttaaattttttgtagacacaaggtcttgctgtgttgcccaaggtggtcttgaattcctgggctggagatcctcccaccttggcctcccaaagtgctgggattacaagcatgagccaccgtgctggccctggaatcttttttttttttttcaagaaccaggtcttaacttgggttgcccaggctggaagcgcagtgggcacaatctgggctcactacagcctcgaacctcccgggctcaggtgattctcccacatcaagcctcccgagttagctgggactatagggtgtgcaccatcacgcccgtgcataatttggaatttataagtagagaaggggtttggccagttggcccaggcgtggtctcgaactcctgagctcaagtgataccatccacctccgcctcccaaagtgctgggatcaccggtgtgagccaccatgccgtggcccacggggaattcttggatcataaggatattggggccttgaaccgggattggggcagagacttagaaactagtggcaatcacaatgggactggcagtaggtatactcaggtgatggcagtgatacagttggcggcccagccaggattttctaaatcttgggactggggccctccatccactttgccaaactgtcgggacacattgtctttggcgcaaaccaaaaccgttttaaaaaaaaacccaacctcctctctgtggtcacccggcgtgtgcctgcacgggacaggaaattgccgaagaacgttttaacaagttcaccctataattccggtggccccatggtcttagtggtcacaagaggaggaggtccaacaagtattttgattaacccgtagtgatgtgggttccctagaaacagcagcagggggatagaactcagaggcaattacgcctttcaacgaag

SEQ ID NO: 696331 - DNA, 683 bp, Homo sapiens
taaattaacaaaaggtaggctccggttataaaagtcacacacaacggactatctcagtgtgactcaagaccacaaaaaacccatttctccttacattctgagtccgggggttaatacctagaaccagcaagtgtactgctgggggtccattcacaggtttacaagttttccattgagtgcaatctggtgactggttgtgaggtgggccaggtaggtcaccatcaaagaggtcatggatgtggctgtttgagcagtggtctcaacaggtcatcgggaacacctatttccggtcactggtggttaaccgaggctcatcaggaaagcggcccacagtatgtgtcagctgaacacctttccagaacagtcacatcctctgccaattaatggcaacccctgtccctcgagggcatccgggatgcaagctgatgcccctcctattggctggcaagtccattgtgagaaagtccattcactctgtgggggctaaagcaggtcttcatgatcgaggtcacactccgatgcgtccagcgtccgtaaaacgcgtatcccacggtccaaaggcgtgaacatcactcccatggtccctccacaggactcccataaaagtgtgccgtaggttgcgatcgctcatgcggcggtcggggaactggtgtccccggggacgggtgaatgaggtagggggc

SEQ ID NO: 696332 - DNA, 182 bp, Homo sapiens
  misc_feature (44)..(45): n is a, c, g, or t
gtcgagggacgcactctacttcagctggacaacacatgtgaganncctgtttcaaagaaaaaaaaaaaaaaaggtagaccctgaagattgaactgtggattggttggaaatttggtggttcctcttttttaggtttattctttctttctttttttttttcaaccgggccccttatttaaaag

SEQ ID NO: 696333 - DNA, 391 bp, Homo sapiens
  misc_feature (192)..(192): n is a, c, g, or t
aaaggtggccccccttttttgacctcctcctccttcaaggtcaaacaccacctcccttattcaggaccggcactttttaatgtttgtggctttttttccagccttttttaggaggggtaatggtggagttggcattttggaactctcctttttccttttttcccctttttttgcccgcctttcccatccggntggagactttttgattgtcagtttgtgttcccatccagggattgttttggtttttgttccctttttgactgcccaaggggtttagaaccccagcaatcccttcctttcactacctttttttttgggggtagttggaagggactgaaattgtggggggaaggtaggaggcccatcaataaagagggaaccccccaggtga

SEQ ID NO: 696334 - DNA, 197 bp, Homo sapiens
aattgcccagttgaaatagcacaaagagatccgtggagacttgtgaaaggaacaattttgatactgtgaggatgaaaactcggatcaaagagcaaaaaaggaagtggagacattacctataggtgacttggagagttccacgtgtacagggagacgctgagcaaatggcagtgggactctgacaggagacaagtagg

SEQ ID NO: 696335 - DNA, 315 bp, Homo sapiens
  misc_feature (6)..(6): n is a, c, g, or t
acaccntttaaaatatttaagttctcggccgggtgcctggatcacgcctgtaatcccaacactttgggaggccgaggtgggcagctcacgaggtcaggagaccgagaccatcctggctaacgcggtgaaaccccatctctactaaaaatacaaaaaattagccaggcgtggtgatgggtgcctgtggtcccggctactcgggaggctgaggcgggaaaattgcatgggacccgggaggcagagtttgcagttgagcttgagattcgcaccactgcactccagcctgggggtgacggagcgggggtcctttcttca

SEQ ID NO: 696336 - DNA, 177 bp, Homo sapiens
ggaagacacaaatgcagtcaagctctttcaggaatcttacatgtgacggcagcacagttagctcacacctgcaatcccagcacgttagggaggccaagatgggtggatcacttagcggtcaggtgttcaacgaccagcctggccaacatggtgaaaccccgtctctactaaaaatac

SEQ ID NO: 696337 - DNA, 145 bp, Homo sapiens
gccaatccagtggctctcctccgcggtcgctcaataggccgaacaaccaaacagaaaagtttaataaacagcggacggaggggcccgccggtggcggacgaggcaaagcaggggtttcggcggcattacctgtacccattaaccg

SEQ ID NO: 696338 - DNA, 937 bp, Homo sapiens
gtcagcatagtcagccttgtctagtgtacattcaaaaagaacaaagatcttttatatggatatcttataaatatataatcattgctaagtaagaagttaagttgttgctatcgcaacaatcctggcagcacacattgagtaatattcttgatgatttattttgttcgtaattagttattataagaagatctagatcctagatattcagccaataaaatttattctctacgtgtatccatttcaaatgttaaaatattgttctaatacttctttcgataatccctgcagttatcgaggccttgttataaataagctgcataatcaatacatagaacaagggactttttgttgataagtccacatactcaaagttgtacgtaatgaaacatctatatccgtgtgtgcaaactcttgagggttgcattatgctgcaattcacgccatcgtctggaaccgtctacgggaacgacccggttcgaccctctttatgcatcttcttgtactttagtcagacaagagagaaacctgtataccctagtacacgatcttattttgaactaaaaacgtctatacaacttacacaccgagtttggtgaaggctaatacaatgacagaactgagcataattgcttgctactgtggcacagagttaggcattccataccccttcaaagatgtcgctttgctttcttgtggacagcttgtagttagccaggatttattcagctggaaaagatacgccatcctttcaaaccctcatgattgactaaaaacttccatggggccaaatctgcctgaagatcattaccaaaaatagccggtaatgtctaccattaagggtggaaatcatggatcagatattccttacattttcacaacttaatgcatgtttaaacactttacctataagacgagagcaagactaaactagacctta

SEQ ID NO: 696339 - DNA, 410 bp, Homo sapiens
aactccgcttctatgtacaatctgaagaatcactcctcaggaacacttcaatcctgcttctatgcaaggtattaggtcgtcattgtatggattatacctcaaaatgacacttcacaaatacctgtagaggagtaatggtatctctataacttggtaagatatcaagggtgacacttccactaatatatttacagtaattcttgtaattcctttggattatatccaacctcatggccattgacttcttataattatatctcccacatgaagtagaccttgtcgatctatcattcccccatggaggattcgggcaattaccagatcattattttcaaccctaaatgtcacacccagtggtaccccagctcttttgtgaataccaagaatacgaatggcatctactggtcata

SEQ ID NO: 696340 - DNA, 325 bp, Homo sapiens
gggtttataaagggagctaagctctctttagtcattcaccaagcatatgtattcagcagctgccctgtcccaggtactcctttggcatgaacaaaacctcccatccccatcctattggagcttgcatttttagaggggaggaggcagacatataaaataagtacagggctgggcaacatacaaaaaatttaaaaattagctgagtgggccgggcacggtggctcacacctgtaatcacagcactttgggaggccgatgtgggcagatcatgaggttaagagatcgagaccatcctggctaacacggtgaaaccctgacttactaa

SEQ ID NO: 696341 - DNA, 328 bp, Homo sapiens
aaaaaaaaaaaaaaaaaaaaaaaaaatgggtttttttaaaaaaccaaacaaaattttttcccggtttgggggcaaccctggttggattttcaaaaaaccccctggtcctggaaaaaaattttttttaaaaaaaaaacctcggagggggggataaaaaggggagagccccggttttttgccggcccaagggcgtttaaaaagggggggccttttgttggaaatggtcccccccggggcagggggggttttattttggggaaacaaaccctgttggaggctttttttagggccctgcttgtgggaaaagcggccccggggaataaggggg

SEQ ID NO: 696342 - DNA, 104 bp, Homo sapiens
acagaaatggagaacactctggcccagaaagggtaaaaacacagaactctgagccaagttgcacttcattcttccatgattcgccatgtcacatttagattaaa

SEQ ID NO: 696343 - DNA, 1217 bp, Homo sapiens
gctgttcatcgtgtctgccggcgacgctctcagcttgtgcatatggggtcttgcctttcgctccacctggccgtgactgacttgtgtttgattatacgacctgcacgaggatgttgtttctggccatagcgtacatttgttgcataacgtttttgcctctcttgttcgaactcctcgggatgactcccagattggtttggcttgaagtacaatggtatttgttggacaatatctggttcttaaaactccctgtgctcttctcggaggggcggacacgagtatgataagaaaccacgtgggtgggtttctctgtcgggtggttgttcgcccgccccccgtgccaatggtgttccacctggggtgaggcccctcgcagaatttgttgggagcggttttttttgtagagaaaaatagcatccctatgggggacaccctttgttttcttgttgccggagttattccgcgcccctcccctcgatcccctgcagttctgactacttcccttcttgttctcaagcctcccccccccgacttttgaggccacaggttggcccagaatttagccaaacccaaacacgagtgtctgaagttaaaccccaatttccaggtaaaaccaaagataatgtttctagccttaaatatgcccccccgcccaataatttggaaccaccctaatgtgaaaaatgagtttgtttttctgaaaattcaccgctttctctctgagtcccgtaaactggtccccgaaggggattgagccgaaaactcgcggtaatgaagcccctgaaggttgaactcgccgcgtatttttttctgtcctcgggaaccacgccctgaacccaccctcgccccgttctcccactgtagcccacctgaaggggaagggggaagaacaccacgagacccaccaccacgcccggggcgtccccctggcgactgtggcccggcccctcctcttcttgcctgaactctccttcttcttgcctgagactttaagaccacctataacttagttccacggttcggtgccctgttggtgctcctgtttcccactagcttaggtcccactggtgggggaggacctcccggggctatgcacgccccccccacgctgccctcgaatcccctccacggcccacttcccgagtttttaactgatttttttcatgatattgtccaaaccgtgaggaaaccattataaaaaaagccccttaagccca

SEQ ID NO: 696344 - DNA, 199 bp, Homo sapiens
  misc_feature (173)..(173): n is a, c, g, or t
  misc_feature (176)..(177): n is a, c, g, or t
  misc_feature (179)..(179): n is a, c, g, or t
ataccacctctatcccctctgataccactagctataccaccaactaagaacggccatgcaccaccacccctgataccaccctataccacacgtgaattctcatggaggtagtgcttttcttatactgtaaaatggtgaaggtggggagttttaagtgtggtatgagtggtatngtnngngtatagcaagatcctgtaga

SEQ ID NO: 696345 - DNA, 204 bp, Homo sapiens
  misc_feature (178)..(178): n is a, c, g, or t
  misc_feature (181)..(182): n is a, c, g, or t
  misc_feature (184)..(184): n is a, c, g, or t
acaactatacactcacgtagctttctatactgtaatagatgggtactggtcagtgagtttaaaagtgtggtatagctataccaccctataccacacgtgaattctcatggaggtagtgcttttcttatactgtaaaatggtgaaggtggggagttttaagtgtggtatgagtggtatngtnngngtatagcaagatcctgtaga

SEQ ID NO: 696346 - DNA, 420 bp, Homo sapiens
  misc_feature (100)..(100): n is a, c, g, or t
  misc_feature (164)..(165): n is a, c, g, or t
gcaacagagtgataccctgtctcaaaaaaaaaaaggacttttttgggacttgatgtggccccaggcggcaaccagtgggacccacaaggcaaacaggganattctctaaagggacagacgcaagagaaccctttccttccttccagaactttcatagtctcccnntttagagcccggcttgcttgacagagaaccttgagcaaaggaggccattccggattcacagcaggatttacaaggttccccaaaggccaggaattcctggtgtcacaaagcaaaattgagagaggtgcgcttggacgctgaaaaattaatagcttagtaaactggcacagggaacattcacagtcttggtttggtttttagaagaaggagtctctgtcgcccaggctggagtgcaatggcgtgatctcctgctca

SEQ ID NO: 696347 - DNA, 365 bp, Homo sapiens
aatattataaattgggtcacagaggtcacccagaattactttaatgttagtgaagtctgtagaggagggacgagtgtatgtatgtgcgtaattttttagggagtagaagcttactgatggaattctttttagttgttatcagcttcctagggttgaatgattttactcttaatgatttggcttccgtgcctttcttaaactaataaataatagttgcatcaaaattctttcttcctcctaggcttttgtcagttatgttctcttttttcctcccactttttccaggtgtttattgttttacagcagtacttttaaaagtcaaaaggggagattttggtcagttgttttaaaatttcaattgagaa

SEQ ID NO: 696348 - DNA, 90 bp, Homo sapiens
atttcccggggggttttttttcccattttttaatgtggttttaaaaagtgaaaaattaggctatgggtttttttaaaaaatggggcctta

SEQ ID NO: 696349 - DNA, 1282 bp, Homo sapiens
  misc_feature (1)..(1): n is a, c, g, or t
  misc_feature (543)..(543): n is a, c, g, or t
  misc_feature (642)..(642): n is a, c, g, or t
nagtcgtgggatgtgttatctctcacccaccccatctggtgtgaagtgcccctgggggaggatattctttcgggccccccctttctgggggggtacgctccccccacgaaggggatggggccctcctagggagaaacctttgtgtccggcccgttgttgagtaaaccactgtcgttggcccgccacacacctcatagcgaaaccccatggtgggggtgatttttttatcgaaccctgtttcgtcccgtcgtcgtgtagtaacctccttgtgcttagggccctcccttgtccccgcggagggtggtaaagaaaaatttgtctgtttccgtatgcaacaacccccccacggggggggttgtctcccctggtaaggggaacaactatcaagtggtggccccacccgcggaggggcccaccaatggtggaccctctctctcgtcgcgtgtgaaagatgctctctcgtgtgcaaagacatattctcggcgttgttatcttctcccccggcgggcttgtgattgtgccccaccaaacgggtagggctgntttctctgtcgcgatattgtgtggtgaggggcccacaactggtttttggggaggagccctcccctctctcacacacgagctgtgggagcgagagaggcnccctccacactgtgtatattatggccccgcatattgggggaagggttgtgtagaagtaagcgatctgtggtctgttcttgtgttctggtgcacctccacgcgcttcctataccacgggtcaagaaaacactcgggggcccgagtcttttcgcccctgggagagcctctggggggaagagaacaatcggagtgctcaaggatggacggccgcgtcacactcggcttttcgttttttgcgcttcggacatgcacttttgcacacacagctctttgagggcccacactcaccttgcacaccccacactgcccacggcccacggaacttccacgaatgcccctggcacacctcttatggggaccacacactgggagactcacttatggaaagaatggggtgagaggagacactgaggtaagaccctctgtattttgtgaattactctgtgttctatgtttgctgctgttataatttgctggaaaatgggggagccaatccccctgtgttcaccccggtgtcctctgtgcaccgttcccctcaattcaatgtggcctgtaacttaaccttttccaacaaaacaatccggcattacaagaatggattattccctaataaattaataaaaaggtattttttttacta

SEQ ID NO: 696350 - DNA, 173 bp, Homo sapiens
ggcctgcgggaagccaagatggcgcataggggttctccaggctgcaagttggcgccttatcagtatctaagcggagtgtttttgggaaggagttaaggggcctgttgcaaaccgcccttccgccgtcatggcccgccatcggaattgttcgagcctattacctaccattgagg

SEQ ID NO: 696351 - DNA, 866 bp, Homo sapiens
ttttttaaccccccagggggttattggggagtgagattataggccataaagaatgggattggttgggaccaaaataattgggaaaatcgtggttggaaaagaagctttggggaagtgatgagtcatttggcaccggggtaataggggaaagtggtgtgacctccagcaaacacatgaagggttgatttccgggagccggaagcactggggggtcgtggtaatccccagtgtttcggtgtcctagtttgaccctttctagacacggtcctttttggaaagtttcgggaatatatccactttctatggaaagccttgaaactaagaagattgtagactcttatcgtcatctgaagttcttcaggctattcttaacctcccaaagagcagtatctaagtcacatacatgatgtctggggcatttcctggagccatggagaacttctgaagggaagaatcggctgtttctcaagcaaatgggttcttgaggtcttggggttctcctgtgctgtcctgatgtttggaccccttttattgatcagagtgctctagaataatgatggtctggctgcatggatcacatagggacgggcaggtaaggggagccttctacacctggaggggatttccccccaagtcctgtccaggaatgccaacaacgggtgggcctcagaggggcagacagggtgttggggaggatttaaaggcctaaaataaggaggggaagacattacacggcggttctggacaaagcaacaggcgggtatagaggaggcaggtggagttggacagttgggggcctcaacaaatcgcacaggggagtggggcatacacaggcaatggtgaggagataaaagggtacacatata

SEQ ID NO: 696352 - DNA, 480 bp, Homo sapiens
gcatggggtctgtaccgtgagcgcgaggacaggcggcggcgagcgctctaagatgatcgacaagaacctgcggaggacggagagaaggcggcgtggacggtgaaagttgctgctgttgggcgctggggagtcaggaaagagcaccatcgtcaagcagatgaagatcatccacgaggatggctactccgaggagggatgccggcagtaccgggcggttgtctacagcaacaccatccagtccatcatggccattgtcaaagccatgggcaacctgcagatcgactttgccgacccctccagagcggacgacgccaggcagctatttgcactgtcctgcaccgccgaggagcaaggcgtgctccctgatgacctgtccggcgtcatccggaggctctgggctgaccatggtgtgcaggcctgctttggccgctcaagggaataccagctcaacgactcagctgcctactacctgaacgacct

SEQ ID NO: 696353 - DNA, 604 bp, Homo sapiens
cgggcgattctttctccgctcttggcgccatttactacaatgctgtcttgacctgttatccttccagtggagactccagttcggccgatgccgcgtttgtcttgctgctccggtgagagttgtctatggcatcggccgtggtccgagtggcactcaagggcccgtctaccagagtacatccagcgcgtaagtgattacttgccaaggagggactttcctctggtaatttcctgataatgaccagagaaagcttgctttgatcaaaaagaagcaacaagttgcctggtccggttacgctcgatgatctacgtgcgagtcatacagaaagatcgaggaatgccaaccattgacctagtatcggacttgtgtccaccaaggctaaagtctggacctcttgaagtctgcacttccagacttccaatagagaagtcatgttacaagtggaatttgactgtctaccttgggtccattccttctcgtctcataatcatttatctgtgtcctcaaagaagttgtctacattacccatcgcctcttattgcctctgagaaagagtatataagcttctgtacccaattcggcgttgggtaatagtgttcgggtg

SEQ ID NO: 696354 - DNA, 364 bp, Homo sapiens
  misc_feature (22)..(22): n is a, c, g, or t
  misc_feature (40)..(40): n is a, c, g, or t
  misc_feature (55)..(55): n is a, c, g, or t
  misc_feature (260)..(260): n is a, c, g, or t
  misc_feature (326)..(326): n is a, c, g, or t
  misc_feature (354)..(354): n is a, c, g, or t
gtttaattggctgatggttctncaggctacacaggaagcntggtgctggcatctnctcagcttctggggaggcctcgggaaactttaaatcacagcagaaagtgaagggggagctggcacttcacatggccggagcaagaggaagagagagagggggcaggtgccccacacctttaaacaaccagatctcatgatgacttaactcactcactgactatcatgagaacagtactaaagggggtaatgccattatgatcgantcacctctcaccaggccccacattcaacatttgggattacaatccagcatgaaatttgagcggggncacagatccaaaccaaatcactcccttnttcctagttt

SEQ ID NO: 696355 - DNA, 593 bp, Homo sapiens
ccccccttttctccccaataagggcccatcctcgttacagattcaaaaggtaggggacctctccccgccgttaaaaatttatcttaaaagctgtgtgtggcacaaacaattttaaacgccgattcttttaaaaacgaggtgataccccaaggcggcggttcaaaagccccgtttaatccccagcccaccggagaaaattattgctcctctcacttccaacgccgtttgttatcacgcctctatcttcacctccctgccgctaaattgccaacaccattcattttgcgagagtcgtgcagggagtagcgtacccctcttgtagggcagaataaaaactctttagaaattgcgggaaagcttcggaagaccccaactttccgcgagacggcgccactaaaccaatattagtaacataatatcgtgggtaaatctataagatgttaaaacctcactctttatggaggctaataatgcagatataatttgtaaccccccaacagattagggcggccccaaggcaaaatagcccccgttttgggcaccccccagagtcgaaggcccaaagccacaattaaaaaaacaattacaaaaca

SEQ ID NO: 696356 - DNA, 401 bp, Homo sapiens
ggcaagtaacatttggctccttgttacttatgcaaatttctgctgcaggcttgaatttctccttataaaatgggtttttcttttctgtcacattgtcagactgcaaattttcccaacttttatgctgtacttcccttttaaacataaggttcaattccaaaccatatctttgtgaatatataaaactgaatgcttttaacagcacccaagtcaccacttgaatgctttgctgcttagaaatttcttccactagatatgctaaatcatctctctcaaattcaaaggtccacaaatctctagggcagggacaaaatgccgccagtctctttgcatatcaagagtgaccttttgggcccccccaaagaaaaagggtttttttttccccccccccccccccccaa

SEQ ID NO: 696357 - DNA, 868 bp, Homo sapiens
aggtgtcgtgaaaactacccctaaaagccaaaatgggaacaggacacagactcatatcaacattgtcgtcattggacacgtacgattcgggcaagtccaccacgtactggtccatcctgatcctataacatgcgcgtggccatcgacacaacagaagccacttgacaaacacttcgacgcacagcgaggcctgcatgacgatgcggcaacagggactccatatcaacggtactgccctggcgatcttgcgcactcacaaccctgaacaagcatgcacgcagctgaacagctgggtaaatacaacaccaatctgactactcatcccttgctgcgcaaaaatcattgacgcacaccacgccacacgctcacctactgctagacctactcacattgacctgacccccaaggcaccaccagcacgcaccttctactcacatacacaccacttgcactctaccaaggggcaacactcatccagagccatgccacctgtatgccctgctcccctgcactaagcatatgccctggccttgagcctgaatcatggcctgcacacctatctggcacagcacacatggcaatacactccctccccacacgccacacctggtggcccacgcaccccaccgtatcaaagtccacttggccccccacatatccatggggcgcccatataaaccaacccacacccatggagccagacaatgtgattgaacaaacaatccaaaaacaccataaaaaccttcatggcgtaccggcgaccatggactatacacaaatctaaatataacactatggcgggccaccatactcccaccataacacctatggcaaattaacacccaaaacatccacaccctcttatatc

SEQ ID NO: 696358 - DNA, 436 bp, Homo sapiens
  misc_feature (75)..(75): n is a, c, g, or t
  misc_feature (287)..(287): n is a, c, g, or t
atttgaaatcatcctaactcatctatgtattttgcactagtgctttgctatgggcaggcacagtcttccctcatnttctgccaaacttatcatgcatgcaatggcagaatggtacatgagaggggagcagtatgatcaggccaaattgtctcgaatacttgatgtggcccaggacttgaaggccttgtcaatgctgctaaatggtactccatttgcctttgttattgaccttgctgcacttgcttcacgtcgtgaatacctcaaacttgataagtggctcacagatnaaattcgagagcatggggagccttttatccaggcgtgtatgacttttttaaagagacggtgtccttctattttgggcggacttgccccagaaaaagaccagcccaaaagtgctcaacttcctccagaaactttggcgacaatgttggcc

SEQ ID NO: 696359 - DNA, 108 bp, Homo sapiens
tctagaggtccacgagtcaacacacagaagaagattcatcaaaaggagtgtcgtgtgtgtggataacaccagctgttgtacacttgccataatcttcaatggattttt

SEQ ID NO: 696360 - DNA, 222 bp, Homo sapiens
gctgcacatctcctaagcaggtaccagcgggctgcctgtgcaacttgatgggaacctctcgtgtgaccaccctccgtgttcttgcctgcccatcttctccgcttttgggatggagctgatagccagggctgttgtatcgggtgcccttcaaggcaaaagaccaggctgcactggaagatggaaagccacaggacaggcaagcggcacctgtaggtgtgatct

SEQ ID NO: 696361 - DNA, 380 bp, Homo sapiens
  misc_feature (3)..(3): n is a, c, g, or t
  misc_feature (68)..(68): n is a, c, g, or t
  misc_feature (73)..(73): n is a, c, g, or t
  misc_feature (82)..(83): n is a, c, g, or t
  misc_feature (85)..(85): n is a, c, g, or t
  misc_feature (89)..(89): n is a, c, g, or t
  misc_feature (106)..(106): n is a, c, g, or t
  misc_feature (132)..(132): n is a, c, g, or t
  misc_feature (136)..(136): n is a, c, g, or t
  misc_feature (144)..(144): n is a, c, g, or t
  misc_feature (148)..(148): n is a, c, g, or t
  misc_feature (153)..(153): n is a, c, g, or t
  misc_feature (157)..(157): n is a, c, g, or t
  misc_feature (231)..(231): n is a, c, g, or t
  misc_feature (263)..(263): n is a, c, g, or t
aantttttcaccagaccccaagggaggaggggcagggaaaagagacgagactgtagagaggcagacgnggggncgcgggggnngngggngggagagggcacgttantttcctcctcttggtccctcttcagngggnttacaaantcangagcntggntgacaacactgagggggccaggtcagggtatgtggatgagaaatgacactggaaggaacatcaaagccccagcnacaaaaagaaagtaatcaagccccaaataganggggagcctcccagtgcacctcagaaatgggggcaacgatggggaaggagcagaatggagagcacacaaagggttaggggtctttaaaatttttttttgtaattttcttttattaaa

SEQ ID NO: 696362 - DNA, 374 bp, Homo sapiens
gagaactcggatcctgagtcggccgaggttttgatccactctggcttctaagtgtgggggcctcatgatgtgacccgaggacgaaaacctgaaggtgacttggagttattgtccgatttgcaccatgagaaaggccccagatggaatctggcacgtatcggcggttcacagtgtgtgtgtgtgtcttagcgcgtgacttacactgttgactgactcgcactctaccgtatatgaacagacttatcctgagctaaatatgagtgaccaatggccagtggcccagccctcatgagatccttgagaacctgtgcccagtgtggactgaatatatctggcattataccttttagggcatgagacatgtccatgactgt

SEQ ID NO: 696363 - DNA, 106 bp, Homo sapiens
  misc_feature (40)..(40): n is a, c, g, or t
tgagccggtaccattacgatttgttagtagagatggtaanaggggtactgttgagatgtgatttgcactttggctgttgtcggtcctttaaacttggcaacaaaaa

SEQ ID NO: 696364 - DNA, 143 bp, Homo sapiens
tgctcgactccaggtccagcaatcctccactcagcctcctgagtagctgggactacaggcgcctgccggtgtgcccagctcatttttttttacttttggtagagatgagttctcactatgttgctggccgtcgaactccataa

SEQ ID NO: 696365 - DNA, 248 bp, Homo sapiens
  misc_feature (114)..(114): n is a, c, g, or t
  misc_feature (146)..(146): n is a, c, g, or t
tgctgtgggaatatcctcgtagtatcacggtgctgtagaggagagaacacatgatttgcccgcctgagaacacgtcagcgtcactagtatttcttgcaatcctgcgcactggtncgacaggtggtacagggtttactctcagaaanctaccttgaaagccatcggattgtgaagatgaaccagagtgaggatgatgagtctggggctggagagctcaccagggaggagctgaggcaccttgcagagga

SEQ ID NO: 696366 - DNA, 183 bp, Homo sapiens
agctgtgtggaagcagtgtggaccactgagggctgagtgtgtgtgtgtgtgtgtgatatgtcttcttgtgtgtgcaagcatgtgtggaacgagtgagggctgtgtgtgtgtgtgtgtgtgtccatattcatgctgtgtgcaaacagagtggaacacagcgggctctatgtacctgagagatca

SEQ ID NO: 696367 - DNA, 390 bp, Homo sapiens
  misc_feature (266)..(266): n is a, c, g, or t
  misc_feature (324)..(324): n is a, c, g, or t
ctcggctctacctgtcgggttgtgagtacaacgttcctaggcaggtcccagcacactcataataagtgtgatacaagagggttttagtcatgatgttccccgaccacgtagtggtgggtgcagtggaggcatccctcccagggttctccttttaacatggataaggggagtagcaagaacaaagtgatgagtagcatgttcatacctcagcatggacagaagaaggctttttccgtggggggcagaaggcttaagcaaaagtgacnagcttaaatagcaaaagtaaattaaattatgaccaaggtgaaaatttacgtgggaccntccagaattttctaaacccaacattttactttccccttgaatgattgacttcaaaggctttcgggc

SEQ ID NO: 696368 - DNA, 675 bp, Homo sapiens
  misc_feature (205)..(205): n is a, c, g, or t
  misc_feature (288)..(288): n is a, c, g, or t
  misc_feature (301)..(301): n is a, c, g, or t
  misc_feature (303)..(304): n is a, c, g, or t
  misc_feature (310)..(310): n is a, c, g, or t
  misc_feature (313)..(314): n is a, c, g, or t
  misc_feature (316)..(316): n is a, c, g, or t
  misc_feature (319)..(319): n is a, c, g, or t
  misc_feature (341)..(341): n is a, c, g, or t
  misc_feature (347)..(347): n is a, c, g, or t
  misc_feature (361)..(361): n is a, c, g, or t
  misc_feature (369)..(369): n is a, c, g, or t
  misc_feature (379)..(380): n is a, c, g, or t
  misc_feature (387)..(387): n is a, c, g, or t
  misc_feature (392)..(395): n is a, c, g, or t
  misc_feature (405)..(406): n is a, c, g, or t
  misc_feature (410)..(410): n is a, c, g, or t
  misc_feature (423)..(424): n is a, c, g, or t
  misc_feature (444)..(444): n is a, c, g, or t
  misc_feature (461)..(461): n is a, c, g, or t
  misc_feature (482)..(482): n is a, c, g, or t
  misc_feature (492)..(492): n is a, c, g, or t
  misc_feature (498)..(498): n is a, c, g, or t
  misc_feature (504)..(504): n is a, c, g, or t
  misc_feature (511)..(511): n is a, c, g, or t
  misc_feature (515)..(515): n is a, c, g, or t
  misc_feature (518)..(518): n is a, c, g, or t
  misc_feature (521)..(521): n is a, c, g, or t
  misc_feature (528)..(528): n is a, c, g, or t
  misc_feature (537)..(538): n is a, c, g, or t
  misc_feature (549)..(549): n is a, c, g, or t
  misc_feature (551)..(551): n is a, c, g, or t
  misc_feature (564)..(564): n is a, c, g, or t
  misc_feature (570)..(570): n is a, c, g, or t
  misc_feature (576)..(577): n is a, c, g, or t
  misc_feature (585)..(586): n is a, c, g, or t
  misc_feature (591)..(591): n is a, c, g, or t
  misc_feature (595)..(595): n is a, c, g, or t
  misc_feature (606)..(606): n is a, c, g, or t
  misc_feature (612)..(612): n is a, c, g, or t
agtttctttttgtgataaggttgagaggttaaagagccacttatttagtaatgttgatagtagaattatgccgagataggtaacagatgaggatgaaatttgggcttgactgaagtaatgggggctgtctgtgaagccttgcggcagtacagcccaggtaatttgctgagcctaatgggtgtcagggtcagtctaagtgaaggcnaagagaggctgggatgaagggtgcaaaggaatagtaaagaaagcatgtttgagatccagcacagaataatgggtagtagaggnaggtattgagganannagagtntanngnttnggcaccacagggtggataggcnaaacantttggttgataagntgcagatnctgaactaanntgtaagncttgnnnngttttaggannggtnaaatgggggaatnntaaggagagtttataggtgnccatgctgtagcaggcnagtgataacaggctttaatcnttttaaagcntgctgngggatnggatatnggcnttnagnggggtangggtgattnngttttaatgananggtaaggggtgcntgatcngtcacnnaggagggnngtagnggtntcttatacttntgggtnaaggtggggtaatacagaggagcacgcaaaggaggctttggattgggaagaggcagccatggg

SEQ ID NO: 696369 - DNA, 173 bp, Homo sapiens
atctcggattactcaggtacggctgaagtgtgagagatcgagatactccgtccatgcctggcactgtagcatcagactccatctcaaaatagataaaactatcaactgcagggcaaatttccatccaatatggctattccagtctaagacttgagagagtataattcctctag

SEQ ID NO: 696370 - DNA, 128 bp, Homo sapiens
  misc_feature (76)..(76): n is a, c, g, or t
gtatctgtctgctctggtgcgagtgtataacacaggagaaacagattaggctttgtccaacgtttgcgacgtattnctgaatctgtatggaagccccagagagtacacgggattcccagacccctatg

SEQ ID NO: 696371 - DNA, 220 bp, Homo sapiens
tgtgtacgacgtaagtatgcgtacgttgtacttttacatgacaatagtggctccaagccaagcacaagcttacatgggtgatcacctaatgtgcctcacgtggcgtggttacataatgtgcagagttgtgtagcctgttgtctccaaactcacttgagtcatgctgtgacctggatgctctgcttcggccatattttttgagagcagcacatccattttc

SEQ ID NO: 696372 - DNA, 176 bp, Homo sapiens
taaagatctgcgtgcagagtccgatattgcaaacagcttacatctgttagcatgtactgaaggatgtgaatgagtattatctagttaatcaataagtgtgaaatcaaaaaacaagagcaggctgcacgcaatggctcacgcctgtaatcccagacactgtgcacgagccgagagga

SEQ ID NO: 696373 - DNA, 270 bp, Homo sapiens
tttcatggccttggttgggaaataaatatctgaaacaccgggagcttaaaataaaaagtagtagggagattttccacttccgtcctgtatacctttgagctcttaaatatttaaaaaaaaaaaaaaagtttccctgggatacaactaattagctactaaaagtaaagtctcaaattgttaatttgaaaatagataactttttttggatggctgtaataacaggaaaaaaagagtattttgacctcatgttaaaaggctctgtatagcttc

SEQ ID NO: 696374 - DNA, 231 bp, Homo sapiens
agatcaccggcaggataatgacgtgtatccaccattatcattttatactgaatagtattactgtcctaaaaatcctctctactgcacctgttcatctcctccctcaacccctgggaatcactgatctttttattatcgctatagttttgttttttttttttgggaatgtcacatcatatacagtatgtcaacattgagatgggcttctttcacttaatttgcttctactgt

SEQ ID NO: 696375 - DNA, 843 bp, Homo sapiens
ctggtccagttctgatggcaaagatgatccaattgatgtatctaaagacagtatatctagtgaagatcttacagaatcttttaaaagatggcattcagttcagagagtccttaccggaggtgaaagacctgctacaagcggttcatcttggcagcttccagacccatatttaattatcgtatgattagaaagcaatttataaatattatgtccagggaacaacattgcatttttctaaaataggccgttgttctataaatatgtttaacttgtgatcttttacagctttattggccttatactttatgtcacttacgctctacgtgattaccatgtatgaccgaaataagaagctttattagtgttagacatcttatttcattactttttcacatggtattcgagtcacaagacttcgttccgtgatacgttctataataacatcggtcttattgttattaattatctaaatatgcataacctaatattattcagcttcgcccctggtcacaatcttactcgattgtgtcgtcctcttgcattataatatatatcaaaattacccgtcccgacatcaagaagagtgaaatcaagaatatcatattatatcgttctccaaactaattgatgatgtaataccacgagataagtataaggtgtttagcgagctttaatcttatcaatttagttcacttcatgtgaaactggcaatgcacatatcattattacataaacatgaataataaaatgtagaaaatggatgataagataatagcagcgttcatgaaacaagtaccaaattaacaatgacccctagtctttttatatagtactactcagact

SEQ ID NO: 696376 - DNA, 456 bp, Homo sapiens
ttttaaattcaggtcgtggcaaacaaaaagccaacaattcatctgatctgtaagactgtagcaatacagaccatcatattcatatcacagatgacacaaaggataacatgatgacagcaatgaatacaacttactgataaataatacctatcatattagtactggaaaataacacaagaaagagaataaaaaagcatagtgatcattaagcaagcggaaacacaacgcacacacaaaagaacaacataacagacaaacgcccggcagcaccgacgaccaaagagagaaaaacaacacagcaacacacacatactcccatgacaaacatcacacaacggcaccagaacagacaaacaaaaaaagcaaaagaaaactcaaaaacaaaagaacacactcagagagacaaatacacgaaaaaacaaataaaaagaaaaacaagcgactgaagacaaaatg

SEQ ID NO: 696377 - DNA, 192 bp, Homo sapiens
ggtaaggccgcaggtcgactcttgtagagatccccaagcaggtaatacatgactcacaacgagccagaaagcattcatcaaagatgatgaatgtactcaagactgaacttcaattaatagctgaagcataaggcagtgccctagactctgtatgttggctctgtagtagcatgatgtgaggtgaaattctca

SEQ ID NO: 696378 - DNA, 418 bp, Homo sapiens
gttttggtttgttggttggtcccgccaaaatctccccggggcaccctccccaaaggttttttcttttcttagggggctctgggaaagggaaagggggaggatgcacccggggggtttttttttaaaccccccggtttttcccaggagcgggaaaattaatggcccctttttttggtagccaaaattaaagggggccttgggggccccccccttttttacctttcaaccccccgaaacccaaaaagccaaacgggttcccctttaagggaatggtttatattttttaaataaaaaggcgggtggggggggtgaaaactaaggggttttccaaggatctttctttcccaaccctttttgggccggccccggggggatttttttttttaaaaaaaagccccaggccttttggggttgttta

SEQ ID NO: 696379 - DNA, 322 bp, Homo sapiens
  misc_feature (16)..(16): n is a, c, g, or t
tagctgcgtcctctanagcggcgcaccaaacactagcatagttctagtaaacacagcctaatacagggaaggaacaaaacaaaagaggactgaagaaacacgttcgacgacacgtatgtccggaactaccaaaagaatccctagatctctaccagcacaaaggagcaccacacatggcggccaccactagcatcgacacagacagaggtcagttgaatagcaataaaccccgtactaccactacactgacggcttctgatcgatcaaaacccagcaaaagcacgcacaggccggaaagggcacgcacgccgccagcgcggcc

SEQ ID NO: 696380 - DNA, 240 bp, Homo sapiens
gctccgcagcccttgccaccttccctgcaccttgccctgcccggcctcatgtaccgcgcgctgtaccgttccgctcggcgagccatacgcgctggcgttcgcccgggcgagaccttcctggtgctagagcgacgatgcgcgcactggtggctggccgcgcgggcgcagtggtgagacgggctacgtgccgccagcctacctgcgccgcctgcaggtctaactgctgtcccctgccccccc

SEQ ID NO: 696381 - DNA, 137 bp, Homo sapiens
aattctctcacctctaacatcagaccatccaattccagtggaccagtcttccccatttacaggtcttctctccacctcttcacggaaagtgcctccacaaccagaggtggataagaggaaaggttggacttgaaggg

SEQ ID NO: 696382 - DNA, 482 bp, Homo sapiens
  misc_feature (12)..(12): n is a, c, g, or t
  misc_feature (27)..(27): n is a, c, g, or t
  misc_feature (39)..(39): n is a, c, g, or t
  misc_feature (66)..(66): n is a, c, g, or t
  misc_feature (439)..(439): n is a, c, g, or t
  misc_feature (441)..(441): n is a, c, g, or t
aaatgccgaagntgttgttaccccccncccatttggacncccctcctgagaccgtaccccagcaantagaaatatacctaaagaaatcattttataccaaaaattgtgattgccccccagaggtaagaggaaaagaatataaaaataatgaataccccaacagcctatcctctttggcctcctagatccttttggaaatccatcattcctcagcaaagtaacacaagaagggaaaaccccaacaccgcatgttcctcactcataagtgggagtcgaacaacgagaacacatggacacaggaaggggaacatcacacactggggcctgtcagggggtggggggctaggggagggatagcattaggagaaatacctgacgtaaatgatgagttaatgggtgtagcaaaccaacatggcacatgtatacctatgtaacaaantnctcgttgtgcacatgtaccccagaacttacagtataattaa

SEQ ID NO: 696383 - DNA, 1249 bp, Homo sapiens
tatgatgatagccctgtcttcacaggttcattgagatcctcgttttttccgtgctatactttttgtcactttagtttatagtgtgtcttgcccatagtcgctgtggtcaaccccttagttcctcgataatattgctatcttttgctcctatgagggtcactctaccctgatcgttgtaggattatcctgttcttaagcggtaaaattggggatattgtttttggccggttataatggtagtatatttgtgagtgtcgtctgtctcttatacacactatgtggggaaatcggactcgttcaacatgtgaaaatgggcacaaattttgttacatattggctttccagagggccttttcaagctggtaagggccaggcagtgagatgtgagtcccgtttatcttacttcaaagtatcgcactggcaagaactgttttcgacatgggctataacagtttgatgggctgcttcctgggaaaggcaccttactgatccagggacagactgcagtaggaggagatttaactagataatctcatacaatgtcttcacaaggtctggacactgtacgctcacaagccatgttaatccttagcacttgttggggaaggccaagcgcacggacgatcgcttcgagtccaggagtgtctaaaccagccttgggccaagatgggatgacctcatttcttagaccaaaaaggttaaatacaaaatacgtggagcattagttggttgcatcgcctagtaggtctctagctactttggaatggtctgtaggtcaggatggaccacttgtagcccaggaaggctaaggctgcatgtgagccatgattgtgtcacctgtactccagtgtaacgcatgaagagtgagaccctgtctcttacacaaatagaaagtcctccaactttaaattcaacattaagtcagacacagtgaagctttcgatgggttctgtgggcagaaatgaggcaacaagagtagcaaagcacaagagtcatacaaagatccacatagggggccaggcgccgtggctcacatctgtaatcccagcacttagggaggccgaggcggcggatcacgaggtcaggagattgagaccatcctggctaacaaagtgaaacaccgtctctactaaaaatacaagaaattagccgggcatggcttcgcgggctgcctgtagtcccagctactcgagaggctgaggcagaagaatggcgtgaacccaggatacggaccgggcagtgagctgag

SEQ ID NO: 696384 - DNA, 330 bp, Homo sapiens
gggggggggggggtttttaggggtttttaagggttttttttttcccccgggggggggggccccccccctttggggttcccggggagggggaatttaaattttttttgaaattggccccccccccccccccccaaggggggggtccctttttttggttttggaaggggactgttttttttttgccccccgggttttggaattgggtttggtttttttttttccaagggtttttttttttaaaaaattttcccccctttttggggccctttttttggaaggggaaaaaatttttggggggccgggggaaaaaaggggtttttttccccttta

SEQ ID NO: 696385 - DNA, 223 bp, Homo sapiens
gtagttcttctaagatctgccggagatagtacagatcaacactaggactaactcagcatgtcaggcatgtgaaataacagtggagctctagtgttgacagtgttatacattgtaggttgtaaaccatcatctggactgccaacgcagccgcatgtctgctgtcatatatgagagaactgaaactgcatcttgaaaggcagatgccagacagtcgaagtgcaca

SEQ ID NO: 696386 - DNA, 467 bp, Homo sapiens
aggcccttttaccccgatcactcagcttaaatggtcggccagctctaggaagagtcctggtgcttccaaacatcttccacttatggatgatggaggccactgtgctcattggaactttcagagcagcagaaatgtttctgtaaccttccgcagccttgtgcctcgagacaatcttgtcttggaggtctacagacaattcctttgtcttcatgcttggtttgtactttaacagccactgtcaaccctgggaccttatattgacaggtgtatgcctcttcaaaaaatgtccagtcaactgaatttaccacaggtgaactccaatgaagctgctgaaacatctcaagaatgatcagtggaaccatactgtacctgagctcaatttagagcttcacggcaaaggccatgaatacttctgtacttgtgatttttcagcttttttatttgtaataaatttgcaccaatttcca

SEQ ID NO: 696387 - DNA, 431 bp, Homo sapiens
gcaaaggtccccaagggtcacagggaggggacatacggttttgttaaaccccaaaaattaccccttcaggtcctaaagaagacatttttttttagagattttccttttgggggatttttaaaaaaaaatctgggggtaactggcccccattttttttttggggggggacccccaggaatgacccttttgggtttaagagggtgcggttcccagcttttcttgaaaggcccaggcccaattttgggcacaggggttctgtaaactgaaggtttgccaggggtttttagactcgcccattttaggggggcaaggggggcattttttttttcatgggggggcgggggttgatttgtttcaaaaattgggggtttttttgaaaaagggggcgggaaggcggcacccccccattaaaaaacattttaagcctttta

SEQ ID NO: 696388 - DNA, 106 bp, Homo sapiens
gcgctcggtcccgcacgcgcagtggtgggcgtctcgaaggcctgcccccgcggtggggcgcggggttttggcagcagtctcgaatgagccataagtgtccctcgtg

SEQ ID NO: 696389 - DNA, 295 bp, Homo sapiens
  misc_feature (73)..(73): n is a, c, g, or t
ttccttgggaaaaaaaatttttaaaaaaaatttaaaaggttttgctgaaataaaggatcctccattttaaatnccgggtttggaaggtgaaaagccctccctcaaaatccccggtttccaattccttgaaaaaatttttttttaaactaaaaaaggggggaaggaaaatttcctaaattgggaccccccgggtgctcctaaaatgggttccagtcatgtccccccggatgggatttttataaaataaagggaaaattggatattaaaggtccaaaaaaaatgttctttaagggga

SEQ ID NO: 696390 - DNA, 398 bp, Homo sapiens
taaagaatctggtagctgcttaattgggcaattaaacaatatatggctctattttgtaaaacaaactactggtaattatttttaatacctattttcattctgattactctttttttaagttaaagactatcagttcattaagattgagtttttatgatggttaaaaataattctctataggtttttcaatatatttttctgcgtgttctcaaattatatatttcccttcaattaaagattgcttagtgaaataaactggttcactatagaaaaagaattacgtcgcttaatacctaatatcataattggccaatatgaaaaaaaaaaaagtaaaaggagcccctaaaattatttacttggaacacccaaaatttaaatgcctaaatgggatatacgtg

SEQ ID NO: 696391 - DNA, 152 bp, Homo sapiens
cgctgatgatcttttatgaaccgtccgacggcctgcccgcgtaaccgcccagaaaagtgcgttaatgaaaatcacgacattccctcatctttcctgaacattgataccgaccgctatggcagtgcctggctggccttttcgagcgacccttg

SEQ ID NO: 696392 - DNA, 373 bp, Homo sapiens
  misc_feature (315)..(315): n is a, c, g, or t
ggaggggcggagggaagtaggcaggtgccagaaccacggtaaaggaagagttccatgagaatgcttacacagcagtggcaatcgagggctgcatccgcaagggcagatgacacagcacagtggttcccaacgctcacaagaagcaccctggtttcccgccttcctctgttcctattggcaccataatctctgtataatctgggccaaacgtgttacctctctgggtccacagatgagatactgtgccctgcctcgaaggctgcccgtgcgaagctcttgccatctttaaagcatgcaggctgcctggcacccggngctaaacaaaggccactgctctccttcaccgcgcagcccccaggcctacagaccccat

SEQ ID NO: 696393 - DNA, 411 bp, Homo sapiens
atttatacaaaattttcactaaggactgctcgacccaacagccgtgagtacattggtccaaccattaataaatagtcttaaataagaaaacaaacaggttgaaggaaagcaagctcatcgtcctgaacgagggattaaagggggggggtgttcaaaatacctttggatggaaataaataatctctttgctttgtaacacctaattactggtttaaatgtccaaatgatgctaaccaaaggctggtagggtcaaaaaactctcaccaagagggaccacacaaaaagccccagattttgccgcaaatgaaaacctaccataacaaaaaatactactccccagtgactaaaaagtgtaggctttatcccaaacttctaaataagaaaaacatcaagtaaacttaaaacacaccc

SEQ ID NO: 696394 - DNA, 240 bp, Homo sapiens
tgtttagagatcctaccatctgggtacctttgcttgaaccgtgcaaacaacatctagagtctattaagtggatcccatccagttggtttccacgggtgatccagttgggttgcacatagtgtggtcgtccacatcactcaatcttgacgagtgccaggagatagtctatcaatcatgccatagatttcatctggtttagtgactggtggaaccgaacctaggacatacagaaatacatat

SEQ ID NO: 696395 - DNA, 206 bp, Homo sapiens
acatgtgtgggtgccttttgtacatttacaaaagctttatttactctgttcacttatacctcattcataatgtatatcttcttaagattcgtggtaactggttttgctttgtttttagccttaacgttttgtcaggctggctatgcgaactccattcctggacttcggccctcctaatttctctcggaccaatgggggatcctcta

SEQ ID NO: 696396 - DNA, 942 bp, Homo sapiens
  misc_feature (106)..(106): n is a, c, g, or t
aaggtgtttcgcgacgcagaatattgttggtggcctgtctgttcggcgataaccccccggcgaggggcctcttgtagcgcgcgtcttattcccccggtgctctccnggtcgcccccgggtagtttcccagcagaaggttgttacgtgcacggcgcaaatcttgggggggtcgacaaaaacataagagcggttcacacatgtggccggccaagtggcgcccctcccagaaggaggcaaacgttggcagcgaatggaccttccccttcttttgggaaccacagttctgaacatggtttctctctgctgttcccaaatctccgcgcgtgttgcatatctggcgcttcttcttctcccccgctgttgcccgcgttcttggagcgggtcggttcgcccgaaagcccttctggttggagagactttggccccagggaaaaaccattcacacgggcggatattcctgcgagaaatttttaataccccttccgcacaccatagcaatacacgggggggaattggctctccaaaaaggggcacacacttcctgcgggtaaacccctcttcgtcaaaagatacttttttattcagggagccacgccaccaccacgtgttgtccaaaagtggcagagtacgtcaatacatcagtcgggggtcaattggcccatcgtccccaaaactctgcttaaatgcgccactcttctccccagcagaggtcattaccacccgggcaattccccacaccatagttaattggttccatcgagtgctctttcgcccaaaacaaatgtttttgtttctgtacaatgttcctgctataaactcttctaaaccacccctctcaaacccacttcttcgcacgcccaaatcggctcttcacaaaccaccacgcccaacgcggaacaattctgttccccaaaaaccaaaccaccttttccccacaaaaca

SEQ ID NO: 696397 - DNA, 967 bp, Homo sapiens
tgttttctcgtttttctgttgctgacttttattaatttttctccgggtacactgtttgcttctgtcgtttttggtggcaacttatcaatcaatttggttctctatacacacgtgtgtggttcctgtctcgttttcttttcgtgttgttcttcactactccttctggtggcttcgctttttttttgtccaaacacttggttcttttttctatatatgctactcatccttctctacttccctccttcctgtttgtgggtggatgaccaatgattgtgtgtttattagaattcctcctttttctcctcaattatatggcatgtttttcttatagggggggggctagacccaccacttttttttttttggaataataattcctttttctccacatacatctagccacctacatacagtggcgttgctttaatttagtatcgtctgctcgctcctcttcttttctctactctcctttgtttcgtctctatctcctcggtcagtttattcatagatcgcccctttcttttttaccaccctcagtggtgttttttatctccccactactgcctccacaaggtggttctcgcctcccacagttgttctgtttctttctttttttgtcttctttatgctctacccccacaacgttatggtgagcttgttcttgctcgctcgtcttctacaacaagggggctattctttgtttgtgtcgctccccacttgtccatctgcttctcttctagtcatcagtatgcttatctcactcgctctcgtgttgcgccccccttttttttttctcctctgttcgtgtctatcccattgtctcctccgtccccctcaaaggttttctggattaatttttttttccccatcacgggcccaaaggtgttttttcccccccccccccccccgcggggaaaaacacctggggggggggcccccctctttccaaaaaacccggggggcggga

SEQ ID NO: 696398 - DNA, 671 bp, Homo sapiens
tgcctggaaaaccgagttgcagtcctggaaaatcaaaataaaacttctaatagaagagttaagaatacgtttgcaaggatcgtttattccaataaaagtgtatgatgtcctaagacaagagaaatatttttgtggacatgccataagaatagttagatggatttccttagtggagttgtatagattacagaggtcgagaattgcaaggcttttgatttaggcttatccaaatcaacggataaatatcttacgcacgatatctagtgacagatggagaaagtggaaaatgatctcaaggaagctacgggcacaactggaagctttgtagaaattagagatattcaaggagcaagaacatgaacgttgtcagcaggtctacagatttgtctaaagtaaccaatagtggccaatctaaacatggcagagaagatgaactttgataaactgaattcgttgaaaaatccatttaccctacaggtttgcatttgtttgctgaaatttacctttttttagttatatatatgtgtgtgtgtgtgtgtaatttctgacgactaaattctaaattgacaaaggtaagagaaaacctagtacattactaaatatataaagtatatgtcttgattagtgtatacgttgttctagtgtgagtcttaataagtggggtattaaaa

SEQ ID NO: 696399 - DNA, 552 bp, Homo sapiens
  misc_feature (533)..(533): n is a, c, g, or t
tttttatcgatgacattgcctagatggcttccatcggcgtgcctgtgacatggatgcccacctggtgggatctaggtcccgcctccacgccagcgacttcagcgtcctgagtgcgctctatactgatgccctggtatttcatactgtcaccaacgtaccgccaggagattctcacgtgctctggatccgagacgcctcttgtcggaagcataagttgcggcagaaactggaacagatcatcctagccctcgtgtccagcgacagctaaggtggctggcgaatcggctgaggatgggggcttctcagtcctgtgccgtcctcccatccaggggagtggactggctcaagcctagggtccccgggctgagcctggattgggtatctgtgggacaggtcacctggccacagatgccccccggcacacccaggcccccttcattagtgccatttgctttgggcctctgcaggtcgacggggtgacagggcgagcccccaccccagcagcagcaatacccccaccctcctgacctgtntacaggctggtggacagtc

SEQ ID NO: 696400 - DNA, 318 bp, Homo sapiens
cgatagggcagaatcagtaccatgactgcatgtgccccgggaccccgtggccagtggggtgccctacacctgctgcatccggaatcatgcacagagatgttgtcaacaccatgtgtggttagagtactttcgacaaggaacgtctgagtgtgcaggatgtcatctacgtgcgggtgcgtgctgccacatgccgtgtgtcatcttggtgcagtggacaaatagcgccttcatggcgcggaatcctcctgggtcatctgagtccccagctgctgggaatgctgctgacgctgctgtacatcacccgggtggaggacatca

SEQ ID NO: 696401 - DNA, 732 bp, Homo sapiens
gagtctgatcaggcctcacccctcccctgggactttcccacccaggaaaggaggaccagtcaggatgaggcccggcctgttcccgcggcgcgtcccatgagactaggctcatgcccaggtatcctgggggaagaggagatgtgatcaggccccaacccgtgataatcaggcaaggaggaggagtcagatgagagccctgcgacttctcccaagaggaaccgaccagatgcacggtatttcacgaaggagacacggctgcgagaacggacatgagatcagtggcctgcccccttggggatcacagcctcacacccatgcccctgatgggactcatccttgccccaggtgagggaaggacacaggatgaggtctcgaccctgtacccctagggactgtcctagccaggtctcctggagaaagggacgatgtccaggatgatagctcgcatcacatttggtctatggaaaccaaccagttctaatccaggtccctgggccacgaagaaaccaaggacgtcaaagcgtaacataggagggatcccaggccgcataggagaggattttcaaacgcctcatggccccacattacaccgcaactggaagcccatagcaccatgactcatagaccccgcgggccaaaggaacacgagaaacgatgacgggaattgacgaccccaagaccgctatccccgccctgggacacacatactccaatggccagttctagagaact

SEQ ID NO: 696402 - DNA, 99 bp, Homo sapiens
aaggagaaataatcatagagtttaactattctggggtgatccagttctttgtgtattctatactctctgcaggcatgtttgtggtagttttctttcttc

SEQ ID NO: 696403 - DNA, 350 bp, Homo sapiens
  misc_feature (8)..(8): n is a, c, g, or t
  misc_feature (29)..(29): n is a, c, g, or t
  misc_feature (40)..(40): n is a, c, g, or t
  misc_feature (47)..(47): n is a, c, g, or t
  misc_feature (49)..(49): n is a, c, g, or t
  misc_feature (73)..(73): n is a, c, g, or t
  misc_feature (191)..(191): n is a, c, g, or t
  misc_feature (237)..(237): n is a, c, g, or t
ctcatttnttccctccctgccggcctctnttccttctttnataattntnttgaatacctccttcaagtttttnctcaaggctgagcgtggtggcttacgcctgtaatcccagcactttgggagtcggaggagggtgagtcacttcagattggaagttcgagaccagcctggccaacatggtgaaacccgtntctactaaaaatacaaaaattagctgggcgtggtggtgggcatctntagtcccagctacttgggaggctgaggcaggagaatcgcttgaacccgggagggagggttgcagttagctgaagatagtaccaagggcattttcagcctggggtgaccaaagt

SEQ ID NO: 696404 - DNA, 510 bp, Homo sapiens
  misc_feature (105)..(105): n is a, c, g, or t
gagtgagatgtattcactatcacgagaacagtatgggaaaaacctgcccccatgattcgattacctcctacgggtcctcccacgacacatggggattatgggaantacaattcaagatgaaattgggtggggacgcagccaaaccatatcgggtagcaacaacctagggtcagttttgcaggtggtaaagccatttaccaagatagttgtaggtaaagaagggcagatttattagagaaattgtgaaaatatgttgcagtgggcagctcagcagagaaggggctacctgcaaagaggcaagggctggaggaaagttttatagggtcctgctgaagggtgctacgtgtggaatgaggtcattgtgcccgcaggttgtttgtgattagctgtctctaacaattgttcatacaataattgttcattattgttctcaacttggggctctccccaacctggggacccttccttattgtgctacccacaggtaccgagctcggttcgatcatgtca

SEQ ID NO: 696405 - DNA, 967 bp, Homo sapiens
  misc_feature (105)..(105): n is a, c, g, or t
gagtgagatgtattcactatcacgagaacagtatgggaaaaacctgcccccatgattcgattacctcctacgggtcctcccacgacacatggggattatgggaantacaattcaagatgaaattgggtggggacgcagccaaaccatatcgggtagcaacaacctagggtcagttttgcaggtggtaaagccatttaccaagatagttgtaggtaaagaagggcagatttattagagaaattgtgaaaatatgttgcagtgggcagctcagcagagaaggggctacctgcaaagaggcaagggctggaggaaagttttatagggtcctgctgaagggtgctacgtgtggaatgaggtcattgtgcccgcaggttgtttgtgattagctgtctctaacaattgttcatacaataattgttcattattgttctcaacttggggctctccccaacctggggacccttccttattgttgcttacttatcaggtctccacataaaggtgtggaaacttcattcattcatatcttcaacacaaattgtaggtagcctgttttttaaaacatttattcaacaaatatttagtccaagccactattacttactaccttctctactattgtatggacttttaactatctctgacactattcactattcttccacattctctattatttatacctatggtaaaatttgccagtttgaccatacaactaatactcacagggaatatatagagtctagaagaaaatatacaggtccttaaaggctgccctgccaacaaaaccataatcgcaggaacaaacatcacaactatgccaaataatcaatcctacaaatgtccaaaattctactttaaaactggaattaccagacttcctttctgcattaaccagctttaactagacagtaacgaaatattcctactttatgctgtgatagatctatgttgtttgtttgttgtt

SEQ ID NO: 696406 - DNA, 321 bp, Homo sapiens
tgtgggtagcacaataaggaaggtcccaggttggggagagccccaagttgagaacaataatgaacaattattgtatgaacaattgttagagacagctaatcacaaacaacctgcgggcacaatgacctcattccacacgtagcacccttcagcaggaccctataaaactttcctccagcccttgcctctttgcaggtagccccttctctgctgaggctgcccactgcaacatattttcacaatttctctaataaatctgctcttcttatacctacaactatcttggtaaatggctttaccacctgcaaaactgaccctagg

SEQ ID NO: 696407 - DNA, 374 bp, Homo sapiens
aatcgagctcgtacctgtggtagacacctagggtcagttttgcaggtggtaaagccatttaccaagatagttgtaggtaaagaagggcagatttattagagaaattgtgaaaatatgttgcagtgggcagctcagcagagaaggggctacctgcaaagaggcaagggctggaggaaagttttatagggtcctgctgaagggtgctacgtgtggaatgaggtcattgtgcccgcaggttgtttgtgattagctgtctctaacaattgttcatacaataattgttcattattgttctcaacttggggctctccccaacctggggacccttccttattgtgctacccacaggtaccgagctcggttcgatcatgtca

SEQ ID NO: 696408 - DNA, 216 bp, Homo sapiens
acgtcccccatatgtacaacaaaaggagaaacaaaaccctcaaagtttatagataacactatgcaagactactcgaacatgagatttaaaaaagaaatcaatgaatgaggttttactatctttcctattgtacagggctaaaacatagtattaagctcacaaatcacttctaaaaaataaaaaaataatagaatcaaggaaaacaaattataatcc

SEQ ID NO: 696409 - DNA, 698 bp, Homo sapiens
  misc_feature (105)..(105): n is a, c, g, or t
gagtgagatgtattcactatcacgagaacagtatgggaaaaacctgcccccatgattcgattacctcctacgggtcctcccacgacacatggggattatgggaantacaattcaagatgaaattgggtggggacgcagccaaaccatatcgggtagcaacaacctagggtcagttttgcaggtggtaaagccatttaccaagatagttgtaggtaaagaagggcagatttattagagaaattgtgaaaatatgttgcagtgggcagctcagcagagaaggggctacctgcaaagaggcaagggctggaggaaagttttatagggtcctgctgaagggtgctacgtgtggaatgaggtcattgtgcccgcaggttgtttgtgattagctgtctctaacaattgttcatacaataattgttcattattgttctcaacttggggctctccccaacctggggacccttccttattgttgcttacttatcaggtctccacataaaggtgtggaaacttcattcattcatatcttcaacacaaattgtaggtagcctgttttttaaaacatttattcaacaaatatttagtccaagccactattacttactaccttctctactattgtatggacttttaactatctctgacactattcactattcttccacacgtcatacggggagtcctgctagagtcgaccg

SEQ ID NO: 696410 - DNA, 352 bp, Homo sapiens
ctcttcctgggcagtcgagctggcttcaccgccctcacatatgctgacgaggccctgggcagtgggctggtctagccgggctgttccccgacaacagaggtcatgctgtgatgctgccttagcgctggcggcctgagatttccagcatgagccccgtggcggtgcacagcactcatgtccttctgttgtatttccgtgaacattcggtggccgagagcctcaactacgtggcgtcctggaacatgagcaggctgcagacccggagacctcgtgaagtcggtccaggccacgactgagaacaaggaactgaaaaccgtcaccttctccaagctcttattgcccaggctggagt

SEQ ID NO: 696411 - DNA, 846 bp, Homo sapiens
  misc_feature (105)..(105): n is a, c, g, or t
gagtgagatgtattcactatcacgagaacagtatgggaaaaacctgcccccatgattcgattacctcctacgggtcctcccacgacacatggggattatgggaantacaattcaagatgaaattgggtggggacgcagccaaaccatatcgggtagcaacaacctagggtcagttttgcaggtggtaaagccatttaccaagatagttgtaggtaaagaagggcagatttattagagaaattgtgcgcaggttgtttgtgattagctgtctctaacaattgttcatacaataattgttcattattgttctcaacttggggctctccccaacctggggacccttccttattgttgcttacttatcaggtctccacataaaggtgtggaaacttcattcattcatatcttcaacacaaattgtaggtagcctgttttttaaaacatttattcaacaaatatttagtccaagccactattacttactaccttctctactattgtatggacttttaactatctctgacactattcactattcttccacattctctattatttatacctatggtaaaatttgccagtttgaccatacaactaatactcacagggaatatatagagtctagaagaaaatatacaggtccttaaaggctgccctgccaacaaaaccataatcgcaggaacaaacatcacaactatgccaaataatcaatcctacaaatgtccaaaattctactttaaaactggaattaccagacttcctttctgcattaaccagctttaactagacagtaacgaaatattcctactttatgctgtgatagatctatgttgtttgtttgttgtt

SEQ ID NO: 696412 - DNA, 397 bp, Homo sapiens
ctccatatggctattgtggggattagtagcatatctaaagtggcttataacagtgtgttacatacacggggtcaaatatagtgtgtagctattattaccattatcactgtgactatccttatactccaaaggttgcgacaaactgggagacacgataccggaaccattgagatggtgatcagagggcaactttttgagcgagttaaagaatgggatatagatatgcacaccaatggacttggttatattttaccccttaattaggtgaacttacctgccaattcatagagcatagaccattgcgtgggcaagaacagactggaatgagaggctctgtgaacaatccagagagaaagagccgtgccggaggttaattggctattcatttctctttccg

SEQ ID NO: 696413 - DNA, 625 bp, Homo sapiens
tgtgggtagcacaataaggaaggtcccaggttggggagagccccaagttgagaacaataatgaacaattattgtatgaacaattgttagagacagctaatcacaaacaacctggggacccttccttattgttgcttacttatcaggtctccacataaaggtgtggaaacttcattcattcatatcttcaacacaaattgtaggtagcctgttttttaaaacatttattcaacaaatatttagtccaagccactattacttactaccttctctactattgtatggacttttaactatctctgacactattcactattcttccacattctctattatttatacctatggtaaaatttgccagtttgaccatacaactaatactcacagggaatatatagagtctagaagaaaatatacaggtccttaaaggctgccctgccaacaaaaccataatcgcaggaacaaacatcacaactatgccaaataatcaatcctacaaatgtccaaaattctactttaaaactggaattaccagacttcctttctgcattaaccagctttaactagacagtaacgaaatattcctactttatgctgtgatagatctatgttgtttgtttgttgtt

SEQ ID NO: 696414 - DNA, 135 bp, Homo sapiens
cagttactgtgaatgttcccaccgctagatgctgctctgcactgactgctgccaggtgtggtttcctgcattgacagttgttttggagaacaacaaggacaactttatgtctgagaaaaggagggttatgggctc

SEQ ID NO: 696415 - DNA, 216 bp, Homo sapiens
tcctatttcacacggctactttattatttttgtagagtgagtctcactgttgcccaggctggtctcaaactctttgcctcaagcaatcctcccaccttggcctcttaaaatgctgggattataggcatgagccaccacacctggctatgatggttaattttatatgtcaacctgactgggtcatagggtaaccacatatttggtcttactctgggt

SEQ ID NO: 696416 - DNA, 317 bp, Homo sapiens
  misc_feature (3)..(3): n is a, c, g, or t
  misc_feature (13)..(13): n is a, c, g, or t
aanttcggcacgnggctttttttttttgagacagggtctcactctgttgcctggactggagtacattggcatgatcatggctcaccgcagccttgacctcccgggctcaagtgatccttccacctcagccctccaaatagctgggaccacaggcatgcatcatgatgctcacctaatttttaaattttttttgtagagacagcgtcttgctatgttgcccagggtggtctcgaactcctagggattcaaggcgatcctcctggccccagcctaacccaaagtggttaggaattatagggtgtggaggccaccacggt

SEQ ID NO: 696417 - DNA, 821 bp, Homo sapiens
  misc_feature (184)..(184): n is a, c, g, or t
  misc_feature (235)..(235): n is a, c, g, or t
  misc_feature (238)..(239): n is a, c, g, or t
  misc_feature (255)..(255): n is a, c, g, or t
  misc_feature (258)..(258): n is a, c, g, or t
  misc_feature (262)..(262): n is a, c, g, or t
  misc_feature (268)..(268): n is a, c, g, or t
  misc_feature (277)..(277): n is a, c, g, or t
  misc_feature (303)..(303): n is a, c, g, or t
  misc_feature (307)..(307): n is a, c, g, or t
  misc_feature (309)..(309): n is a, c, g, or t
  misc_feature (318)..(318): n is a, c, g, or t
  misc_feature (329)..(329): n is a, c, g, or t
  misc_feature (331)..(331): n is a, c, g, or t
  misc_feature (333)..(333): n is a, c, g, or t
  misc_feature (339)..(341): n is a, c, g, or t
  misc_feature (356)..(356): n is a, c, g, or t
  misc_feature (362)..(362): n is a, c, g, or t
  misc_feature (365)..(366): n is a, c, g, or t
  misc_feature (382)..(382): n is a, c, g, or t
  misc_feature (384)..(385): n is a, c, g, or t
  misc_feature (412)..(412): n is a, c, g, or t
  misc_feature (422)..(422): n is a, c, g, or t
  misc_feature (424)..(424): n is a, c, g, or t
  misc_feature (434)..(434): n is a, c, g, or t
  misc_feature (641)..(641): n is a, c, g, or t
aacaaaggatatcgtcaatgggctgaggtctgtgcagacttttgcagacaaatcaaaacaagaagctctgaagaatgacctggtggaggctttgaagagaaagcagcaatgctaaacctctgtttcatgctaaccagacacgccgtgcactcgttagattcctttcttagaaaactcgttttcngcaccccaccctcgtcccttccctcccctacaggtcacataacagctgcancanngaccgcacagcgccanccncccngagaanaaagccganagccacccccccccggccccgagccngccncngccacaccncgctctcagtncncnccacannnccaaagagaccgtgnggtttnagnncacccgggccccccgncnncctccctgtccccccatttataggcanaaaatccacngnctgccagccnccctcccctcccacctttttggtacattggtgtaaaaaatgtaaaacaaaaaaattttatgaactaactgtggtgtgtgaaagagagaagaaaaactggaaatcttattccgtgtgtgtttgggagttgcttggggttgggggtcgtggggacaggggacagctctgggagcagaggtggccctcggtgccgtcctgcgcagactcncccgtcccacggaggccgcggggtgggggctggggggggtcccgccgaccgttccgctcttccggccaggtgcttttctgtcaatttctatggaatgcaaaaggaggtttttgttttattttgtttttttgtaaagcttaagaaaaaaatctacatcttatacttgagcctccatcctta

SEQ ID NO: 696418 - DNA, 341 bp, Homo sapiens
ccgccccagtagttgctaacgcttttactttgctgaacttcatgttattcctccttcccatcgtcttctgatgttcgtaattgaatttgttctgcctgcgtttcttccggctcccgctgatagaacttgttcaattgttcctcggcaatttgctggcttggtaatggatcggtggctaatttgacgcggccgttttcactcgtggctaagtaatactctttttctgactggcctaattcttgggcctctaagacatgcaaattatgttcgtaacggcctaagggttatcaacttctaagccatagaagcctaagaagccttccaggagactctcaccaaaa

SEQ ID NO: 696419 - DNA, 207 bp, Homo sapiens
  misc_feature (2)..(2): n is a, c, g, or t
  misc_feature (122)..(122): n is a, c, g, or t
  misc_feature (129)..(129): n is a, c, g, or t
  misc_feature (153)..(153): n is a, c, g, or t
  misc_feature (163)..(163): n is a, c, g, or t
tngctttgggacggcggaagggtaggacatgggcataggtagcggaagggtacagccaatgccgaatgccagagaaggtcacatggatgaggagaatgaggattttgcgcccggctgctcangcagatnaccgtgaatctaacgaagatcgantcgccacatngtatcacaacgcctgtaccctgaacggtgacaggggacatgtgt

SEQ ID NO: 696420 - DNA, 825 bp, Homo sapiens
aatgtgacccgcgtagggcagatgcgcctgactagtcccttgatcgtgccctcacctgcggcccacctgacagagctatcgatagctagccctttatctacagatagaatgagaagaagcctacatggacatgtcctgtgtgtgacaagaaggctccctatgaatctcttatcattgatggtttatgcgagattcttagtccctgttcagattgtgagatccagtatcaatggaagataggatcctggtgcccaatgaaacccaagaaggagcgcatctagacggtaagacacaccgaccagggataataggagctggatggccaccagatacagaccaaaaccacagggggcagatccaaacaggagcaataagaacgaaggcacagaagtgacacggactagaccacctagacaaagcgactaccatcagcatcgcaggagcgatctagaacacacaaaccacacaacagcacaagaaacagaacacccaccagacctggcccataccccggtaacagaagacatgagaaacgcaaaagcgaagatccaaggcagaactcctggaccaaccaagaccaaacacctcgagaggcgcacaagagagcaccagtggcgcatggcgcaaccagtatgggataggaagcaacaaccctggatcaacagaataacaacgaaaaaacacgtgaacgataacccaacgagaggcggagaaacgaactagggaagaacagaaaaatcacgacgggaacatcaaaaatgaatagaacaaaagcaaatcgagaagaggaaaagatacacgacaacaatggacacccctcagaca

SEQ ID NO: 696421 - DNA, 853 bp, Homo sapiens
ggtttcatgaatgtattgatcaaaaccagctatactattaaataataacagaacaccctcttctaactagttacataatctttcctaaagacttcctccttgttttttcagtccacattcctgtaaatgtggcaggaataagaaaacccccagtttcccgctctcacctttgaggccccgacaaagacagaaagaaggagctatccaggagctgattctccttgcaaagttgtgctttgagaagatgcagtgtgcatttcagctacatcatgccggctgtgtaatatgtataaagactcaatctatccagagtattttatataatgtggatgagtcaggattgtaatgctgtggaagtttcatgggaacacattaatatgtagcacagtttaacaaagaagatgtcaggtgcacagccctttctgggttttttcttgtgttccctgtggttctgaccattaggctaaagagagaaaagagaagcccaactgatctcatgacagtccatcaagattgtggatgtgcgacaagattgagaaagttgacaagaatgtgtcctcaatctgtcaagggataagttataggtgacattcattgagattgtgagataaattctggaatctgtatgggaggtgatacaggactggccaaggtttggattatgttcttgtcactgtttgaacttcgcatgtgacaagtagagtctcggcatctttgaagggtcaggaggtaaggcgtcaaataaacattggaatggaggttttttaatgtggggtgcgattggatggctttgaacaaagatcttaaaccggtttggtaaagagatttgtacgggagaagacaaggctactta

SEQ ID NO: 696422 - DNA, 1236 bp, Homo sapiens
  misc_feature (77)..(77): n is a, c, g, or t
  misc_feature (79)..(79): n is a, c, g, or t
  misc_feature (124)..(124): n is a, c, g, or t
  misc_feature (127)..(127): n is a, c, g, or t
  misc_feature (154)..(155): n is a, c, g, or t
  misc_feature (166)..(166): n is a, c, g, or t
ggctcttccagaggcaagaccaaccaagatgagtgccctgggagctgtcattgccctcctgctctggggacagcttntngcagtggactcaggcaatgatgtcacggatatcgcagatgacggntgnccgaagccccccgagattgcacatggnntatgtggagcnctcggttcgctccagtgcttctagtagcgagtggctgaacagggagcaacttttcctccaatccatggacacatccgaccacacattcaccattccgcacacctgctcggaacatacacccaccatgtccccatcctctacagtacccggcgggcaccaccactcaaaccagttcattgaacaaataaagcatgcactacccaaggacaacatgactcaaaagctcacacaacgagccagcaccccgttgacaaccacatacacacgaactcccaccatgcctcccagcacatacaccaaccccaagcaaccattacataggcctggaacagccaacaaatcgggcgtcccacacagacacgaagcagaaacacacactgcctcgactctgcaaaacacccatcaactccagcatggcgagggtcagacgcacagtgcacaatcatcaccgccaacagcactccagcacgcacgcgacacgcacggagaccacggaacacacagcaccgacaccaacacacacacggacccaaccagcacaatcgccaatacaacccatcaacaacaaccaccaacacacacacacaccacacagccacacccccctcccgaccatacccagcgcgcccccagcacgcccccccaccccacgcgaacccacagcgagcgcgggcggcccccgcaagagcaagaaaccagcgcccaccacgcgagacacacaccgcaaccggcgagcagcgaaaagcgggagcgagacaaatgaccaaacaagaaaaaccgcaggcgacttaacaccagagagcgtacggcacacacaaacactgggacacgagagaccataagacgcaacaagaaacgacggcccgcaaccgagacccaacaaacgacacaggatcaaaggacaacaacaaaaagaggaaagacaaagacgaacgaaggaacaagcaggaccaacaagcggaagacaatgactacacacacggcaacagcacaagagacacaacagacggcgcatcaaccccgaacgacaagaacacagacgaaaccagacaaacggacgacgacaaaac

SEQ ID NO: 696423 - DNA, 302 bp, Homo sapiens
actaacttgtaggacagtatttttccatagcttcattaatgggtaaaggctataaaaaacagacaaattgttataaaaccctccgcaacgtgactgtactaggcaggtaattaggtttaaactggacattatattaacaataacaaggttggacaggcatggtgactcacgcttataattccagcacttaggccgaggcaaggtagatcacttaaagtcaggatgttcgagaccagcctggtcaacatggtgaaacccagtctctcccaaaaatactataattaaccaggtatggtgatggg

SEQ ID NO: 696424 - DNA, 995 bp, Homo sapiens
  misc_feature (77)..(77): n is a, c, g, or t
  misc_feature (79)..(79): n is a, c, g, or t
  misc_feature (124)..(124): n is a, c, g, or t
  misc_feature (127)..(127): n is a, c, g, or t
  misc_feature (154)..(155): n is a, c, g, or t
  misc_feature (166)..(166): n is a, c, g, or t
ggctcttccagaggcaagaccaaccaagatgagtgccctgggagctgtcattgccctcctgctctggggacagcttntngcagtggactcaggcaatgatgtcacggatatcgcagatgacggntgnccgaagccccccgagattgcacatggnntatgtggagcnctcggttgcgcattacccagttgtgatagaactacatacgaatcttggtgcacagaatacgagtaggatggagctgtacaccttgaatcgatgggaagcagtggataaataacggctgttggagataaaactttcctgaattgtgaatcgcatgtcactgtcggggactgcccatgcatatccggacacacacccgagtgcaagtcgggatccgtgggtaggacacctgggattgccgaagttggcgagcatttccctggcaaggctaggatggtttcccaatcatattctcacgcacaaggtgccaactgctgatcaatgaaccaatggctgttgagacacgggtaataaatctcttcctagaagccattctagaagaatgcaacggcagaaagacatgtgccctacgtgttaagactctatgtggggaagaaagcagcttgtaagagatagagaaggtgtgttctaaacccgtaattattctgcgaggtagatattgggctgcaatcaaactctaaagagaaggtgtctgtgaatgagagagtgatgcacattcgtgcttacctttcaaaggatttatcgcgagacagtcaggaccgtgtgggtcaatgtctctggctagggtgccggaaatggccaattgttacatttaactgaccattctgaagttatgtcatgcttggcatgtggttggaccaggaccaatggccttagggcctaatggaaggccggacagtccccgaaaagagaacaccagaagagagcctgaagggtgcgagccatcactgatgaaaaccctctctggctggctggcttacgtacaggaatc

SEQ ID NO: 696425 - DNA, 1245 bp, Homo sapiens
  misc_feature (264)..(264): n is a, c, g, or t
  misc_feature (365)..(365): n is a, c, g, or t
ggcgggattcaggatgccattgtgtaccgtggggagccgtggatgagaaggttagtgacccgctgctgtgcgtgaactgtttctcctgtgctggacccatgtagttcaacaacccagcagtaggccaataggactaagacgcttcacgctggaccatacatcgcaagggcctatggcattggatgggccaccttcatgtgacggtgacgaggtaatgactgagctacttgccatgttacatggatcagtgaacgatgatacaanacttcatatgtggaaaggccagtatgcgcggttgactgcaaaggcacatgcacgctcacataccaaaaatacctgtgtattgctatgggtgggcagaccantattgtgcgatatgttgcaagcctggggacccccctaggaagattttcgactggacgatatgctctcgcctttgtatttgcactagctctgtcagggcgtcccatattgcgcaggttctactccttcatgcaagatgctcccaagacattactgtcgcgcgaaacccctgcaagcagcttgcgtcaaactattcacaaatacggcgtttgacttggaccctttatactctacaagttatattcgccttttccattccatgaactgcctttccggggacgtgagcatagtccacatctcgacataggtctctaggagaatattcggaggcacgagcttgagcccatttcttgatttgagactcgcttactctaattctaactcgtgtgaattctatttattggcgctttctccagaggcaaagcggcaacttctcaaaaggggcgatttgaaagaccgccgcgatagagtctctccggagagcaagagacccggtaggccagacacgttatcccttggtggacaggaagcgcgtcgaagcagagaactcccccggtctgtcctttcgctccgaagagaggcctttgagagttccgggcccctcgcgtctaaatccagggggcgttgtatggttagacggattggaatatgggctaggccccattcacggtttctccaaataacgcccttttctttgttcgtttcccgccataaattcctcggtgggggtggcggtcactacggggtccaaatttgtggggggcggattcctttggggagggcctttttccccttcgccaaggcgccaattgtggtctatgttggcaccctttctcatttctccgttgggggtactccccggttttttgacactgagagccg

SEQ ID NO: 696426 - DNA, 122 bp, Homo sapiens
gagtcccagcccaagggtagctggaggcgcgcaggccggctccgctccggccccggacgatgcggcgcgcccagaatgccgtaagcctcgttggctgtggcggcgctcctcagcctccgttt

SEQ ID NO: 696427 - DNA, 218 bp, Homo sapiens
  misc_feature (164)..(164): n is a, c, g, or t
cgattatgctctagacggccaggcgtggtggcgtgtgcctgtagtccagctacttgggaggtgaggcaggagaatagcttgaacctgggaggtggaggctgcagtgagttgagactgcaccattgcactccagcctgggtgacaaagcaggactccgtctcaanaaaaaaaagaaaagattcatgattgctgctgctcccagaaaggtttgctgggat

SEQ ID NO: 696428 - DNA, 300 bp, Homo sapiens
tgttagtgctgcataaaagtgaggcgggggggaggaagggaaaataaatggcatctttccaagtactcatctaatttaatttgtcaaaagattgataggccatgaattacttctccatctcactaagtggttaaatgtgctgtgcaaccccccactggtctgtgtccccatgccaccgaatgtgagtgaccttgccctacaaccatggtgggaccaccttgtgcttgcagtcctggagtgggcttctagcatggaatgcacatcacccccacacactcttcccctgactctaccctgggt

SEQ ID NO: 696429 - DNA, 320 bp, Homo sapiens
  misc_feature (50)..(50): n is a, c, g, or t
  misc_feature (67)..(67): n is a, c, g, or t
caaggtcatgaccagcccctacagaaaggcccaatggtgaagaactgaangcttccggccaacagcncatgtgtatgacgttggaaacaaatcctccagtcccagtcaagtcttcagaggctgtagccctgagtgacagcttgactaaaacctcaggagagaccttgagtcagaaccactcagacaagctggtctccgattcctgaccctcagaaactgtggaagattacaaatgtttgttgtcttaagttactaagttttgtggcaatttgttatgtagcaatcgataactgagataaagaaaatagtcatggctaaaa

SEQ ID NO: 696430 - DNA, 131 bp, Homo sapiens
tacgcaggcgcgcctcaggaacgctggcggctgacgacgacttcgacacgacactgcttggacaccgggactgacggactgacaacactgttaccgacacacccaccacaccactactgtcacgcacgact

SEQ ID NO: 696431 - DNA, 425 bp, Homo sapiens
  misc_feature (34)..(34): n is a, c, g, or t
  misc_feature (42)..(42): n is a, c, g, or t
ccggggagaattaaaataattggcctgtatttanaagtaccnccataatccgaatataagtatatgcctatataagtgtccagcaaatcctttttttaattccttgttccatgctgtttttttccctttcctcccttcttcattagagtgttattgtatttttgtaccctgacaaacttgtattcattcttcaaaatgcatagtgtagaacacatggacacagggaggagaacatcacacacaaggcctgtcggggggtcgagggaaaggggagggagagcattaggacaaatacctaatgcatgcagggcttaaaacctaaatgacaggttgataggtgcaatgaaccaccatggcacatgtatacctatgtaacaagcctgcacgttcagcacatgtaacccaggacttgaagtaaaatttaa

SEQ ID NO: 696432 - DNA, 117 bp, Homo sapiens
cactcccaacagatcacacactctgattactgaccacaggactgatttgtgtgctactgctatttcttgggatatgcaactacatgagcttgaagtgagcttgcatatattttaaat

SEQ ID NO: 696433 - DNA, 564 bp, Homo sapiens
  misc_feature (117)..(117): n is a, c, g, or t
  misc_feature (294)..(294): n is a, c, g, or t
  misc_feature (296)..(296): n is a, c, g, or t
  misc_feature (307)..(307): n is a, c, g, or t
  misc_feature (309)..(309): n is a, c, g, or t
  misc_feature (323)..(323): n is a, c, g, or t
  misc_feature (332)..(332): n is a, c, g, or t
  misc_feature (335)..(335): n is a, c, g, or t
  misc_feature (337)..(337): n is a, c, g, or t
  misc_feature (341)..(341): n is a, c, g, or t
  misc_feature (351)..(351): n is a, c, g, or t
  misc_feature (359)..(359): n is a, c, g, or t
  misc_feature (363)..(363): n is a, c, g, or t
  misc_feature (365)..(365): n is a, c, g, or t
  misc_feature (367)..(369): n is a, c, g, or t
  misc_feature (374)..(374): n is a, c, g, or t
  misc_feature (378)..(378): n is a, c, g, or t
  misc_feature (384)..(384): n is a, c, g, or t
  misc_feature (387)..(387): n is a, c, g, or t
  misc_feature (390)..(390): n is a, c, g, or t
  misc_feature (394)..(394): n is a, c, g, or t
  misc_feature (398)..(399): n is a, c, g, or t
  misc_feature (405)..(405): n is a, c, g, or t
  misc_feature (414)..(414): n is a, c, g, or t
actgctctgtcaaaaggaaggttcttctctgttaggtgagtgcatacgtcataaaggagtttctgagaatgtttctgtctagtggttatgggaagatatttgctttttcaccgtagncctcagagcgctccaaatatccacttgcacatactacaaaaagagtgcttcaaagctgctctctgaaacggaatgttcaactctatgagttgaatgcaaacatcacaaagacgtttctgagaatgcttctgtctagatttgatatgaagatattcccgtttccaacgaaatcttcananctatccaaatntncacttgcagattcnacaaaaagngtntntcanaactgctctntcaaaagnaagntncnnntctgntagntgagtncanacntcanaaannagtttntgagaatgnttctgtctagtttttatttgaagatatttcctttctcaccatagacctgaaagctgtcctagtgttcacttccagatactacagaaagagtgtttcaaaactgctgtacgaaagggaatgttcaactctgtgacttgaatgcagacatca

SEQ ID NO: 696434 - DNA, 260 bp, Homo sapiens
ccggatacgagcactagtgctctggggtgggaagctatggcgtgaaacaagggactcagaggtaagaatggtcaggaaatgtgtgggcgtgtgtccaggcaacaactagatatgttgtcaggagttaattagagaggcagataatttggcaggaacagacagggttccagggttagaatatctaaacatttggtcagaaatagggagccaccaaaagttactgaatacaacaatggtcaatggtaatatatggggtgcca

SEQ ID NO: 696435 - DNA, 228 bp, Homo sapiens
ctgatatggtgtctcacggaaggattcctcctatacggaaccagaggtggcattggatagaatggaagcatccatccaggaggcaaaggttatgagcactagccatttaacacgaatgggcaccggccactttgggttatggtctagcagggagaatgagagaaaaaggatcttccaacgctgtcacataagcacccagctgcacacggcacaactcagccaggagcc

SEQ ID NO: 696436 - DNA, 636 bp, Homo sapiens
tgaaatcagacccacaacgggggagggggcggccacgtcaccttttctgtgagaacaggctacaagtacttactgcatcatatgtaacagaacaaattataaaaaccattgaactacccaaaggttttcaaggagtcggtccaagtagcaatgatgagacccttttatctgttgttgggagggctttccacacaagctttgcgccaataacagggcaagtctccgctgttctgaaaaagaaccctgctgtttaccttaacacatctaaacccctctgcaaagcttttattgtcacatatgaagacatcaggaaacaggaagagcgactacagtatgtacgcatgaaattgcaaaaagcactgatgccacacatcttgtcacgagctgctgattcagaatagatgtatattaaaatgcacagtggatattaaccctaagaatatgatcaggtaactttcaacgactttccccagagaaaattcctagaaattgaacaaaaatgtttccactggcttttgcctgaaaaaaaaaaatgtaccaaccacattagccttttaatagcactacccaaggcctttttaaataactttctaagtaaatacctataattcaaacattatgtttattttgaacccc

SEQ ID NO: 696437 - DNA, 463 bp, Homo sapiens
  misc_feature (15)..(15): n is a, c, g, or t
  misc_feature (32)..(32): n is a, c, g, or t
  misc_feature (45)..(45): n is a, c, g, or t
tctctgtaccccctnaaaaccctaagtacctntttcctcctcccnagggaaaaatcccgaaggtcctaaaacttgaccttttttgaggtccttcctcaaacttgacctacagttgtgcctcaataattgtccttgcctttcccagcttaattattttaaggaacaaatgaaaactctgggctgggtggagtggctcatacctgtaatcccagcactttgggaggctacggtgggcagatcatctgaggcccaggagttcgagacctgcctggccaacatggcaacaccccgtctctaataaaaatataaaaattagcctggcatggtagcatgcgcctatagtcccagctgctcaggaggctgaggcatgagaatcgcttgaacctaggaggtggaggttgcattcaactgagatcataccacttcattccagcctgggtgacagagcaagactcttactcaa

SEQ ID NO: 696438 - DNA, 480 bp, Homo sapiens
cagtccaacatccggggtttaacgccattctccggcctcagcctcctgagtagctgggactacaggcgtgtaccaccaggcccagctaatttttggcatttttagtagagatggggtttcgccacgtgggctgggctggtcttagaactcctgacctcaggtgatccgcccgcctcggcctcccaaagtgctgggattacaggcatgagccacggcacgtggcccctggaaagctttttaaaagaggactttaatggttactacttccattattaggaagcaatttctaaatatgaccaccatagatccaagaagggaggaataatatagtcaccaggctcaaattggagggtcttatttaagcacacagtgcttactttaaaatgaatctaattatttctagactctggccttttcatgcctgatagtatggccatggtccagggccttgtgatcgctgtcctagataacaggagtatc

SEQ ID NO: 696439 - DNA, 1006 bp, Homo sapiens
cgctctccggggctgagccggacgcgttgtcttgccccctccccccggttcgcggtccgcgtgtagttggcgccgtgcccggtgagagtgagcgtggtgtcgacggagggagatggccgggagcgccgggccagtaactgggagctgctgagagtcgccgagggcgcgccggggccagggtgccgggttgcccgtctgcccgctgcgccgcgtctttgctgcgccctgccgccttacgcgtgcggtctcccccctccccgagagaacactcacaggccgggcagtgatggtacctgtatgcgaggaaccagcagagacctcagtgatggctgtcaccgacccggagggggggacctcgccagccctttacccaggggggggtgattgttcacaggggcacttaaaggttttccattcgatagaaggtcaccccccaaggataggcggggagaaccaccaaggaccattgacaaagaatgccgaagaacgccccgagagaattcctttcacccaacaaaaattaaagagttgtttgcgggacgacatcctgataaggtccctggaaaagcaaattacgtgtttgacaaggcacaggtgtcacgaggtagagggggcaaaaaaatggttgcaatacctcacagagttaagacgagaagggggattgtgttggccgcccaggtatacttcttcgcagcagatgaaaaaatttcaagacaaacccgacaggtggctccttcaataaggtcaacaattcacagatttcttcgtaaattccaaaggcaaataaacacgaagggcaaaaactttcaagagtgagcctttatgagttcttgcagagatgaactggtcttgaggcatattaggcgtccttctgggacaccaggtctacttaccacttggcgcaccccggcagtttccccatgggggagaaccccacagcgtgggttttaaggagaacaggagcgaacaggagcgcaacagagatggtcggcacaagttcccacaa

SEQ ID NO: 696440 - DNA, 1008 bp, Homo sapiens
tgtgggttatctggcatccagtactcgttggttggtatataggggtctttatccggtgtgcgctgttgttttttcctctgttgtttccttttcacctgcgttctgtttctcgaaagttcgcttcaaatgagatacattggtgtcttggccatagctgtctctcatcgtccacgcgtgtttcgcctagctcgctttgtgttcttttcgctcaggcctgtgtattcttggtgggtcctctttgtccccttttggcggtgactctctggtggccttcatttataggacgcgactctatagccattttgttttgctatcctattgtcttggcagcgtttgtcttctccgcattgaatgcgcggttaaaatttctttgggcaattcacaaaacggcgctactcactttggattattgtactcaccatctgtgcctgagtatgtgtctccgttttttaagcctccccttgggtgcaaatctccgggacgcatgtcctccggccacacttttcgtctggcgcttcctgccatggcccgctttgtcgctactgtgtcctgcctggctcctcgattggctatggttctccggcgcgagacgttcctttcagacagtgcccgttcttgctcagcaatgaccttttgccgcggcctaatcatgcctggcacagctaccaccagttacaacgtatgccagcgccccaccttcgtttccacctctacaccaagcatgtaggccacgctcctctggtgattagtgtacacttgtggacgtcgacagaggagccttacaacacggcaggtattgctgccccaggcgggtcttatgaacatagtgcgctgcatcccaggaaacccgggaccatgcacccagcgctgggcagcggtggcaacaagtgatagaagagaggcagtgggaaaagcacgggtactatctacaaggcagccagccatgagcaccaggagacagaggacccagttgtaataaggcagctgggagaggatgggcagctccca

SEQ ID NO: 696441 - DNA, 1060 bp, Homo sapiens
cctgtagcagggcacggaaggctaagcaagggctgaactgctgcatgctcccgcctcgtgcgctcgacccacccggaccgccgcccgagcgctcgagaaagtcctctcgtgtagaatcagcgcctgttcccggggtgcagatccaggtttcaggtcctggactataagttcaccattggcatcaggcaatgctgcctgataagtatctctatgtggataacaaacttcatcaacaatcctgctggcccaggccgactgggctgccaagaagctggtatgggtgccttccagacaagagtggcttcgaggccagccagcctcaaggacgaggtgggcgacgaggccatcgtggagctggtggatgaatgggcagaaggtgaaggtgaacaatcgatgacatccagaagcatgcaacccgcccaagttctccaagagtggaggcacatggcagagctcacgtgcctcagcgaagcctcgcgtgctagcaccaaactacaaggagcgttactactcagaggctcatctacacctatacaggactgttcctgtgatgggtcatcaatccttacaagaacctgcccctctactctgcagagatcgtggcactgtacacgggcaagacaacggcccgagactgccccctcacatcatatgtccactcccagacaccgggccaacacggaggtcctgcttgccagaccctgtaatgaatccagccacacttagttgcacctggtgcactctggcagcgggccacgcagtagaacacctaaatcggtactacagagatcaggaggtaacgtggtgcactgcacaatacaacaaacacggcccacaaactcctctgacctcactcctacatcgaaccaccccaccacgaacacatacacaagcccacccagacccacaccaaacacacaacaccccacaacccccctctacccaaatcacgttcaaaccccctatacacaacagcaacatcacacttcgcgacaaccgccaccacacacccacatccaaacaacccacaacacccacaaaacacacaaagcgaccacaa

SEQ ID NO: 696442 - DNA, 228 bp, Homo sapiens
  misc_feature (1)..(1): n is a, c, g, or t
  misc_feature (89)..(89): n is a, c, g, or t
  misc_feature (106)..(106): n is a, c, g, or t
  misc_feature (123)..(123): n is a, c, g, or t
  misc_feature (168)..(168): n is a, c, g, or t
ngggtcttttccctcaatctagttgtgtctgagtcaggatctattcaaaataggtctcacatccaggaatatgtcttctgtagagcagncttacttgactatgctncagggaaaaagagcagnagcatctattaacatacatgtatgtgtgtgagagtgtgtgtaatnaaaaggggatcagagcccttcttgatataagtggagtacaataggcaactgtctccttaa

SEQ ID NO: 696443 - DNA, 252 bp, Homo sapiens
cggatcttagctctggtcaggagtcaagaccagcctgtccaacgtgtgaaaccctgtctgtactaaaaattaaaaaaaaaaaaaaaaattagcggggcgtggtggcagtcgccatgtagtcccagcaactccagaaggctgagaacagcgagaatcgctttgaaccccagaaggttggaggttgcagtagagctagagatggtgccactgcattaccagcctggggcagcacagagccgagactggctatct

SEQ ID NO: 696444 - DNA, 302 bp, Homo sapiens
  misc_feature (5)..(5): n is a, c, g, or t
tgaantgaccaatgacttgtcatgctgaaaggctgtgtggtgggaaccaatgatagcgggttgctcaccctccgcaagtccttgctggtgcatgacgaagcggcgggtctctggagtaagattgaccttaagtttcattgacaccacctccatagttttggccatggctcgcttcccagaccatggaggagaagaaagtcattcatgggactcactgaagaaagaccgaatgtgcaaaggaagaaggtagcttaatgccaggtaacagtatttgtgcagttggtggggtctcaataaaaagt

SEQ ID NO: 696445 - DNA, 228 bp, Homo sapiens
cctgaaagacaagcgagatttagcttggtaccgtgcggaagagagagacctgctccgtcttgcagaaatgcgagatttcttcatttatgggcttgaatgggacctgcttgttctttgagagggacgggatgtgtttgtccgctctgaagatgagccagatctgcctgttctttgaggggtgctagagagagagcttccacgtataactaagcttgtactgcgtgatct

SEQ ID NO: 696446 - DNA, 81 bp, Homo sapiens
  misc_feature (32)..(32): n is a, c, g, or t
ggtgtgcgggcgccagaggacccggcacatgntgcggcgacacttggtcactttgaagcagttactacagtcactgattac

SEQ ID NO: 696447 - DNA, 1047 bp, Homo sapiens
gtctacaggttgtttaataatcagtcacacaggagaactgcaggaactgcatgctgtatgtattgcttctatgcataccagcagcatggtctaagaaacttcgaaagtggaccatgtttgtggtaggtttaagcgcacattccagtataccagtaaagggcacatattaatcactgggttcatttggtacacatatcattcattccatatcagacccacgtgtcagtcagatcaagacacgtctatgggtaacagctggctttatgtgctggcctccaccactgtgtgttgcattttgggttgtcttctggttaaggcagcgagttgatgtcagactggcatttggcgagagagtggtggtacgcaggccaagctcaaagaaggtgggtaagttcgcaaaacaggtaaagggtttctttatataaagtggcagttattccaggttgttcaaagttgtcattaagaaacgtgggccatgggcccttttcaaaaaaagtaattcgtgggtaagaaggtaattagcgtgggtcaatctgggttggttggaggcgacagaaaggaaagcaagggtaacggttgtggccgttgagtaggcttgcgcaatttaccaataattgagtgttcaattggaaggctcagaaaaatatctgggtggcgtttgggtagaaagtgtataggtaccgtattactataatttgcgttttgggaaagacaatgggtatgacgagttaaatttaggccactggggtggggcggaataggacatggcgtattcttgggtaagaatggaaaggggggattatttggtagagaaccgtttggcgtgaggtggagtgaggtggcgaagcgagggcacttgaaatgcggtttcaagctcgtggacagcccgactgcacaaacacggcactggctggggcaacaacgtgggcttcggttacctcaacatacggcgaggacactcggggcacacctaacacaattggtgttgaccttcctggaaggaggggatacggcactacagccgttacgggtcacaatctagacccc

SEQ ID NO: 696448 - DNA, 496 bp, Homo sapiens
ccctcacgattacctcaagtgatccatctaccttggcctcccaaagtgctgggattacaggcatgagccactgtgcccagcctttttttttttgggtttcttttaatgaagcctgtaagtttcttgccatggcatctttcatttagcattatgttttcagggttcatccatgtttgtagtatgtatcagctactcatttttttttttttttttttggaaacggggtctcatttctgtggcccagggtgtgaatgtgcacgggcgcatatcatggctaccctttagcttaacctccggggcctcaacccaccctcccaccttcagttcccaagttagctggaattataggattgacccaccaatgcccacccagtttttgtgcttttggacagacaggttttcgcatgtcgcccaggctttgttaaaaccccggggctaaggggactcacctgcactgccccccaaagtttgggattacaggcattagcacccccaa

SEQ ID NO: 696449 - DNA, 388 bp, Homo sapiens
  misc_feature (17)..(17): n is a, c, g, or t
  misc_feature (129)..(129): n is a, c, g, or t
gccccctagtccttggnagaaggcagagcatccttatccttctgtacctatgtgacccctgagcccacgtcagacatccctctctgggcctccttaagaaaacaacccccaaggccgggcacctggtcncacgcctgtaatccccagcattttggaaggccaaggcgggcggatcgctggaggtcaggaattcgagaccagcctgaccgacatggtgaaaccctgtctctgctaaacatacaaaattagctgggtgtggtgcgaatgcctgtaatcctagctatttgggaggctgaggcaggagaatcgctcgaacctgggagatggaggttgcagtgagctgagatcatgccattgcactccagcctgggcgagaaactctgtctca

SEQ ID NO: 696450 - DNA, 290 bp, Homo sapiens
gtcttggacttctatgtagctgccagatgctgtctcctttgccttctccttggcttccttggctagtctcaacaagtgttttggaaggggctcgccattgaagcttagccaagatatattcaaaacccttcatagtcttggtcacgtatgctttatgaacctgggcaagaccataattccttggacatgctctggagcacaccacaataatgctagcaggagacccatggcttccctgttttggatttcatgtccagccacttgttagccagcccggaggaattccgcgg

SEQ ID NO: 696451 - DNA, 701 bp, Homo sapiens
aaagatcagagcctcctaagaaatatccagaagtcaagccatggatccacctgcacataaaaaaaaaaaaaaaaaaaaaaaaaaaaatgtgttggggggccttggggccccggaaaaagtttttaaaaaccatgcgtatgggggcggcgggggcaccacagatgaggctaagtggcaacatggggtcacaggcgcggtgtcccctgaggaagaatccgcgggccacctgaaccagagggctcgtgggaatttcccaccacagattaaaaaaaccgccgcgcggggtgaaaaaacgagcagcgagtctttcgtgaaacacaatatccgcaagagagaggggagttctccgagagagaggtcactatacaagcggggagtatatctctatcacacagagagggggagctcccaagaggcggcgagatcgctccaaaagatctatcaacaatatattataccgcgcgcccccgcgcgtccatgggggggggggcagacaaacaacgaggccaaaacgagaagaagcagcaaggaagacaacagccgaacgacgagacaaacacgaagaaaggacgaagcgaaagagcagcacgaagagaccagcagaagggaacgagcaagacaggaaagacaaccgatcagaaggacaacaaacaaaaaccaagcgaaggacagacaaaaagagacgagagaacgacagaagg

SEQ ID NO: 696452 - DNA, 448 bp, Homo sapiens
  misc_feature (25)..(25): n is a, c, g, or t
  misc_feature (97)..(97): n is a, c, g, or t
  misc_feature (192)..(192): n is a, c, g, or t
  misc_feature (194)..(194): n is a, c, g, or t
  misc_feature (196)..(197): n is a, c, g, or t
  misc_feature (205)..(206): n is a, c, g, or t
  misc_feature (210)..(212): n is a, c, g, or t
  misc_feature (214)..(214): n is a, c, g, or t
  misc_feature (220)..(222): n is a, c, g, or t
  misc_feature (224)..(224): n is a, c, g, or t
  misc_feature (226)..(228): n is a, c, g, or t
  misc_feature (232)..(234): n is a, c, g, or t
  misc_feature (236)..(236): n is a, c, g, or t
  misc_feature (240)..(241): n is a, c, g, or t
  misc_feature (243)..(243): n is a, c, g, or t
  misc_feature (245)..(250): n is a, c, g, or t
  misc_feature (252)..(252): n is a, c, g, or t
  misc_feature (259)..(259): n is a, c, g, or t
  misc_feature (261)..(262): n is a, c, g, or t
  misc_feature (268)..(268): n is a, c, g, or t
  misc_feature (271)..(273): n is a, c, g, or t
  misc_feature (277)..(277): n is a, c, g, or t
  misc_feature (280)..(280): n is a, c, g, or t
  misc_feature (283)..(283): n is a, c, g, or t
  misc_feature (286)..(289): n is a, c, g, or t
  misc_feature (292)..(295): n is a, c, g, or t
  misc_feature (302)..(302): n is a, c, g, or t
  misc_feature (313)..(313): n is a, c, g, or t
  misc_feature (318)..(319): n is a, c, g, or t
  misc_feature (321)..(324): n is a, c, g, or t
  misc_feature (329)..(330): n is a, c, g, or t
  misc_feature (333)..(335): n is a, c, g, or t
  misc_feature (337)..(338): n is a, c, g, or t
  misc_feature (397)..(398): n is a, c, g, or t
  misc_feature (400)..(400): n is a, c, g, or t
  misc_feature (426)..(426): n is a, c, g, or t
  misc_feature (428)..(428): n is a, c, g, or t
  misc_feature (433)..(433): n is a, c, g, or t
  misc_feature (436)..(438): n is a, c, g, or t
  misc_feature (442)..(442): n is a, c, g, or t
  misc_feature (446)..(446): n is a, c, g, or t
  misc_feature (448)..(448): n is a, c, g, or t
taaaatggtcagaagcacaacaaanaaggttaagaatttaaaagcatctaacattctgccctaatggcagcataattaatagcaacaaaaggccgtnttgctgcctgccgcagccggagggtatttttgcagacctgacgagcaaattttgtgaaaaatgtagtatgaaggaagaaagcttggcgggtctcnantnnagactttnnactnnnantctttnnnantnnnatannntncatnncntnnnnnnanacgtgantnntaaaangannntaanatntcntcnnnntannnnaaaaatnatataataatnaatcnntnnnnattcnnaannntnnatattttttccaataaagccaacaaattgcacaaaatctacactgcataaaaggtgggnncnaagaataccactggtgagactttttngnatagnagnnntaanaggntn

SEQ ID NO: 696453 - DNA, 230 bp, Homo sapiens
gcgtcgacgttcaaactccattcggagttcgactggatcaaacatacccaactgacccttgacgatctcaaaggcaaactgaatctgaaagcggacgaattgccggcctgggagacctggtcgtcaggggtcctggccgatgccaaggagcaactgaaaaaggacaacggcgaaggtgaaaaggacgccgccgccccgaaggcgctggttgaccagaccacgccggaaag

SEQ ID NO: 696454 - DNA, 120 bp, Homo sapiens
acatcatggtgtgtcgcactctcgatcttgggcattgccaggctcccacagttggcaatccgaatctgtcgatcaggtgcttgatctccttgtgccgatgctggcctgagcgctgtgact

SEQ ID NO: 696455 - DNA, 1118 bp, Homo sapiens
  misc_feature (160)..(160): n is a, c, g, or t
  misc_feature (228)..(228): n is a, c, g, or t
  misc_feature (244)..(244): n is a, c, g, or t
  misc_feature (258)..(258): n is a, c, g, or t
  misc_feature (993)..(993): n is a, c, g, or t
  misc_feature (1001)..(1001): n is a, c, g, or t
  misc_feature (1009)..(1009): n is a, c, g, or t
  misc_feature (1039)..(1039): n is a, c, g, or t
  misc_feature (1043)..(1043): n is a, c, g, or t
  misc_feature (1045)..(1045): n is a, c, g, or t
  misc_feature (1054)..(1054): n is a, c, g, or t
  misc_feature (1064)..(1064): n is a, c, g, or t
cttaagggggtgacagcccgtaggagggttgtctgggactacagcaccccggaaatcagctcttctctgaggagggcctcaagggggagcaagtgaagctaacagaggccttgaagaattcccagggtctggagaagcccctgcaggtggcatctgccancgtctctgcaggactatggctactgtaccccaaaccattattcgaagacactccctacatcctggaanctggagagtaccccanctcagaggcctggngcacatcggaccccagcgtgggctccctgaagcccatgagattgggctgcccaagtgtggagaagccaggggagcccagggctgtggtgtatgaggccccaggctttcagggccgcagctgggaagtgagccgagacatctacaaccttcagcagccagaggacagccagagcccccacctggcctctgtggggtccctgagagttctcggaggctgctgggtgggctacgagaaggagggcttccggggccaccagtatctgctggaggagggggaatacccagactggtcacactggggaggctatgacgagttgctgacctccctccgggtcatccggacggacttcggggacccggccgtcgtgctatttgaggccatggacttcgaggggcacggcgtggaggtgagcaaggcattgccggatgtggagctggtgcaacacggccccaacacacaggccatccacgtgctcagcggcgtgtcggggagcacgatctgcacttcgtctcaaagattcagcttttctcccgccccgactttctgggcgaccacttctctttcgaagatgaccaggccgctctgccgcctccttccgacctcagtcctgccgggtccacggcggcagctggatcctgtttgatgagacgaacttcgagggtgaccagcacaattctctctgagggcgagttccccatctcacggcatgggctgctcgctccacagtcctgggntctctccngaaggttncctgactttcagagccctcccattttcctngttngnctcgagtgntcgagggganggggatcgagctcgccgggagttgcggagcctgcaagcggggttcacacctggc

SEQ ID NO: 696456 - DNA, 343 bp, Homo sapiens
caagatcctccaacagacataaggctattagtggaccaacagtgaactctaaataatgtttgtaatttggttaatatagatgtacccatttttcagctttgataaacatacctaggttgtgtatgatggtaacatcgggaaagctgggggacaggaatacaggaactctctatgatatctttcagaacttttctgtaaatctaaaattatccccagaaaagtttaaaaagaaaacaaataaaagagaggattctagcttctctgtgatgattaaactgagtttgaggttcaagagtgaaagcagagagcccagtaggagctaggtctactggagtggtccaga

SEQ ID NO: 696457 - DNA, 1209 bp, Homo sapiens
  misc_feature (160)..(160): n is a, c, g, or t
  misc_feature (228)..(228): n is a, c, g, or t
  misc_feature (244)..(244): n is a, c, g, or t
  misc_feature (258)..(258): n is a, c, g, or t
  misc_feature (1084)..(1084): n is a, c, g, or t
  misc_feature (1092)..(1092): n is a, c, g, or t
  misc_feature (1100)..(1100): n is a, c, g, or t
  misc_feature (1130)..(1130): n is a, c, g, or t
  misc_feature (1134)..(1134): n is a, c, g, or t
  misc_feature (1136)..(1136): n is a, c, g, or t
  misc_feature (1145)..(1145): n is a, c, g, or t
  misc_feature (1155)..(1155): n is a, c, g, or t
cttaagggggtgacagcccgtaggagggttgtctgggactacagcaccccggaaatcagctcttctctgaggagggcctcaagggggagcaagtgaagctaacagaggccttgaagaattcccagggtctggagaagcccctgcaggtggcatctgccancgtctctgcaggactatggctactgtaccccaaaccattattcgaagacactccctacatcctggaanctggagagtaccccanctcagaggcctggngcacatcggaccccagcgtgggctccctgaagcccatgagattggctgtggtgtatgaggccccaggctttcagggccgcagctgggaagtgagccgagacatctacaaccttcagcagccagaggacagccagagcccccacctggcctctgtggggtccctgagagttctcggaggctgctgggtgggctacgagaaggagggcttccggggccaccagtatctgctggaggagggggaatacccagactggtcacactggggaggctatgacgagttgctgacctccctccgggtcatccggacggacttcggggacccggccgtcgtgctatttgaggccatggacttcgaggggcacggcgtggaggtgagcaaggcattgccggatgtggagctggtgcaacacggccccaacacacaggccatccacgtgctcagcggcgtgtgggtggcctaccaggaggtgggcttctccggggaacagtacgtgctggagaagggcgtgtatcgtaactgcgaggactggggcgctggcaacagcaccctcgcctcgctgcagccggtcctacaggtcggggagcacgatctgcacttcgtctcaaagattcagcttttctcccgccccgactttctgggcgaccacttctctttcgaagatgaccaggccgctctgccgcctccttccgacctcagtcctgccgggtccacggcggcagctggatcctgtttgatgagacgaacttcgagggtgaccagcacaattctctctgagggcgagttccccatctcacggcatgggctgctcgctccacagtcctgggntctctccngaaggttncctgactttcagagccctcccattttcctngttngnctcgagtgntcgagggganggggatcgagctcgccgggagttgcggagcctgcaagcggggttcacacctggc

SEQ ID NO: 696458 - DNA, 343 bp, Homo sapiens
  misc_feature (86)..(86): n is a, c, g, or t
ttttttttgaagcagagtctcactgtatctccacgctgggagttcagtggcacgaatgctgctcactgaagcctcaacctcctagngctcaagtgatcctcctgcctgagccttcccagtagctgggacctcaggaatgtaccaccacgccttgcaaatttttaaatttttctgtagagacagggtcttgccatgttgcccaggcttgtctagaactgggctcaagcaattcttttgcctcagcctaccaaagtgctgggattacaggcattagccaccgcacccagcctccagttggattttttaaagggaactttatactgttactcccaagaacatctca

SEQ ID NO: 696459 - DNA, 219 bp, Homo sapiens
gggatgggttctcactatattgtccaggctagagtgcagtggctattcacagatgcgaacatagtacactgcagcctccaactcctagcctcaagtgatcctcctgtctcaacctcccaagtaggattacaagcatgcgccgacgatgcccagaatccagaactttgtctatcactctccccaacaacctaaatgtgaaaacagaataaacttcaccca

SEQ ID NO: 696460 - DNA, 621 bp, Homo sapiens
agatacccacgtttctggtgggaggacagtcagattgcagtgggaggttggggtgagtgatgtctcacgggtggagacaagtgtaatactaccgcagtgggaggttggggtgagtgctgtctcactggtggagacaagtgtaatactaccgcagtgggaggttggggtgagtgctctctcacgggtggagacaagtgtaatactaccgcagtgggaggttggggtgagtgatcgctcacgggtggagacaagtgtaatactaccgcagtgggaggttggggtgagtgctgtctcacgggtggagacaagtggcactgggtgaatactgaatatgttagaagaagtgaaggtggtggaggcaggaggccctaccagaaaaaatttgcaactgcagagtggatgggcctgatgggcttaccagttgttagtcgtagcaccgcagccgcctaacagtccagatgggcctttggtgggttagaaaactctctataactaaagtaggtcttttaatccgcctccttctctgacagctccaacagaagcaggagtatgtaaaaagctccaaacctaccacctggaaactttttatgctgatactgagactattatactcccaacctc

SEQ ID NO: 696461 - DNA, 334 bp, Homo sapiens
  misc_feature (12)..(12): n is a, c, g, or t
  misc_feature (68)..(68): n is a, c, g, or t
  misc_feature (74)..(74): n is a, c, g, or t
  misc_feature (79)..(80): n is a, c, g, or t
  misc_feature (83)..(83): n is a, c, g, or t
  misc_feature (102)..(102): n is a, c, g, or t
  misc_feature (122)..(122): n is a, c, g, or t
  misc_feature (146)..(146): n is a, c, g, or t
  misc_feature (151)..(151): n is a, c, g, or t
  misc_feature (155)..(156): n is a, c, g, or t
  misc_feature (167)..(169): n is a, c, g, or t
  misc_feature (174)..(174): n is a, c, g, or t
  misc_feature (179)..(179): n is a, c, g, or t
  misc_feature (204)..(206): n is a, c, g, or t
actgacctttgngacccctgacccagcctctgcccaaaccatcaccggatcccaggctgagcccctgncctgancttcnnagnactcccccttcctgaagantgtgtggacccagaaacccnagggggcagtggagaagggcaggnctganggannagcctgtaaannncaggnccagnaacagccctaggagaaacctcggcnnnggccctcaatgggcctgcccagcccccactgggcccattctgagtgccaaagcctgggcttgggaggctgtcacttacctcaccctattaaaagcaatggacagtgcagggaggtgggaggacaaggt

SEQ ID NO: 696462 - DNA, 1620 bp, Homo sapiens
ggtgatgagcccttgggttctcgctccgactgctaaattcgcttggccgggtccaccttctcgtggcctcactcgccacacggatcagaatccggagcaggcagttctctctattctgaggctcctgcggctgccgcgctgacttccctgtgtgcgggagggaactctgggcaggctggttttcttggaatgtgtttacgatgttgaatgggacttgaacaggaagctggacgctgcagctggaactagcgtgccaagttatttatgattccatctgatatacataggagagaaactgatagaagaattctgatggcaactgtatgatagaagctatataaagtcaagtgtccattttctttcaactatatttgagcatacccaggatttaagtcgtggaactgaacatttatttggctgatcctcatcatgaaccgtgcttttagcaggaagaaagacaaaacatggatgcatacacctgaagctttatcaaaacatttcattccctataatgcaaagtttcttggcagtacagaagtggaacagccaaaaggaacagaagttgtgagagatgctgtaaggaaactaaagtttgcaagacatatcaagaaatctgaaggccagaaaattcctaaagtggagttgcaaatatcaatttatggagtaaaaattctagaacccaaaacaaaggaagttcaacacaattgccagcttcatagaatatctttttgtgcagatgataaaactgacaagaggatattcactttcatatgcaaagattctgagtcaaataaacatttgtgctatgtatttgacagcgaaaagtgtgtaagtatcccagatgttgtagggtggtttgttctgttttataagccaggaattgtcttgcttctggcattggcaaagtatttgaaaatgaataattttctgtaaattattctgtaaaaagtctgtaaatacttagctgtactaatagatttattttgtcatgagaatatgcttcaggatttcatctgtaactaaattctcatggtcatgagcataaacttacatgtaaatttcttttattagaatgccatgcctgcttatgttatgcatgtattttataataatttaatctattttacaattttaaactcaaatatgatttagtattatgcacataatacaaacagtagtggtgagcaaacgtgtgtttcccccacatgtgcagaatatgatggattttatgaaaataaatattcttaactccaggaaatatgatctatatggttccttaaaagattttccaatacactgaaaatttagttccttatgttcattgtataaaaatcttaggccaggcgcggtggctcacgcctgtaatcccagcacttcgggaggccgaggcgggcagatcatgaggtgaagagatcgagaccatcctgaccaaaatggtgaaactctgtctctactaaaaatacaaaaattagctgggtgtggtggtgtgtgccagtggtcccagctactagggaggctgaggcaggaaatcacttgaacctgggaggcagaggttgcagtgagccaagatcgcgccactgaattccagcctggcggcagagtgagactccatctcaagag

SEQ ID NO: 696463 - DNA, 549 bp, Homo sapiens
  misc_feature (67)..(67): n is a, c, g, or t
  misc_feature (102)..(102): n is a, c, g, or t
catgaagaggtcgatagcaaatgctacgtgcagacaagacagcagttctttgtggaatggatcccancatgtcaagacaaccgtttgtgacattcaccctcntggcctctaagattgcagtcaccttcattggcaatagcccagccattcaggagcttttcaagcgcatctcggagcagtttactcccatggtccgccggaaggccttcctcccctggtacacaggcgagggcatggaccagatggagttcccccaggcttaaaaccacattaacgaccttgttttttagtatcaacaggtccaggatgcccccccaaaaaaggaggaggatttcggttaggaggcccaaaaggaggcctaaggcaaagcccccctcccctcagggttttcagttcccttaaccgttttaatcaaatgcccctttcctttccctcaaaatttgggtttgccgcccccatcctggtttttgtttttttttttgggggggggtttaaaacagtgcctggcccatagtaggcgccccattaattcttgtttgtttaaaaaaa

SEQ ID NO: 696464 - DNA, 2785 bp, Homo sapiens
  misc_feature (877)..(877): n is a, c, g, or t
ataagaaccaaatatttattgagtattttctctgcgcctatcacaactctattttaactcctgtaaatgtgactgtgactccgtgagctagattatagaattcctgttgacagttataattggtaggcacagaaagcgtaaagatggagtttggaatggaatctggcctgtctgactctaagccctggatccactgtaatacattataactgctagctttgcaaaatgcctttttccttttctcatctattttcacactcaaactaaaatttagtaaactaaattctgagcagcagaaaaaattttagtaaaggtcctctcatccttgaagaacttcttatataaggatactccttcttgctccctttcccacgcagaactttaccaaaggtcagtaagaatgggctgttgtgttttctctcaaatcctatacagaagtccttaattccgaggtaaacatctgaatggaacaaatgagtatgatctgggggttaaggcaattttcaagtgtgtgtatgtgtgtgtctgttttaaggcataacaaagtccagagattaaggccgagttaaaaaacaaatgaggacaaaccaatgaggacaaaccagtccgctgaggtgcggccagagcagcagcaactgtgtctgctttcttgataaaggctgtgaagacggcacgttttactcttattcgtgtatttcttttgacactttacccctctatgaagcctcagaggtgttttaaaattgtgttaggaaacacacagagataagaaaaggcaaatggtcctgatctagtgtctcagggaagagtctggaaaggaaacgcggcgcgagtggggtgggagagggggcctgtggttttgcttctgtccgggctnaagactgagtaaggtagggcccctccttctgcggatgggtttctctctcattccaccctccacccacctccggttccgcgtgcacgcgcgagatagtccagtgggcccacagataacgaccatcagagattaaagaaggaaagtcagcgagcttgaacacaggcgtcccgtgtggaaatgtccaaggagaccgccagaagtgcgcaagccggagtcggctagagtttccttctcaccgagagggggagcccggcgttcccggccgggagcgacccggagtccccagccccgcgtcccagctgccgccagcgccagtttggattcggcggattaggaagaggagggaggggggagagagcgcgaagagggaggggaccgaagctggagggtcccgagtccagcgccgtgttggcgtagagaaactttccctctcggcctcggagacggcgccccggccgtgccggagtggagatcgccaggctcggaggaaccggcagctctccacgcccctgcccgaagcctgacccgactgcctctctcagtgagttatttatgattccatctgatatacataggagagaaactgatagaagaattctgatggcaactgtatgatagaagctatataaagtcaagtgtccattttctttcaactatatttgagcatacccaggatttaagtcgtggaactgaacatttatttggctgatcctcatcatgaaccgtgcttttagcaggaagaaagacaaaacatggatgcatacacctgaagctttatcaaaacatttcattccctataatgcaaagtttcttggcagtacagaagtggaacagccaaaaggaacagaagttgtgagagatgctgtaaggaaactaaagtttgcaagacatatcaagaaatctgaaggccagaaaattcctaaagtggagttgcaaatatcaatttatggagtaaaaattctagaacccaaaacaaaggaagttcaacacaattgccagcttcatagaatatctttttgtgcagatgataaaactgacaagaggatattcactttcatatgcaaagattctgagtcaaataaacatttgtgctatgtatttgacagcgaaaagtgtgtaagtatcccagatgttgtagggtggtttgttctgttttataagccaggaattgtcttgcttctggcattggcaaagtatttgaaaatgaataattttctgtaaattattctgtaaaaagtctgtaaatacttagctgtactaatagatttattttgtcatgagaatatgcttcaggatttcatctgtaactaaattctcatggtcatgagcataaacttacatgtaaatttcttttattagaatgccatgcctgcttatgttatgcatgtattttataataatttaatctattttacaattttaaactcaaatatgatttagtattatgcacataatacaaacagtagtggtgagcaaacgtgtgtttcccccacatgtgcagaatatgatggattttatgaaaataaatattcttaactccaggaaatatgatctatatggttccttaaaagattttccaatacactgaaaatttagttccttatgttcattgtataaaaatcttaggccaggcgcggtggctcacgcctgtaatcccagcacttcgggaggccgaggcgggcagatcatgaggtgaagagatcgagaccatcctgaccaaaatggtgaaactctgtctctactaaaaatacaaaaattagctgggtgtggtggtgtgtgccagtggtcccagctactagggaggctgaggcaggaaatcacttgaacctgggaggcagaggttgcagtgagccaagatcgcgccactgaattccagcctggcggcagagtgagactccatctcaagag

SEQ ID NO: 696465 - DNA, 177 bp, Homo sapiens
ggcccggacaatcatttacacgattgctacagtatattatttacgtgtctagttctcagaaagaaaaaaaagagacatgaaaatgcaacataaatgtagagacacacacacacagggccgggcctggtggctcacgcctgtaatcccaggactttgggagtctgaaggcagtctgga

SEQ ID NO: 696466 - DNA, 1689 bp, Homo sapiens
ggtgatgagcccttgggttctcgctccgactgctaaattcgcttggccgggtccaccttctcgtggcctcactcgccacacggatcagaatccggagcaggcagttctctctattctgaggctcctgcggctgccgcgctgacttccctgtgtgcgggagggaactctgggcaggctggttttcttggaatgtgtttacgatgttgaatgggacttgaacaggaagctggacgctgcagctggaactagcgtgccaaggtagagtaaggaagacttagctggtgttgggcttggcgggtccacttggtacgctgggcaaactccaagttatttatgattccatctgatatacataggagagaaactgatagaagaattctgatggcaactgtatgatagaagctatataaagtcaagtgtccattttctttcaactatatttgagcatacccaggatttaagtcgtggaactgaacatttatttggctgatcctcatcatgaaccgtgcttttagcaggaagaaagacaaaacatggatgcatacacctgaagctttatcaaaacatttcattccctataatgcaaagtttcttggcagtacagaagtggaacagccaaaaggaacagaagttgtgagagatgctgtaaggaaactaaagtttgcaagacatatcaagaaatctgaaggccagaaaattcctaaagtggagttgcaaatatcaatttatggagtaaaaattctagaacccaaaacaaaggaagttcaacacaattgccagcttcatagaatatctttttgtgcagatgataaaactgacaagaggatattcactttcatatgcaaagattctgagtcaaataaacatttgtgctatgtatttgacagcgaaaagtgtgtaagtatcccagatgttgtagggtggtttgttctgttttataagccaggaattgtcttgcttctggcattggcaaagtatttgaaaatgaataattttctgtaaattattctgtaaaaagtctgtaaatacttagctgtactaatagatttattttgtcatgagaatatgcttcaggatttcatctgtaactaaattctcatggtcatgagcataaacttacatgtaaatttcttttattagaatgccatgcctgcttatgttatgcatgtattttataataatttaatctattttacaattttaaactcaaatatgatttagtattatgcacataatacaaacagtagtggtgagcaaacgtgtgtttcccccacatgtgcagaatatgatggattttatgaaaataaatattcttaactccaggaaatatgatctatatggttccttaaaagattttccaatacactgaaaatttagttccttatgttcattgtataaaaatcttaggccaggcgcggtggctcacgcctgtaatcccagcacttcgggaggccgaggcgggcagatcatgaggtgaagagatcgagaccatcctgaccaaaatggtgaaactctgtctctactaaaaatacaaaaattagctgggtgtggtggtgtgtgccagtggtcccagctactagggaggctgaggcaggaaatcacttgaacctgggaggcagaggttgcagtgagccaagatcgcgccactgaattccagcctggcggcagagtgagactccatctcaagag

SEQ ID NO: 696467 - DNA, 2944 bp, Homo sapiens
  misc_feature (877)..(877): n is a, c, g, or t
ataagaaccaaatatttattgagtattttctctgcgcctatcacaactctattttaactcctgtaaatgtgactgtgactccgtgagctagattatagaattcctgttgacagttataattggtaggcacagaaagcgtaaagatggagtttggaatggaatctggcctgtctgactctaagccctggatccactgtaatacattataactgctagctttgcaaaatgcctttttccttttctcatctattttcacactcaaactaaaatttagtaaactaaattctgagcagcagaaaaaattttagtaaaggtcctctcatccttgaagaacttcttatataaggatactccttcttgctccctttcccacgcagaactttaccaaaggtcagtaagaatgggctgttgtgttttctctcaaatcctatacagaagtccttaattccgaggtaaacatctgaatggaacaaatgagtatgatctgggggttaaggcaattttcaagtgtgtgtatgtgtgtgtctgttttaaggcataacaaagtccagagattaaggccgagttaaaaaacaaatgaggacaaaccaatgaggacaaaccagtccgctgaggtgcggccagagcagcagcaactgtgtctgctttcttgataaaggctgtgaagacggcacgttttactcttattcgtgtatttcttttgacactttacccctctatgaagcctcagaggtgttttaaaattgtgttaggaaacacacagagataagaaaaggcaaatggtcctgatctagtgtctcagggaagagtctggaaaggaaacgcggcgcgagtggggtgggagagggggcctgtggttttgcttctgtccgggctnaagactgagtaaggtagggcccctccttctgcggatgggtttctctctcattccaccctccacccacctccggttccgcgtgcacgcgcgagatagtccagtgggcccacagataacgaccatcagagattaaagaaggaaagtcagcgagcttgaacacaggcgtcccgtgtggaaatgtccaaggagaccgccagaagtgcgcaagccggagtcggctagagtttccttctcaccgagagggggagcccggcgttcccggccgggagcgacccggagtccccagccccgcgtcccagctgccgccagcgccagtttggattcggcggattaggaagaggagggaggggggagagagcgcgaagagggaggggaccgaagctggagggtcccgagtccagcgccgtgttggcgtagagaaactttccctctcggcctcggagacggcgccccggccgtgccggagtggagatcgccaggctcggaggaaccggcagctctccacgcccctgcccgaagcctgacccgactgcctctctcagtgagttatttatgattccatctgatatacataggagagaaactgatagaagaattctgatggcaactgtatgatagaagctatataaagtcaagtgtccattttctttcaactatatttgagcatacccaggatttaagtcgtggaactgaacatttatttggctgatcctcatcatgaaccgtgcttttagcaggaagaaagacaaaacatggatgcatacacctgaagctttatcaaaacatttcattccctataatgcaaagagtacgtaggagagatgagaatgaagaggaaaggattgttaagagaagtaaaatgtggcagaaaacaccaagattttggaaataatttagatgtgaacacagaaattgatgttatcaatggattatgtggttgcttttcaaatattgattaggaaaatgtttcttggcagtacagaagtggaacagccaaaaggaacagaagttgtgagagatgctgtaaggaaactaaagtttgcaagacatatcaagaaatctgaaggccagaaaattcctaaagtggagttgcaaatatcaatttatggagtaaaaattctagaacccaaaacaaaggaagttcaacacaattgccagcttcatagaatatctttttgtgcagatgataaaactgacaagaggatattcactttcatatgcaaagattctgagtcaaataaacatttgtgctatgtatttgacagcgaaaagtgtgtaagtatcccagatgttgtagggtggtttgttctgttttataagccaggaattgtcttgcttctggcattggcaaagtatttgaaaatgaataattttctgtaaattattctgtaaaaagtctgtaaatacttagctgtactaatagatttattttgtcatgagaatatgcttcaggatttcatctgtaactaaattctcatggtcatgagcataaacttacatgtaaatttcttttattagaatgccatgcctgcttatgttatgcatgtattttataataatttaatctattttacaattttaaactcaaatatgatttagtattatgcacataatacaaacagtagtggtgagcaaacgtgtgtttcccccacatgtgcagaatatgatggattttatgaaaataaatattcttaactccaggaaatatgatctatatggttccttaaaagattttccaatacactgaaaatttagttccttatgttcattgtataaaaatcttaggccaggcgcggtggctcacgcctgtaatcccagcacttcgggaggccgaggcgggcagatcatgaggtgaagagatcgagaccatcctgaccaaaatggtgaaactctgtctctactaaaaatacaaaaattagctgggtgtggtggtgtgtgccagtggtcccagctactagggaggctgaggcaggaaatcacttgaacctgggaggcagaggttgcagtgagccaagatcgcgccactgaattccagcctggcggcagagtgagactccatctcaagag

SEQ ID NO: 696468 - DNA, 2903 bp, Homo sapiens
  misc_feature (877)..(877): n is a, c, g, or t
ataagaaccaaatatttattgagtattttctctgcgcctatcacaactctattttaactcctgtaaatgtgactgtgactccgtgagctagattatagaattcctgttgacagttataattggtaggcacagaaagcgtaaagatggagtttggaatggaatctggcctgtctgactctaagccctggatccactgtaatacattataactgctagctttgcaaaatgcctttttccttttctcatctattttcacactcaaactaaaatttagtaaactaaattctgagcagcagaaaaaattttagtaaaggtcctctcatccttgaagaacttcttatataaggatactccttcttgctccctttcccacgcagaactttaccaaaggtcagtaagaatgggctgttgtgttttctctcaaatcctatacagaagtccttaattccgaggtaaacatctgaatggaacaaatgagtatgatctgggggttaaggcaattttcaagtgtgtgtatgtgtgtgtctgttttaaggcataacaaagtccagagattaaggccgagttaaaaaacaaatgaggacaaaccaatgaggacaaaccagtccgctgaggtgcggccagagcagcagcaactgtgtctgctttcttgataaaggctgtgaagacggcacgttttactcttattcgtgtatttcttttgacactttacccctctatgaagcctcagaggtgttttaaaattgtgttaggaaacacacagagataagaaaaggcaaatggtcctgatctagtgtctcagggaagagtctggaaaggaaacgcggcgcgagtggggtgggagagggggcctgtggttttgcttctgtccgggctnaagactgagtaaggtagggcccctccttctgcggatgggtttctctctcattccaccctccacccacctccggttccgcgtgcacgcgcgagatagtccagtgggcccacagataacgaccatcagagattaaagaaggaaagtcagcgagcttgaacacaggcgtcccgtgtggaaatgtccaaggagaccgccagaagtgcgcaagccggagtcggctagagtttccttctcaccgagagggggagcccggcgttcccggccgggagcgacccggagtccccagccccgcgtcccagctgccgccagcgccagtttggattcggcggattaggaagaggagggaggggggagagagcgcgaagagggaggggaccgaagctggagggtcccgagtccagcgccgtgttggcgtagagaaactttccctctcggcctcggagacggcgccccggccgtgccggagtggagatcgccaggctcggaggaaccggcagctctccacgcccctgcccgaagcctgacccgactgcctctctcagtgagttatttatgattccatctgatatacataggagagaaactgatagaagaattctgatggcaactgtatgatagaagctatataaagtcaagtgtccattttctttcaactatatttgagcatacccagagtcttgctctgtcgcccaggctggagtgcaatggcacgatctcggttcactgccacctccgcctcccgggttcaagcaattctcctgcctcaacctcctgagtagctgggattacaggatttaagtcgtggaactgaacatttatttggctgatcctcatcatgaaccgtgcttttagcaggaagaaagacaaaacatggatgcatacacctgaagctttatcaaaacatttcattccctataatgcaaagtttcttggcagtacagaagtggaacagccaaaaggaacagaagttgtgagagatgctgtaaggaaactaaagtttgcaagacatatcaagaaatctgaaggccagaaaattcctaaagtggagttgcaaatatcaatttatggagtaaaaattctagaacccaaaacaaaggaagttcaacacaattgccagcttcatagaatatctttttgtgcagatgataaaactgacaagaggatattcactttcatatgcaaagattctgagtcaaataaacatttgtgctatgtatttgacagcgaaaagtgtgtaagtatcccagatgttgtagggtggtttgttctgttttataagccaggaattgtcttgcttctggcattggcaaagtatttgaaaatgaataattttctgtaaattattctgtaaaaagtctgtaaatacttagctgtactaatagatttattttgtcatgagaatatgcttcaggatttcatctgtaactaaattctcatggtcatgagcataaacttacatgtaaatttcttttattagaatgccatgcctgcttatgttatgcatgtattttataataatttaatctattttacaattttaaactcaaatatgatttagtattatgcacataatacaaacagtagtggtgagcaaacgtgtgtttcccccacatgtgcagaatatgatggattttatgaaaataaatattcttaactccaggaaatatgatctatatggttccttaaaagattttccaatacactgaaaatttagttccttatgttcattgtataaaaatcttaggccaggcgcggtggctcacgcctgtaatcccagcacttcgggaggccgaggcgggcagatcatgaggtgaagagatcgagaccatcctgaccaaaatggtgaaactctgtctctactaaaaatacaaaaattagctgggtgtggtggtgtgtgccagtggtcccagctactagggaggctgaggcaggaaatcacttgaacctgggaggcagaggttgcagtgagccaagatcgcgccactgaattccagcctggcggcagagtgagactccatctcaagag

SEQ ID NO: 696469 - DNA, 3030 bp, Homo sapiens
  misc_feature (877)..(877): n is a, c, g, or t
  misc_feature (1485)..(1485): n is a, c, g, or t
  misc_feature (1504)..(1504): n is a, c, g, or t
  misc_feature (1518)..(1518): n is a, c, g, or t
ataagaaccaaatatttattgagtattttctctgcgcctatcacaactctattttaactcctgtaaatgtgactgtgactccgtgagctagattatagaattcctgttgacagttataattggtaggcacagaaagcgtaaagatggagtttggaatggaatctggcctgtctgactctaagccctggatccactgtaatacattataactgctagctttgcaaaatgcctttttccttttctcatctattttcacactcaaactaaaatttagtaaactaaattctgagcagcagaaaaaattttagtaaaggtcctctcatccttgaagaacttcttatataaggatactccttcttgctccctttcccacgcagaactttaccaaaggtcagtaagaatgggctgttgtgttttctctcaaatcctatacagaagtccttaattccgaggtaaacatctgaatggaacaaatgagtatgatctgggggttaaggcaattttcaagtgtgtgtatgtgtgtgtctgttttaaggcataacaaagtccagagattaaggccgagttaaaaaacaaatgaggacaaaccaatgaggacaaaccagtccgctgaggtgcggccagagcagcagcaactgtgtctgctttcttgataaaggctgtgaagacggcacgttttactcttattcgtgtatttcttttgacactttacccctctatgaagcctcagaggtgttttaaaattgtgttaggaaacacacagagataagaaaaggcaaatggtcctgatctagtgtctcagggaagagtctggaaaggaaacgcggcgcgagtggggtgggagagggggcctgtggttttgcttctgtccgggctnaagactgagtaaggtagggcccctccttctgcggatgggtttctctctcattccaccctccacccacctccggttccgcgtgcacgcgcgagatagtccagtgggcccacagataacgaccatcagagattaaagaaggaaagtcagcgagcttgaacacaggcgtcccgtgtggaaatgtccaaggagaccgccagaagtgcgcaagccggagtcggctagagtttccttctcaccgagagggggagcccggcgttcccggccgggagcgacccggagtccccagccccgcgtcccagctgccgccagcgccagtttggattcggcggattaggaagaggagggaggggggagagagcgcgaagagggaggggaccgaagctggagggtcccgagtccagcgccgtgttggcgtagagaaactttccctctcggcctcggagacggcgccccggccgtgccggagtggagatcgccaggctcggaggaaccggcagctctccacgcccctgcccgaagcctgacccgactgcctctctcagtgaggaggaaatggagagcctactgggatatggatgtctgacaacttaggacaagtggttctcaantctggctacacattgaaancacctgaaaagctnttttaaaattcagacttctgggtctatagcagttatttatgattccatctgatatacataggagagaaactgatagaagaattctgatggcaactgtatgatagaagctatataaagtcaagtgtccattttctttcaactatatttgagcatacccagagtcttgctctgtcgcccaggctggagtgcaatggcacgatctcggttcactgccacctccgcctcccgggttcaagcaattctcctgcctcaacctcctgagtagctgggattacaggatttaagtcgtggaactgaacatttatttggctgatcctcatcatgaaccgtgcttttagcaggaagaaagacaaaacatggatgcatacacctgaagctttatcaaaacatttcattccctataatgcaaagtttcttggcagtacagaagtggaacagccaaaaggaacagaagttgtgagagatgctgtaaggaaactaaagtttgcaagacatatcaagaaatctgaaggccagaaaattcctaaagtggagttgcaaatatcaatttatggagtaaaaattctagaacccaaaacaaaggaagttcaacacaattgccagcttcatagaatatctttttgtgcagatgataaaactgacaagaggatattcactttcatatgcaaagattctgagtcaaataaacatttgtgctatgtatttgacagcgaaaagtgtgtaagtatcccagatgttgtagggtggtttgttctgttttataagccaggaattgtcttgcttctggcattggcaaagtatttgaaaatgaataattttctgtaaattattctgtaaaaagtctgtaaatacttagctgtactaatagatttattttgtcatgagaatatgcttcaggatttcatctgtaactaaattctcatggtcatgagcataaacttacatgtaaatttcttttattagaatgccatgcctgcttatgttatgcatgtattttataataatttaatctattttacaattttaaactcaaatatgatttagtattatgcacataatacaaacagtagtggtgagcaaacgtgtgtttcccccacatgtgcagaatatgatggattttatgaaaataaatattcttaactccaggaaatatgatctatatggttccttaaaagattttccaatacactgaaaatttagttccttatgttcattgtataaaaatcttaggccaggcgcggtggctcacgcctgtaatcccagcacttcgggaggccgaggcgggcagatcatgaggtgaagagatcgagaccatcctgaccaaaatggtgaaactctgtctctactaaaaatacaaaaattagctgggtgtggtggtgtgtgccagtggtcccagctactagggaggctgaggcaggaaatcacttgaacctgggaggcagaggttgcagtgagccaagatcgcgccactgaattccagcctggcggcagagtgagactccatctcaagag

SEQ ID NO: 696470 - DNA, 354 bp, Homo sapiens
cagggccccttattttgcctcgatgggatttgagagatagtctctgcgagatctatctcgttcatatacatggtagtgttagttcttcaggagggagaagtccagctatgtaaggtgctagtggggcttataacagtggatctgttgtttaaaaattagtactttgctcctaaaatttttacctaaatgttacatccaacaacagataaaagtaattcgcacagtagcatctgctttattcatttcatatttccagtgcctgcacatattgcttggcatatagtaatttagtggatgtgtttgatgaatgaatgagtaaaaattattttacatgttaaaataaaactttgaata

SEQ ID NO: 696471 - DNA, 1865 bp, Homo sapiens
  misc_feature (320)..(320): n is a, c, g, or t
  misc_feature (339)..(339): n is a, c, g, or t
  misc_feature (353)..(353): n is a, c, g, or t
ggtgatgagcccttgggttctcgctccgactgctaaattcgcttggccgggtccaccttctcgtggcctcactcgccacacggatcagaatccggagcaggcagttctctctattctgaggctcctgcggctgccgcgctgacttccctgtgtgcgggagggaactctgggcaggctggttttcttggaatgtgtttacgatgttgaatgggacttgaacaggaagctggacgctgcagctggaactagcgtgccaaggaggaaatggagagcctactgggatatggatgtctgacaacttaggacaagtggttctcaantctggctacacattgaaancacctgaaaagctnttttaaaattcagacttctgggtctatagcagttatttatgattccatctgatatacataggagagaaactgatagaagaattctgatggcaactgtatgatagaagctatataaagtcaagtgtccattttctttcaactatatttgagcatacccagagtcttgctctgtcgcccaggctggagtgcaatggcacgatctcggttcactgccacctccgcctcccgggttcaagcaattctcctgcctcaacctcctgagtagctgggattacaggatttaagtcgtggaactgaacatttatttggctgatcctcatcatgaaccgtgcttttagcaggaagaaagacaaaacatggatgcatacacctgaagctttatcaaaacatttcattccctataatgcaaagtttcttggcagtacagaagtggaacagccaaaaggaacagaagttgtgagagatgctgtaaggaaactaaagtttgcaagacatatcaagaaatctgaaggccagaaaattcctaaagtggagttgcaaatatcaatttatggagtaaaaattctagaacccaaaacaaaggaagttcaacacaattgccagcttcatagaatatctttttgtgcagatgataaaactgacaagaggatattcactttcatatgcaaagattctgagtcaaataaacatttgtgctatgtatttgacagcgaaaagtgtgtaagtatcccagatgttgtagggtggtttgttctgttttataagccaggaattgtcttgcttctggcattggcaaagtatttgaaaatgaataattttctgtaaattattctgtaaaaagtctgtaaatacttagctgtactaatagatttattttgtcatgagaatatgcttcaggatttcatctgtaactaaattctcatggtcatgagcataaacttacatgtaaatttcttttattagaatgccatgcctgcttatgttatgcatgtattttataataatttaatctattttacaattttaaactcaaatatgatttagtattatgcacataatacaaacagtagtggtgagcaaacgtgtgtttcccccacatgtgcagaatatgatggattttatgaaaataaatattcttaactccaggaaatatgatctatatggttccttaaaagattttccaatacactgaaaatttagttccttatgttcattgtataaaaatcttaggccaggcgcggtggctcacgcctgtaatcccagcacttcgggaggccgaggcgggcagatcatgaggtgaagagatcgagaccatcctgaccaaaatggtgaaactctgtctctactaaaaatacaaaaattagctgggtgtggtggtgtgtgccagtggtcccagctactagggaggctgaggcaggaaatcacttgaacctgggaggcagaggttgcagtgagccaagatcgcgccactgaattccagcctggcggcagagtgagactccatctcaagag

SEQ ID NO: 696472 - DNA, 910 bp, Homo sapiens
  misc_feature (11)..(11): n is a, c, g, or t
atattcatgtnccatgactccctcgccgtcgggggttcactatgtggtcatttcctactggctttgatgcacgcctcgctggcggcctatttgtttaaaaacctttcagcgcataattcttcccggcgcttaacaaatacaatttcgtgtttggcgcccccgtattcttttattagtgtctaaagcccgagtttgccgtgaaaataagacgttccggaccaaagcggccccatgtgcatacggccctgcaccagtgtgtaatgacatgcccaaatcaccgctgctgtagtacgaacccaattctctccaccgaatacgccccgcctgcagaagtacaaaaggaggggatccaccaaggactcgacccaattgataagccccggcgcagacaagtatgctacgttaatgtaatctgccccgttctgtggcatatattaactttatacaaagacgcacaaatagacccactgttccttccaacaccccctacatacgcagtgcgacagttttaacacccggagatacccgcctgtataatatagaataggttcatatctcgcggagtggacaagattcattatgaatttcccccggcggtggaacacatctacacatctcaaggaagactgtccccggtatgagcgaaataaatcccagcgtcccacattgcgtagggatctcgtcgacttgctcccatgacagtatttgtattgagcgcccccaccacctctgtctttatgacagccagcaggctttatcccatgccgtcctctctgtaaaaaaatcatgcaatatccgtggtgttcatttgataaaaaaaggccccgccgtatcatgggaaaaatcacagattttcgatggggcacaaaactccctttttcggcacaaaaaaaacccccttccacataca

SEQ ID NO: 696473 - DNA, 939 bp, Homo sapiens
  misc_feature (462)..(462): n is a, c, g, or t
  misc_feature (517)..(517): n is a, c, g, or t
gccgtcccgatgcccgcgcatcccgctcgtccgtgcccgccggcgctatgtccggggccggtctagccgcggtggtgagctgcctgcgcccggcgatgccgtgtcgaggatccgcagacccagtgagacgcttactattcttgttatagactcatcctagactgatcgcaggttgctcggctataccttctttattggtgctaagaccctcgcatcttgctgctgctcttgaatgatgccttgagtttgcgttctccctgacttgttcttgggcacactcaataagcaagaaagattcctctagccgtgcaccatgctactacgttatgcgcgatgagctgggctacgattgttgctacaagaggttctagcatccgtcagagatgtggtattatctgggataggcatacgaagacatgacattctgctcaccagtaggttagccatcagcctgggctgagnctgttgcagtgtgataggtagcactgctagagcagctcttagtgaatcacaaggncagtgcagccgcatgcaacggagaacgaaaggactgcacatacggattctgtgcttgttagactgaaatcaagcaaccgagcttcgcatacgagtagaagcgcccattcaagcgacgagacttgcgacatgcagaacgcgcgaagactgcacatgtacatcacaattaggggcagacatagtgttggctagttggcagaccgatttcaagccattattcatagagtcacttcgcaatattaccaggaaaatcacaatagatgatctccatctagatacatgttggcgtgcaagtataagtgcacagcgcaacttcatacagcgaacatagctcatgtgaaaagtgggccgcataggtacagcatgttgtaaccgtcaacatcagttcaaccattttatgtgcaatctagacggacaagtaac

SEQ ID NO: 696474 - DNA, 323 bp, Homo sapiens
aaaggttggagagagagaggttggagagactggaacgggagaggcaagaaagggagcgagcgaagagcagttagaaagggaacagctggaatgggagagagagcgcgagaatatcaagtgctggtaacgacagtttacaaactcttctgtgttcttgtatctgagcttggatgatgtctcttgtgcagtccatgtgttaaacatatttcacatttgacgatgttatggcgattgaagtccattacagatttggacaattcatgtaatatagatatgacagcaagttactactttgataataaacatataatagaagagggcga

SEQ ID NO: 696475 - DNA, 325 bp, Homo sapiens
gtccaatttgcccccttcccctaaaaaaggcccgggtttagtggggggggccttccccctgccccccctttccccccaaagggccccctgtcatttttggccgggagagtgaccccctgggggggcaaattgccagctcccccgggtttgtgcaggattttttgggttgaaaacccctctcaaattgtttttggggtgggggtggggccgggcctttcctggacccccctttttggttggtttgcccccctggcccatcccgttttttgggttcccccccgggtttttcccaaagggaccccccccgtaaggcctttgccccaga

SEQ ID NO: 696476 - DNA, 239 bp, Homo sapiens
aacactgcgatttcacttggtatagcacggctcaaagactcgggcatgcaaatacatgattcgtttcccacattacggtgcacaaaatcgagcggagagagcctgtgggaaggggctagccgcggggcctgggtgcttggatttttttttttcccgcgggtccccgggagcgaagggacggagatgcaacctttacgaaggtcttcctcctccccctccctcccagtgacaatcccacg

SEQ ID NO: 696477 - DNA, 291 bp, Homo sapiens
ccccccccctttaactcatttgggcggggggggtttgcggtggggggtttgtttgcgcggccgtttttttgtttccctttccctcccctggttccccccccccccgttttttcccccccctcgtgcccccggggtgggcccccccctccggtttttggcctgggccggggggggggtttctttttccccccggggccggcttccctctttggcccttttttggtcccctttttccccgtttttggttcccagcgccgggggggcccgggccggttttccgggtggttccga

SEQ ID NO: 696478 - DNA, 437 bp, Homo sapiens
ctgaggatcccgtgcgacattttacaccagtgaggaaaaatttgcttcgttgaggtgatcgcatgatcaaaggctgcaggtgctcatgggccggatggagagcgtcttcaaccatgggcactcaggaacaccatctacgcgggattgcaggacttcggccaggtgacgctgcgtgaggccctgcggcaggcggtacggaagaagaagaatgtcctcatcagggtcctacagggaattcgaaagaacatctttgactgggagggagggcgagaggcccctaatgacccatggttgaagaggggagaaggaccccaaaggtggattttgatatccaaggttgccccggggttcttggtggggccatcccaggacaccagcttgtccacactggtgcggccgggggtcaccggaagctcgaattcggaaaccaggggccc

SEQ ID NO: 696479 - DNA, 218 bp, Homo sapiens
tgtattacttgtggtcgatctctacacggatcccccatgaggtccataggtttgggtcctagtcctttctattagctcttagtaagattacacatgcaacgcatccccgttccagtgagttctaccctctaacatcacctacgatcgacataagggatcaagcatccaggcacgcacgcattgcaggctctaggaacgcgttagccctagtccacacc

SEQ ID NO: 696480 - DNA, 285 bp, Homo sapiens
atcccctataaatctactacaaagctatagtagccagaacaaggtggctactggggcatatatacagtatacattgaccaaatggtaatcagtatatattggggcccagaagaattaatccacttcctttacagccgactgatttctgacaaagatgcctcaaacactcattggggaaataactgtctcgtctcttgaataatttatacctgatgaaatactgtatatccatttgcataacaatgaaactagacccccacttctcatgctgtgcataaatcaact

SEQ ID NO: 696481 - DNA, 366 bp, Homo sapiens
  misc_feature (114)..(114): n is a, c, g, or t
tggggctcaataaaatccagtgcaactttccttcagtggagggaagacaggatcaggacagcagagcatcatggggacaggctcgtttctccctccatggccgtcctggactgngcagggtggcagaagggactagcgcagcactgttgggacactagtagacgaggtgggtggccaggacgcgagggtcctgggtccagtcctggctcagtgaccttggtcaagttacatactcactgtgggctcagtttcccctcctgtaggaggaaggtgcttctctagagagttcatccttaaggagccatttagctctgaccttcaccaaggctctttgattcccaccagtgcctcgggggatcgtctaga

SEQ ID NO: 696482 - DNA, 340 bp, Homo sapiens
agtgaaggagagtgaaaaagctcctcaatgttagggtatgaggctgttctcagcttggcaggtcattaaaagaccagcgccatgactcttgggcatggtcatggccaggcgctgggtggctactggcgaccaagccagagcagacaaactttctgaacattccgaggtcaacccatccgttgaactcagcccgacaaggtcctggagcagtgggacagtgagcctcgaccaacctagtgacagccttgattctacctgggacggagtgaccgatggcccccagcccactgccctgaaagaaaccttgccagagggccccagacaccacctcctaagccca

SEQ ID NO: 696483 - DNA, 418 bp, Homo sapiens
catgggatgttaacagcccgttaggagctgcgcacatcgctaacgggagttccaggataatcactataagatgagaaaaattgatctctgaatgagctgtaacgaggtccgaagtgattttagctacatcaggagaggaacaagaccaacctgaaggatcagtgaagggagattagaagcgttctggaccaccacaggagatgatatccccaggaattcattaatggcaagcacaaacattgttggattgaaaggatcgtaatccaaagttactctgtacaaacctttagtatcgaaaaaagcacatataaagagccagatgattttgagctatggattgaaaaagattaggttcacacagaggggcagctgtacgtagtgtgtcacatgaagagttcgctacttacttgagaatttt

SEQ ID NO: 696484 - DNA, 235 bp, Homo sapiens
ggatatctcggatcaagcatactgaccactgcgatatcgcagcgctttgctcctcagaatgaaatacagctttcgcatttcttcacggggcgcgccctatgcttcttagcgtcgcttatcaaaatatcagctcatctagtctctagctgaggtactctggcagtccgttcatgtcattgtggtaataccgtatcatactgctgttgtcctcgctaccgtccactccatgctaccg

SEQ ID NO: 696485 - DNA, 291 bp, Homo sapiens
gatcataaggtgggggcgtttagctggcagcactgacagttatttgttttaagtggtttgggccaatgtgtaacaggaaaagctggagtcacatttccaaagtccgaagatgagcaacagagttctggattcagctgcgtgaggttcagcctacagtgactacaagtggacgatctgtctctcttgcaggtatgaccaaccagttttactgtcagtctgtccatttctaattaaatgagatgcagaaatgctggtgcctggcaaaataaaaaacaatcctaaataacaaga

SEQ ID NO: 696486 - DNA, 427 bp, Homo sapiens
gcgaggtacccatccttccttctctcacgctgaagtttaaaccggatatatatgctgctcacaatcatctcttcacacttgaggtcatcctttatcccaatttgttgacagagttaaaaggttgctgaatattcagaaacaccacttatgaaactagaatctacccgcagttatagtttccagcattaacgtctaccagctaagagctgcgcattctgaaagagctagacaatatttactgccttgagcacagaacagggacggcttccctaatacttatgctactgtttcactattaagaaggggtgaatatgttagaaatcacataaattccaattttaaacagaatgctgggagtgaacctcagtctcacatatcaaacacaatctggaaggtgcccaccctgagaggccagctccagcccatc

SEQ ID NO: 696487 - DNA, 355 bp, Homo sapiens
  misc_feature (48)..(48): n is a, c, g, or t
  misc_feature (268)..(268): n is a, c, g, or t
tcggatctagcggatcccttaaagtgcactcttctatatctactaatnaatctatatgcttagattagagcaaagagaaggaaaaaatggcctcggtaactgatgccaaaagaaaaaaattatactctaataaaagaaaaagcaaattagcaaaattaagccattttcattttcctaagaacacaatttcacatattctgtaattaaaacacaagacacatgtcacagactagtaatcaaatgaaaataacaaatcaggctagttagngcatctgaatcatgcaataatatgcagatcccaagtcaaatgtgttcatgatgccccaggatgtagatatagaagagtgcacttttg

SEQ ID NO: 696488 - DNA, 817 bp, Homo sapiens
  misc_feature (128)..(129): n is a, c, g, or t
  misc_feature (166)..(166): n is a, c, g, or t
  misc_feature (397)..(397): n is a, c, g, or t
  misc_feature (419)..(419): n is a, c, g, or t
  misc_feature (421)..(421): n is a, c, g, or t
  misc_feature (443)..(443): n is a, c, g, or t
  misc_feature (476)..(477): n is a, c, g, or t
  misc_feature (495)..(495): n is a, c, g, or t
  misc_feature (503)..(503): n is a, c, g, or t
ggcttccccagctccagaacttccggccagcgcggccatttggcttcctgaccttgggctacggtgaccgttttttgtggtgtactccgtgccatcatgtccgtcctgacgccgctgtgctgcggggnntgacaggctcggccggggctcccagtgccgcgcgcangatccattcgttgccgccggaggggaagctgggggatcatgcaatggcgttggctaacctcctgcttcgtgaccttcctcttgccaggggttgatcctgtcacacctgagacctacaggaggccagagtgaaggggtccgtctgtcccctcaaatgtgaccttgaccagccccaccgtccatccgtgtcatggtactggcattgtgtggcggctcccctgatcatgtcatnccaatccagtcacctcttctgnantcatgacctctgtgatgtctcnatggtgacctcctgtgggggtcactgaccttgnnggggggtcccccttgtancaataaantctatttaaccaacgaccgatagatcagctgcaaagcaaccaaacaacaacttttgttgggccggcctgcgctcgtcggaaaaaggttcaaaggaccccatctggtgggggggcgcggggcccggtaggtttagtgtgcaactgtgtccaatggcggctcccaagggagactgcggcatcggaatattgggcgtggttcccccagaaaaaagcgcccgggggaaccgggggtttggtaacaaatccaaggggggtctgggggccatacaggctctataacagggccaaggggcggtgacccggcgcgggagtgt

SEQ ID NO: 696489 - DNA, 517 bp, Homo sapiens
ccccatgcatcagtggtgcccagtttcaatctcctggcataaccagggaggtgcactcctaaccctaagcaacggtcctataagtcagtcagggtgtatggatcacacaggaagtaaagagccttagggagaagtccatcaccaggtttatctttataccagactttaacggatcatgaccctatctggctaccccgggatattttccacatgactggggacaaagggaaagcaacctcggctctccaggatcggttttcacatgggttatagcatctctgggatggagtagagggaggtcaggagaagaagcccacatagatatataacggtcttctctcagattacacattatagcatgaagggtttggattaaaatctaatggtaagatactggcggattacaattaccaaaatagcatcacaggagattcaattaaaatggtcagggaaataattttggaaatagtttaaaaggcaagaatattcagcgaggtcaataatttagagatactaa

SEQ ID NO: 696490 - DNA, 1506 bp, Homo sapiens
  misc_feature (950)..(950): n is a, c, g, or t
  misc_feature (1016)..(1016): n is a, c, g, or t
tgtagagacgtggatatgttctctccttagcgcctgggtgtaatcttgttgcgcggctctccctgtttgtgggaagggtctccagatgttcaccagtaaggtctaagttttgtgaatggtgggattatctaagggagtgtcctctgaaccccgttgagagagaaattgagacccctgtggtgaagtggggttgtaaagtgattagcgccccttagagtgccccagggattttggaaaagcgctcttgtgggtgtttcatcaagggcgccccgttgtccctagagatgttttcccccggtggtggccgtttttgtgtgtgggcgcacaccgcacccagctatacccgggaagttgtggttttttggccccaaaacccatggggaaggagagatgatttccgcatggtggttgaggtctacccccgtgtggccgggtgtaacgaccagaaaaccgggggggcacacagagggaacccagtttatgtgtctagaccagaaagttttatgctaaatgcgcggaagttctcaatgataagggataaccactttttgtgggagagagtgtagaagtgtccccccagtacccactccccctgcccgtggtagttcccaacggaacggacacacttggccttttttcgaagccgatatctttataaggggaaaagatttgaaaagaatttgaggttatagaacccacgctttttttggggaattccttgggctcggtgggctttttttgtgttttgtaaaaccacaggcaaaccgcgcttttcggcgttctcacgggggataatttctttgttacaccccacgagcccactctatataagcaccatatatgggagagatatatagaaatatatagacaaaaagagatatggctttttcgcccgctcccacgctgttggagaacacacgtgtggaggcccccctcgatatggccacaanaggggtgtgagaaagaaagagagagtcccggcaatagagaggagaccctctcgatatagagagacncacgctcacgagaagacacacgccaccacgagaagaccactcacgaggccacaagaccgcagaagaatgagaagaaaaatgggaatggtgtggggaccacgagatgagacgagaagaaagagaaccacgccaccaaggagaatctaccacgccctgagaaaaagaatgaacttgtaaaattaatacttctcacccactttggagtccctcgtgtggaagaggggaaatgttgagaaatttaccactcacttttcttctttgggaagaagacctttttttggagatgccccctaatccccttctcccctgcacctggtaaaaatgtgggagttaatgggtcaccacggagaaaaagtgggttttttaagttgaaattcttttttaacacatctcctcactgagaatgtaaaatttgtagctaatttaaactgagctatttttgatgtcaaaatcttgtcatgtgtataaaaatataaaaagatccccaata

SEQ ID NO: 696491 - DNA, 443 bp, Homo sapiens
  misc_feature (1)..(1): n is a, c, g, or t
ncttattggcaaccaagaaagacgttcgagattttaaaccacacctaaaacaaaagatgtggtggccaatctttgtacactctcccatctcatcatgtagatatattatacatgctaattactatccgtcttggagaatattcactgaatgcctttacatgtcagtaagcacatataaatcgtatcatattgctgagagattgtaattaccgcatataactatctgatatttaaatgataaataacgtgtgtataagaagatgaacctttggcctaagacttttttcacacattattaacatctaggtagaagtgctgttaattagtagaataatgttcaaagaaacaataataggatgatacaagaaaatccttgctaatgaacactggctttgatttatgtttttgctcagagttttccaagaaatatgcacatttataag

SEQ ID NO: 696492 - DNA, 818 bp, Homo sapiens
gagcgcggagccggcgcggcccctgtgtgtgctgcggagagcaaaagcagacatgtgtcaatttcaattctacatctatgtattggtaagcggaggcctaaataacactgtcaaatcattgggatttacaatcaaaaagagttcatcgatctcttaaggatcataaagatcaagtaacttgtgtaacatacaatggaatgattgctacattgttctggatctcttagtggtgaaatcattttacacaggtaacacctaatttatctagtactcctttggccatggtagtaaccaggtctccaatccaggtcgaatagaagtgatgatcgtggcacatctttatctgtcgcccaaattctggaagaagcatcaatttactaccaagcatgatagtccatctctgtcggcacttgaagtaacctccttgtttacagaacatcactactggccgctgtttcggataatggaatagtaacctctctgggatgtaaatagtcagagtccataccataactttgacagtgtacacaaagctcagcgtcagggcatctgttctcctgtccagaatgcctctgcgtcaccataggctggataaagatcatcttcttatgaaactttcaagtaagaagctagtgaaactctcaggtgcaccctctaacgcgggaaaacctgcccgaggagcactggggccaacggcctccccggggagcaatcgtccacaccgactccacccgctgccaccccgccagcacccgcgaccccccaacctggccgcacgcccaccccaggcgccacaccagcaacacacgggccacaac

SEQ ID NO: 696493 - DNA, 202 bp, Homo sapiens
ccagggaatcgcacggaggtggtgaccccgctcatgttgtccgacaccaggtggttgaggtccacgtagtcgggggtcggcagcttgagggtgcggaaacagatctctacaagtgcctcgatgtctatgcactaagtctcatccgtattctccaccacctggtgcacagacagcgtggcggtgacgagctccaccatcgtgt

SEQ ID NO: 696494 - DNA, 830 bp, Homo sapiens
  misc_feature (386)..(386): n is a, c, g, or t
ttcgagtgtcctccatgggcatgggcactgggctttccccaaagtaagcagtccaaaagagggtaagacagagcccacactggcttttatgaattagccttagaagtctaacacgggtacttccacccacattcattagtcggttagggtacagctcacattccatgggggagggaaaatcaggggcctggtcctttaggattaggagatggtatccaaagcaatttggtgggaccatatatttaaacatctacagaccactacatccttggatggtacctaaggtcagatgaactctccccaaggaggtctcaccagaagaaattgagcttccttggcccaacctaatatctaaccctttggtggggtagagaactccaggtagntggggctgggttaactggttcacaaccaggtgggcttctctaagacaaaacaaaagtggtattggagtacactattatatggttcctaagagttttactggattatggaagcaatggtggtagccacaggaatttcattaaagttattaaaatatacaggtattatattattggttaaattcccattaaaacctggttggtttttccacaaaagggttttaggtttaatttttccccaaatgcctggtattgggctaccattttctcggtgttacctcttttatggtcccggaccaatccaagaacagctggaaggccaaggcttggtaggccttgcgaccagttcattgtggtcacttgttccccactaatggggggcattccagggtgcccccttttggttttccccgtgtgcgctatgcgagggggatctccagaggggcc

SEQ ID NO: 696495 - DNA, 190 bp, Homo sapiens
tcaggagtagagacagccatgacaacatggtgaaagcacatgtctactacaaaatataagaattagccggatgtggtgacacgagtacctgctactcccagacatacttggacggctgagtgcgggagactccctatgaacccagagagatggaggttgcacgtgatccaacgatcaccatccctcgcat

SEQ ID NO: 696496 - DNA, 1008 bp, Homo sapiens
gggagtccgtctgaatctgccgtgactttcggagctgcccgcatttgcaagaaggttcattgttcagttgaactcctttacatttatttattctatgtattttattgtatttatttcatgtcttttatttcattttatgctattattgtctactcttattttatttcatttattttattttcattttgtctcatttttatttttattttattttatttttattttcatttttcttgagacggagtctcgctctgtggcccaggcgggagtgcaatggcaccatctctgcgcactgcaacctccgcctcctaattcaagtgattctccagcctgggcaacaggagcgaaacactgtctcgaaaactaaataacctaacataaataacaatacttcacccacacacttcacaactgagggctcccgaaagttaaatctgctaatctttcagcttcgttactatcctgatccaaaggaagcagactgcagcaccagttggctgactttggataacgtacctggggtccattttacctgagtaaagtatgggactggggtcagaggccctcccctcagtaaagtcccccttggttaaaaatgggttaaagatgacagggcccagcctggggtcagttggagccttgcgaagttcagtattgggtgctaagcacagttggccagtgtctgtgtcttgtcacgtattttgcttcggcgccattgatgcacacaaatgttacattgggcttaacaccacgcaaacccttcgtgcacacttgcaaaaactaggaggccttttgctttaaggcttccattacaaccagaacaacagaattctcctctcgtgatgcccgcagggcttggcccctcagggactatacgtgttgggcaagccagtgctccctagtgaacacacgtgggcgcaacgggaacctagagagcttgcatgtctgtgcaagggtaacgcttttctttcaccaatagactgtgtggcccttcgttcaagctggtca

SEQ ID NO: 696497 - DNA, 135 bp, Homo sapiens
taagtcggtaccctgttgtcttctcccaactcgcgtgctcacagaaccaggtgctgcacagccccgcagatgtggcccttcttcagcgaaagagcaaataagttggtcacgtacttgatgctataagtgactaca

SEQ ID NO: 696498 - DNA, 342 bp, Homo sapiens
  misc_feature (11)..(11): n is a, c, g, or t
  misc_feature (30)..(30): n is a, c, g, or t
  misc_feature (58)..(58): n is a, c, g, or t
  misc_feature (72)..(72): n is a, c, g, or t
  misc_feature (260)..(260): n is a, c, g, or t
gtccctgctancattctccaagtgttttcntgggtcgtgagcgccgctcctgtttccnatctctcagctgcncctcgtgccctgtgtgagatttgttctcgctaagagggggctcagatggtgcggcctgagtgtgcggccggcggcatttgggatacacccgtagggtgggcggggtgtgtcccaggcctaattccatctttccaccatgacagagatgcccttgtgaggctggcctccttggcgcctgtccccacggnccccgcagcgtgagccacgatgctccccataccccacccattcccgatacaccttacttactgtgtgttggcccttatcgag

SEQ ID NO: 696499 - DNA, 212 bp, Homo sapiens
tccccctccccccccccctcccaccccccccccccggtggcccagccccctgtgctgggctgacttgcagcgatttataaactggctgttacctactatggctgctttatttggcgatcacgagttgccatttaggcaacagccatttaggtaacagccactagacagccacttaaggctaacagccactttaggcttacagcccatttagg

SEQ ID NO: 696500 - DNA, 477 bp, Homo sapiens
  misc_feature (31)..(31): n is a, c, g, or t
  misc_feature (56)..(56): n is a, c, g, or t
  misc_feature (123)..(123): n is a, c, g, or t
  misc_feature (234)..(234): n is a, c, g, or t
  misc_feature (240)..(240): n is a, c, g, or t
  misc_feature (336)..(336): n is a, c, g, or t
  misc_feature (338)..(338): n is a, c, g, or t
  misc_feature (352)..(352): n is a, c, g, or t
  misc_feature (359)..(359): n is a, c, g, or t
  misc_feature (372)..(372): n is a, c, g, or t
  misc_feature (379)..(380): n is a, c, g, or t
  misc_feature (399)..(399): n is a, c, g, or t
  misc_feature (405)..(405): n is a, c, g, or t
  misc_feature (422)..(422): n is a, c, g, or t
  misc_feature (451)..(451): n is a, c, g, or t
cacatctcaacccctctgcaaagcttttatnggcacagatgaaggacatcaggganacagggaagagcgagtacagcaagtacgcaagaaattggaaggaagcctggatggcagacatcttgncgcgaggctggtgatacaggaagaggatggatattgaaatggcagtggagatgaagcctaagaatatgatcaggtaactttcgaccgactttcccaagagaaaattctagnaattgnacaaaaatgttcactggcttttgctgtaagaaaaaaaatgacccgagcacatagagcttttaatagcactaaccaatgcctttttagatgtatttntnatgtatatatctancattcanattttcatgtttntttttanntccaggacttaaaattagncttttntatatcaagcaggaccnaagatgaagctgagcttttgatgccaggngcatctactggaatgtagcacttacg

SEQ ID NO: 696501 - DNA, 460 bp, Homo sapiens
cgggtggattacttgaggtcaggagtttgagaccagcctggccaacatggtgaaatcccatctctactaaaaatacaaaaattatccaagcatgatggtgtgcacctgtaatcccagctacttgggaggctgaggcaggagaattgcctgaacctgggaggcagaagttgcagtgagttgagatcgcaccactgcactccagcctgggcaaaagaccgaggctctgtctcaaacaaacaaacaaacaaacaaaacactctcagtttgaaaggtagtgaatagggctgagataagtgtctcaggaaccaagtatttgttgtgatattcttttgcagttgtgttgttctggggtaggtttgcaattgcttcctcgaagattaatatatgagattagaagtggtggtgagcacatggacaattgtgtactttggagaattaccctttgttgcatgaatataga

SEQ ID NO: 696502 - DNA, 542 bp, Homo sapiens
cacgaggctcaccttcatctactgtgaagtgatgagaacaggacttgatagtggtgtattaacttatttatgtgctgctggatacagtttgctaatattttgttgagaatttttgcaaatatgttcattgggaatattggcctgaaattttcttttccactgtgtctctgccagaatgtttgtatcaggctgatgctggcttcatagaatgagttaggcaggagcccttcctccttgattttttggcatagtttcagcaggattggtaccagttattctttctgcatcttgtagaattcagctatgaatccatctggtctagggcttttgtgttggttggtaagttttttattactaattcaacttcagcgcttgatattggtctaggaggggtttctgtctcttcctggttcaatcttgggagattgtgtgtttccaggaatttagccgtttcctccagattttcttctttatgtgcatcgacttgagtgtaaacataacttatatgcactgggaaaccaaaaaatctgtgtgacttgctt

SEQ ID NO: 696503 - DNA, 247 bp, Homo sapiens
gagaggagggagcgccctgattttcttctccgggattgatagtccattggggaactcaactatttatttaaaattgtgtttcccaggaaatgagagttatgtatattcaactgtggttttgtgaatgtctttatatttatggtgttttaagtcaccaactttgcattataattatacggcaaattgtttattgctctttctactctaatcgtgttatagcacattgttattgtatatttaaaggcaa

SEQ ID NO: 696504 - DNA, 253 bp, Homo sapiens
tgttttatattttaaatggcttttgataatcgaagagggagagcagggtacaaaagacacttcttggccttagggatccagaactcatcacaaaaataaatattccaaaaacaacaatggaggggaaactcacatgtttgggctgaatttcaattcttcgtatgagttctgtattgtcccagtcatagaaggctaagccatttacagatctgactcccaataagaagccgccgtagatacctaaagtcgacgc

SEQ ID NO: 696505 - DNA, 375 bp, Homo sapiens
  misc_feature (48)..(48): n is a, c, g, or t
  misc_feature (57)..(57): n is a, c, g, or t
  misc_feature (89)..(89): n is a, c, g, or t
  misc_feature (119)..(119): n is a, c, g, or t
  misc_feature (173)..(173): n is a, c, g, or t
  misc_feature (333)..(333): n is a, c, g, or t
gcattgttcaccatggtcctagcttgatttttttggggtgtgattatnctttctttnctctctttctctctctctctttctttcttttnctttctttcgagatggagtcttgctctgtnacctaggctggagtgcagtggcacaatctcggctcactgcatcctttgcctctngggttcaagcgattctcctgcctcagccccccgagtagctgggattacagatgccagccatcatgcccagctaattttgtatttttgtagaaatggggtttcaccgtgttggccaggctggtctcgaactcccaacctcaggtgatctgcctgccttggnctcccaaagtgctgggattacaggtgtgaacaccaccacccg

SEQ ID NO: 696506 - DNA, 953 bp, Homo sapiens
ggaaccccaggaggaagcgtggtgagcggaggtggcgcctacgcgttcgggcttcgggggtctgcgctcgcggtttgcctggactcagcaggcccctggaaccatgtcccgcgccctgcgggcaccggctccgcggctctctgcgtttttccgttttgttgctggcagtgctgccggtgctcgggccgggggatacgagactatgcccctatcacgtgcacgtcgagagcagtgctgaactgtgcacactgctgacttcagcacagcagtgatcgacgtgggactggcatcaaacatcccgttggtaccagctatctttaagtgcgaatcagagaatgaccattccatgcacgtccggatgatgcatgaaacagtccatggatgctcgggtcaagtctctagcctatgtatggcaagatcccaaccgtacgcttcatattacgtggagatagcctatcttctctccggtatggatggcaccaagtcaggacaagatagtagccacacaaggaaggtcgttgcgagacctctgtgcgctcagggagcgtccatggaggttcaggcaagtggaggcgtgggctgatgaactgatgagggctagacatccgactacgggtgccattctgtggacctaggatgactacttggtgcttgcgctaacgtggaaggacacatttggcaatgatgggcgaacccgatgtgcgtctggcactattgagcccttctggaccactctcgaggatgcaggccatcgctgtctgcgcagaatggggcttcgacggcttcttcatttggcgcgccgttgaattatcaacgataacgcgggtacctatgcaggacacctggaaagatggtagcatcccaaggtacgtgccatgaacctcttctgaagtcagcgaacggaggaaccggttcccagagatggtgggaacgttggcgacacggccagggaa

SEQ ID NO: 696507 - DNA, 245 bp, Homo sapiens
  misc_feature (146)..(146): n is a, c, g, or t
tcaattgcatttcacagtgaacctctgcttcctcttaacagcccactaaaatgacaggcaagatgttttcacagggcaatagtcaccaagaacttgagaaagaagatgacagaactttgacagttggcaggcaagtggtcagagancagatctgaacctagaaagctgagaggtgcgtgtgtgtgtgcatgtgagtgtgtgtgtggtgtgtgtagtgtgtgtgtctgtgtgtgtagtgtgtgtgc

SEQ ID NO: 696508 - DNA, 471 bp, Homo sapiens
aaaactgttcccaaaccagagtttccagttattgttttgcccaacctggttgacccacaggacctccattattaccttgaaagggaggttacaaaagaatttggcaagtttggggccgttaaccgcgttcttattttcccaaaaaaacaaggcgaggaggaggatgccgaaatccttgtcaaaatttttgtggagttttccaaaaccttttaaacttataaggcccttccggccctcaatggccccttgttttctggccccaaagtggtgggttaaatgttccacccagagcgtttttataacaatgacctctttgggtgacagtggtccctttccccggacttgcccttgttccctgtttcctttgggttttaaaattaaacaatggtgtccccggggccaggggcgcttttcccaacccagccttcagttcggataaaggttcggattctgctggcccttaaaaaaaaa

SEQ ID NO: 696509 - DNA, 426 bp, Homo sapiens
gagagggagagacgcaggagcaacagcgttctgaacacctacactactcactgcggggagaatccggaagaccactgcatcccacaagcacgacaaccacgtcaggattctatttcctccactctaacccccagatccacttatgagaagtgagtgcaggcatggcaggggccatggagggtgcacagggacagcaaggatggtctgagggcctggacacaatagaaaatcttcgtcctttaacatatcctggactcagaaaacaagcgttggcagcaagcaggggggttgatactaaggtcagctatgtcaccccacttcccagctcctcattagaatacccagtcagccctggtcaggccagcaggagtactagggtgagaaaattctgaccaaggacagatgacccatccaacccctaagatc

SEQ ID NO: 696510 - DNA, 929 bp, Homo sapiens
  misc_feature (10)..(10): n is a, c, g, or t
  misc_feature (95)..(95): n is a, c, g, or t
  misc_feature (115)..(115): n is a, c, g, or t
  misc_feature (174)..(174): n is a, c, g, or t
  misc_feature (187)..(187): n is a, c, g, or t
  misc_feature (259)..(259): n is a, c, g, or t
  misc_feature (291)..(291): n is a, c, g, or t
  misc_feature (363)..(363): n is a, c, g, or t
  misc_feature (366)..(366): n is a, c, g, or t
  misc_feature (374)..(374): n is a, c, g, or t
  misc_feature (394)..(394): n is a, c, g, or t
  misc_feature (479)..(479): n is a, c, g, or t
  misc_feature (487)..(487): n is a, c, g, or t
  misc_feature (491)..(491): n is a, c, g, or t
  misc_feature (497)..(497): n is a, c, g, or t
  misc_feature (509)..(510): n is a, c, g, or t
  misc_feature (516)..(516): n is a, c, g, or t
  misc_feature (519)..(520): n is a, c, g, or t
  misc_feature (538)..(538): n is a, c, g, or t
  misc_feature (552)..(553): n is a, c, g, or t
  misc_feature (579)..(579): n is a, c, g, or t
  misc_feature (602)..(602): n is a, c, g, or t
  misc_feature (635)..(635): n is a, c, g, or t
  misc_feature (650)..(650): n is a, c, g, or t
  misc_feature (661)..(661): n is a, c, g, or t
  misc_feature (680)..(680): n is a, c, g, or t
  misc_feature (683)..(683): n is a, c, g, or t
  misc_feature (744)..(744): n is a, c, g, or t
  misc_feature (767)..(767): n is a, c, g, or t
  misc_feature (778)..(778): n is a, c, g, or t
  misc_feature (781)..(781): n is a, c, g, or t
  misc_feature (788)..(788): n is a, c, g, or t
  misc_feature (830)..(830): n is a, c, g, or t
  misc_feature (928)..(928): n is a, c, g, or t
atttattggngttgacaaaaatacataatacagaaaccaaaacaaaacacaacagatacaaaaccagaaaccccagcctagtgggcccatgtgcnttaggtactgacagtttgcngacccagattcccacaaagcatggcacttaattcatgaggacctccatctgcaccagcntcgcattggtgtncccagacgttcggtatggtatcattccagcaaaggtaatcagagttcgggcttgacttcggagttgagagtngcggtcctcgatgactcgctggggcctggatnacgaggatggactcgtccccttgagcctcttaaactgtgttaacaagacgtccatggtggcaagaagcactnctnacacgttntcccttatttcatcactcanatttctgaaggcagccactctctcttccacactttcctgatttaggggcaccagcttcaagcgctcaatgacatcaaaagctctntcaatatnaccnctatgntactcgttaaannaggtgntcnngtccaaaagaagacagancgtgcgagtccacnnatttttttgcgctttttccttgagcnctaccccgttcggcaatcgagantgccaagttcttcagcctctccttgttggattncggggcactaatctnggggacgacangactcagcagtttgttcancanctccagtaccttgtcagcattcttggcaaggtcatacagctttctgcctcttcaaacagtnctttattttctgccacacaagcnactttgttganaanaggcttngtgttattagtaaacttatctatcactccaggctttctactnccgtcattctctagtttcccaagaatcatatcgaactctcggctttcaatcacaagctcactcacacagcgcagaaacatgttttctccttgaatatnt

SEQ ID NO: 696511 - DNA, 81 bp, Homo sapiens
accgaggacacggccgtgtattactgtgcgagagatcctagcggcgtcgatatcgatgcttttgatatctggggccaggga

SEQ ID NO: 696512 - DNA, 250 bp, Homo sapiens
  misc_feature (77)..(78): n is a, c, g, or t
aaccccaacccaaaaagcttcattcaggccctgttttaaagccccagggtgggttaggtggtttaggaaacccaaannctccccccccacattttccttaatcccccaggccagtaatagccgaaacttgcctggtttttcctaatagactgtaagccctttagggacagggacagggttttatttatttttgtgtttttagggcaaagcctggccccctgttggggtttaataaagggggttgttttga

SEQ ID NO: 696513 - DNA, 146 bp, Homo sapiens
ttaaacccccggggaacccccctggtcccgggttggccaattttggggctttctcgggggggccgagaaaaggctttttccccaaaaccaaagggttttttttggtacaaaaaccccttaacccccggggttttttttctggggtc

SEQ ID NO: 696514 - DNA, 155 bp, Homo sapiens
caaaaaaaaagggggggtttttttaaaggggggttttaagggcccctttttgggccccccctttttaaaaaaaggccccggggtttttataccccggggccccaaagggttttttttttttttttttcgcccttaaaattaaattgtttggggga

SEQ ID NO: 696515 - DNA, 1324 bp, Homo sapiens
gcctaccgcagccatggctcgtggtcccatgaagcatcttgaagcgggtggcagctccaaagcattggatgctggataaacttgaccggctgatggtttgctcctcgtccatccaacggtccccacaagcttgagagagctgtctccccctcatcattttcctgaggaacagacttaagtatgccctgacaggagatgaagtaacagaagattcgccctgcacgcggttcattaaaatcgatggcaaggtcctgaactgatataacctaccctgctggattcataggatagtcatcagcattgaccatgacgggagatgaatttccgtctgatctatgacaccaagggaacgctttgcctgtacatcgtcataacacctgagtgaggccaaggtacaagtttgctgcaacccgtgcacgacaagatctcagtcaggcacaagacaggaatcccgtcactctgggtgactcatgatgacccgcaccatccgcatacccgatccctttcattcatggcttgcacctgataccatttcacattgcactttagcgagcactcgacacagatatactagaatatctcatacaacgttcccgacactacgctaaccctgagtgtcattggacgaacctgtgaggttgctctaaccctagtacacgcacattcgactgtgaatcaacaaaccagacaatcaggcacaccttggaatcccacgaccacagaaataccacagatgataccacacttgaccaaatagcgtacaccatgcctctagccccacataaggaacctaaccctaccacttgcccggccacactcgcgcacagtcgacctaccaaacccaccgtactctccctcacttccccggagtgacatgcggcaatcagcgcgctaaccaatcttctgttatgaacacttctcatatatcactttgccgtccccacgatagaccactgtgtataaaggtgtggatcctggttttaccttgtacgcacatatagaactattctaacacatacatacgagcctgagatcagactgacaggaaagtgacagctcgacggccggggaggcactctatgcccgagcatcgaagaagacgcctcaacacgcgaccttgcgtgatgccgccgggtgctgccgcgtcgtcagacagagggcctacgatcacggagcctgatgacgccgccgactcccgagtctttcacatcctatcatatgcccgctctgagtctgagtatgcgtcgatgcgtggtccccactcctgcccgtccgacgcgatccgacgacctctctcgcatcaaccctcccaccacacctaccg

SEQ ID NO: 696516 - DNA, 1188 bp, Homo sapiens
  misc_feature (1)..(1): n is a, c, g, or t
  misc_feature (9)..(9): n is a, c, g, or t
  misc_feature (32)..(32): n is a, c, g, or t
  misc_feature (650)..(650): n is a, c, g, or t
  misc_feature (656)..(656): n is a, c, g, or t
  misc_feature (658)..(658): n is a, c, g, or t
  misc_feature (699)..(699): n is a, c, g, or t
  misc_feature (776)..(776): n is a, c, g, or t
  misc_feature (1038)..(1038): n is a, c, g, or t
  misc_feature (1147)..(1147): n is a, c, g, or t
nttagaagnctcagttcatcactcaggctggnattcggtggcaccatcttggctcactgcaacctccacctcccaggttcaagtgattctcctgcctcaacctccagagcaactaggactacaggctcacaccaccacacctggcaaattttttttttgaaatgacaacgtctccagcccagctgattctgtctttaaatggtggataattcccaaagtacacttgcccttgggagtagtggcaaaatgacacggtggtgtcggccccctctggctggaacctccaggagactgaggtcaacccaccagtcgtattagtagacttgaacttgcaggtcagcttcccttgtgtaccatttgccacgaagatttcttttggtaaatatacttccaagactgatactccagctgtcaagagccccagcgccaccgccagcaccgaccacagccagcgcctcctgtctggggctgcaatcactgccccggctccagcgggcgctgccatcatccagccactgcagtcgccgctgccgcgcccctgagcccgggtccctgccgaggttcgcttggcttggggaagagggttctgatctctctgccacctgcactgggtggcaacgccacgccgcgctccctactctggccccagntgtggntngccagctctgcactctagcctcatccctgctctggcacatntgctaaatttttatgttaaaaagatggggctcgtgcctcagcgcggactctccgccgctccctttaggagggtaatnatgacctcgctactgactcctggtcgttgtccgctgagcgaccgaatagctactcaaggggaataaggtattccgatcccgaatatgagcacaactgtcgcccagtcatctaggcagcaccgccagttgcctccgctctctcactcccctccccgatatatataatacccccgagcaagcgcgagatcccgcgcatatatcaccgtttcgcgtaattgctgagctatcgtccaccctcgtgagaaccgccgcctctcatggnactgcgctccactcagcgtataatatggcacgctctccacgctgcgcgcgcgcggcgcggtatttacgctcctcgcgttatcacatgccgccctgtaatacctcccgtncctcccgcgccttctcgcaccgccctcgtatgtgtacgccc

SEQ ID NO: 696517 - DNA, 101 bp, Homo sapiens
gggagtgcgagatccgctgctgctgaggagaggagcgtcaacagcagcaccatggctaagaaccttgaaggctatgtgggatttgccaatctcccaaatca

SEQ ID NO: 696518 - DNA, 200 bp, Homo sapiens
tgcactagtgaatgtgctttgtcatggcatgcgtacttctcgttcatttacatccataagtctcacaacttctttataacttagcacctcatctttcattttttatttgatagcgactgttttcttcaacttccctgaagatataaatcagcggtttaaacaattcctgtattttctcatgtaaattttctttttttagc

SEQ ID NO: 696519 - DNA, 407 bp, Homo sapiens
  misc_feature (22)..(22): n is a, c, g, or t
  misc_feature (64)..(64): n is a, c, g, or t
gactcacctaaagggaaatttngccctcgaaggccaaaaaatcgggcacgagctttctttcctntttttttttttcagaagacaaagcctcgctctgttgccccaggctggagtgcaatggcatgatcttagttcactgtaacccaccgcctcccgggttcaagcaattctcctgtctcagcctcccgagtagctgggactacagatggtgcgccaccacgtgtggctagtttttgtatttttagtagagatggggtttcaccatgttagccaggctactctcgaactcctgacctcaggtgatccacccgcgttggcctcccaaagtgctgggattacaggcatgagccaacacgcccagctaatattcattttctaagaccatttctcaaaagttgatgtctatc

SEQ ID NO: 696520 - DNA, 138 bp, Homo sapiens
aggactagaggcatgagtcacggggcgcggccagtatatggtctctccatagttttcgtcagctcacacaggggcttcgcctctgtcaggactccccctagcaacgagaatcttccctatcgtcccatcagtattgca

SEQ ID NO: 696521 - DNA, 282 bp, Homo sapiens
caatactgtcctgtgagctgggtgaggtatgctggtgctctcccatcaccttctcccggccccacatgccttccccatgggggcggggcaggaggctggaggaacacagcttccccctgttctagcagagaaatgctggctgtatgcctcccctagggttcccaggctttctagggtgtggctggacttctgatggagcccactcatgctgggccgctggcacaggggctttgttggcacctagtgtcgcgatggtactcagtgccagtgtgtcaggattcc

SEQ ID NO: 696522 - DNA, 1011 bp, Homo sapiens
tctggcatatctgaccgacgtcgtcccagagcatagttgacagtcctccgggtttctcttctacgtcatacgtcgtcttgtgtcgtggtctttcgtctcgagcagttagcagaatgttccccttgatatcgtagctctccatcgacaggaggctacgttaagcgtgctccccttacgcctattttagaggcataaggggatttctggatgtcgctggcatggttcctggcggcttgcatcattgttcttgtctactcagctcgcagtggtacctctccaatgacaaagttaggtgagcttttgctcggtttcttagtctcttattggagcgcaccaggtcgcctacatgtcggagccaccctttgggaaatgaacgcacgagtatgtctgcatcctttgttggcaccgcccatgggggactgacgtgattcggactacgacgagatgaagggctcattgttgactgcgggtgcatatgccatcaatggtggcaatcctcgagacgggtagttggctctaatgcacgcgaggggtccataaagggcctggtccaagaacgaggtgtgacaccaatggagatagtggaaacttcatcatggtgccctgagagttgggatccaatagcctcgatacgccatcccgttcctagaccaccctcaacgatttctcgggaactaagatcctcccatcacgtggcctccccgtgcagtggaaatacgccaaacgtggctacagtggactgttcttcaactgctccggttcgattgctgacactcaagtgccgccagggacaggtcaggaacgctcccacacccatttctggaatgaggggttggaggaacggctgacgctgagcaaaggaccgatctctgctctggtatggtggggagggagcccattatacaagagacccctcagggctcatgtgatggggtgatcacacatcttggggagtacgtggctgtcactgccacgaggtgagagggtttggagagaagctacatgccttta

SEQ ID NO: 696523 - DNA, 835 bp, Homo sapiens
gctgcgtcgctcctgggagctgccgacggacggagcgcccccgtccctccgcctcggtctgtcctggtacgaaacgtcagtcatgtctacttattctgacgagatcatatctgtcacccgcctaccgtggaagatctgcgcgtcctatcacctagagttctgtgagtgctatggcagtcattcccctcagtgagtcctggatgtcgcatcctaggcatacataccatcgtatccacttggttccccgaggggtctgtccttggatctcccccgccgctatgcctatgttccaatccggtccctgttgtaacggcgctgttgttccagccactgcactgaaattgggtaacggtattaacccgtcccctgataacatgaacaggggtaaggttacaccttacgctatggtaccaccttgttgcggaatccggttacaatcctgtttgctgcctggcgattcctcggttaatgacacccctaaacgggttggctcccgggataatcgtgttgccatttaacgagtaagaccccctacccccgtgtttgttggtgtccactcccaaaaaggggccggccttgtgttaatctataataccgcaaaaaggtttcataacagttttattccgaaacattccactcagagaggtccctgagtttcgggggcccgcacttttattggaacagcggagagaaccctcggagagggagcacgggtagaggcaaggccaatcagtggtgtcggaaacacacagcaggtggaaactgtggctcgtgtctcaaaaggcgcgggaaatcgtcgccccttgtgtgttcgaggctctaagggggaccaaag

SEQ ID NO: 696524 - DNA, 546 bp, Homo sapiens
gttgatcaggtttttttaagctgtgaatgcaaggggttttgaaatgcaaaatacttaagctgtgaaatgcagaagcctgactcctactctgattctatggttcatagagtagagtgtgtggtccagcaagaggctgaaataagagtggaaaatgctgcttatgtgtccccttctgggagattcatagcgctcatgagcagattgaaaacttagccaagagaacttgggaaacttcgtttaacttttaaccaagtattgtagagaggaaaatcacttctcaagagttttcacaaaagtgttttgttgattcatcaaaggcccgacctgaaataagacaaaaacgcttcatttctgtcaagtaagccttctttattctgctggccaggaaggtaatgattctaacaaatttgtgttgggatacaaaaaaagaaactggttgggtgcagtcgctcacacctgtaatcccagcactcttgggaagccgaggctgacagattttctgagattcaggcgctcgagaccagtctggccaacatggtaaaaccc

SEQ ID NO: 696525 - DNA, 566 bp, Homo sapiens
cagaccctccccacatctgaaactgcctccccccaacacagcagcagcagggccctcctcccccacagtctccccacggcccctcagcatcactggacgaccgcaggcggggctaagccacccctcaaacccagggccccctggcacctggcgtctggccgtgttttctggccagaggcccccaatatttcctaactcgtgctccacttccgacttcataatacccgtactgtgaagaaagaactctccaccccagctccccacctgaccctggactagggtggacggaacgtgttgccatccaaatcccacagaagaaaccaagcccacctctagctagctggcggtggcgacctagacaagctgtagaccaagacagggggtccacgaggtgagcatggacccacacgtgggcctaccacgactcagcccccaaccacgccttcaagagacgaaaacaaggcaagaaccaaagccgaccacacccgaacaccacgcacagtagaggggaacaccacaggcggggaccaaaggacaaagcagagccgactaaccgcccaaccaca

SEQ ID NO: 696526 - DNA, 332 bp, Homo sapiens
  misc_feature (262)..(262): n is a, c, g, or t
  misc_feature (266)..(266): n is a, c, g, or t
gcacgagattattatgcttccacagcatgtcaagtttatcttattatctgccaccgttcctaacacttatgagtttgctaattggattggaagaactaagcaaaaaaatatttatgtcatttccacaccaaaaagacccgttccattggaaataaatatatgggctaaaaaggaactgataccggttattaatcaaaattcagaatttttagaagctaatttcaggaaacataaagagattctaaatggggagagtgcaaangggnctccttcaaaaactgacaacgggagaggtggatccacagcaagagggggccgtggtggatccaata

SEQ ID NO: 696527 - DNA, 397 bp, Homo sapiens
ctgtgccagaaaacacagattaggcagcacagagtcttcttcatttgggaaaagaatgagagagtgaatcgggccccgctgtgggagctgcagggcgcgctgctacagctgcttcagggaatacatattctgtagggtggacatgtgggcatgaaatgcggcctacagaagtcttttgcagcaggggcatccagaatgccctttgatcacgggcctcacgcctggtggagggaggggtatagctagagcgggagatcatggtggtgggacctcagcctccagctagtgatagaggtgttatggggagtggataagacccctccttggaccaggagtctggggtgagatgtgcagaaatcaggacagggctggtgagactggatccttcctcccccag

SEQ ID NO: 696528 - DNA, 122 bp, Homo sapiens
gtccaaacagtgccaccctatgtaccactaggaggcggcagaatctcattgggttaatctgtgtttgtctttaaaaaacaaaaacaggccgggcgcggtggctcacgcccgtaatcccagca

SEQ ID NO: 696529 - DNA, 283 bp, Homo sapiens
ccttttttttttttggggggggggttaaataaagaaattttttttcctcctctccctttttttttgggccctccccccctcccttttttgccaggtaaagggaggatgtgctatgagtttgcaaaaagggggacggtcagggggctttttttccaaaggttcctctttggcctccccttcccctcctttcccctccttttccttccttccttcctttccttggagcattgagccccatttggaaggttgagagaaaccaaaattaaagagagaaagagaggga

SEQ ID NO: 696530 - DNA, 92 bp, Homo sapiens
acacggctgtgtattactgtgcgagagactactatgatagtactggttactactacgtaggggcctacttggggccaaggaaccctggtcac

SEQ ID NO: 696531 - DNA, 431 bp, Homo sapiens
gaccagcagcctctgtggggctcgtgcatcgggcttgggcttctcccagcatggtggtgaggatcagagagagagcatgccaaaagcaagcaatccaagagaacgagaagcaactgcatgacccttccatgacctagccttaaaagtcgtaaaatgggccgggcgcagtggctcacaactgtaatcccagcactttgggaggctgaggcgggtggatcatgaggtgaggagtttgagaccagcctggccaagatggttcaaccccatctctactaaaaatacaaaaattagctgagtgtggtggtgcatgcctgtggtcccacctacgcgggagactgaggcaggagaatcgattgggccggggaggcggaggttgcggtgggctgagattgtgccactgcactccagcctggcaacagagtaagacttca

SEQ ID NO: 696532 - DNA, 1638 bp, Homo sapiens
  misc_feature (162)..(162): n is a, c, g, or t
tataaaacccgggggacccttttcttaaaaagaaccctgggacaaccctaaaacaatttttgctataggaaaaaaaaagggggggaatttctcttccctccgaacacgtgtttcttctgagccaccgggtcgtcccacgtgtggcaagtgcgcctcaacagncgcgtggtgtgtaggtggctctccctcctgtgataccctccccccctacgtctgtgagcggctgccttgacggtctcgcgagcgtctccgttgtcgcccccgcggattcttcaacagattgacagcgctctgtggaagccaacaccgatgatatgtggaaaaccaccctgtggttcctctatatatgccacaagagacgtcgttctacacagaagacacacaataaacagaaacacaaccgacgcctctgtgtcgcgcgcgtgcgaggcataaatcacgctgtcgtgcgtgtgtcttctccccccccgccgcaactcagctgtgtgcgcgagcgagtgcataacgcgtgtgtaacacacatatgtgctgtgtgtgcgacgcccccgccccgagaagaggatgttttctatccgcccgcctgtgacagaagacaacagccgtgtcgtgtagtccaaccctgcgcggagcgatgcagcgcgacgagccctcctacaaccacgcagcgtcgatgtgcggcgaccacaccacaaccacagtcgatgtgagaaccaccccccgatgctgctggtgtcatcaacaccacaaccacaccaccacacacaacaacacaacaccacaagtagcggcgtcgcgcgcgctgctgctctacttatttatttaaatgatgatgtccatcttctgctccgtctgtgtagatgacgtgggtgtctgcactcaccagcatcttcctctttttcatgctgtcggtcgtgctctcgccagtcgtgagtggttctcctgctgttgctgtctcgtgccccccacaccacggtggcgctcgcgctccgccccttcttttcatgctctgtcgtcgtccacggcgcgctcgtcctcgcttctctctctcctcgcccggcccctcgctctctctgcgcgcccgccgtccgcgcctgcgcgcgccgacttgcgctcctctgtgttagctctccgccactcccggctcgtgttgctgcgttctctcctctggctggtggtcgctacctactcgcggtccgcgtcgctccacctgccgtctccgggtcggcgcactcactctctccgtcctccgtggagcgcgcacgcgcggcgcgccctccccttctccgctccttatccgtctcgggcaggctgacggtcgtcgtcggtcgcgtcccgctcgctcctctcctccatcgtggcagcccacccaccacccccctccgtctcgccttcctcgcccgcctggtcgctctcttcgtctccccccacgtccctcgccgccggggccgcctctccttctctccagctccctctccttcctgacgcctcgcctctcccccccccgcggtccgctccccctgcccccgcccccgcgctgctccctcccgcctcgcctcctccccctcctccgccacacctccgttccccctgctcctccgctgcctgccggctgctgcccccccctcccccccccccccc

SEQ ID NO: 696533 - DNA, 372 bp, Homo sapiens
aacccacttccacctttactaccagacaaccttagccaaaccaatttaccaaaataaggtataggcgatagaaaattgaaacctggcgcaattagatatagtaccgaaaggaaagatgaaaattattaccaagcattatatagcaagactaacccctatacctctgcataatgaattaactagagtactttgcaaggagagccaaagctaagaccccgaaccagacgagctacctaggacagctaaagagcacacctctatttcgaaattagttggaagattataggtagaggcgacaaactccgagctggtgatagctggttgtcaagatagatctagttcactttaattcccacagacctttaatccctt

SEQ ID NO: 696534 - DNA, 301 bp, Homo sapiens
  misc_feature (120)..(120): n is a, c, g, or t
ctttctttctaagtagagacagggtttcatcatgttggccaggatgatcccgaactcctgacttcagatgatccacctgcctcagactcccaaagtgctgggattacaggcgtgacactngtgcccagcctcttggaaagatttggattcgcttcatggagccagggagcaggacataggtgaagaacccagcttgtggctcaagttggcctgaatagggttcgaggccctgctcccccgggcctctttgtccatgtgttcaaggaaaaaatttgggaagttcccaatttcccaaaaaagg

SEQ ID NO: 696535 - DNA, 281 bp, Homo sapiens
ttcccttgatggtttccagctatgatcagaagactttaattaaaaattttcctcccataaggttaaatagggaagttttttccacaggattccaggggggccccccccatggtggaaaaaatagccctttaaatcctttttatattaaaactctggaaaaaagggataaggcccttttttaaaaatgttttcccccaaccctaaaaccctaaacaagttgttttaggaacaaaacatgagaaagatgtttatggaggtggaaataaaatggcgtccccaga

SEQ ID NO: 696536 - DNA, 662 bp, Homo sapiens
aatcctagcacttatgggaggccaaggtagagagatcacgaggtcggcaattcaagaccagcctgagcaaacatggtgaaaccccgtctctactaaaaactacaaaaaaattagcgtgggctatagtggctggcaccgtgtatatcccagtctatctcggagaggcatgaggcgaggagaggtcgccatgaacctgggaggtggaggttgcatgtgagcgtgagtattgtgccatcgtgcactccgagccgtgggcgagagaagtcaagacgtccctcgtcaaagagaggaaatttttttagtgttgcaacccacatttttatcttcctcagtatttatagagtgtatatcagtgttctttcttaaagaggtgtttagaaatccagtcttgtccaagatctcaaaacaacgcagtctataattatagacaattattctcggtggctccgaaaacaattctattggatccttctcccaactttctaatcctctcagtgaacgcgggcacaaagtgtattcatactccgtgacaccaaaaaattagaaagggaaacaagcgtaacgtgcaggctacttcttggggttttaaataacacaatatagtctagcttaaaagtgcacaggtgggtctgtggatccaccataaagaatttcacaagtaa

SEQ ID NO: 696537 - DNA, 278 bp, Homo sapiens
ttttgccactgctctaaattcctttattatacagttttgacagccactgacatttaaaaagcatccaattccattacctaagccatccaccttctctgttcctcaacctgagttgccaagcactgctggaagaatggcatgttcatgagtattgatgccatatccattcattgtgtctagttcctgctgatctccaacactgcctagctatgtgtcctttatcagctcccttctcaattctaaactgaattttctcaaacttcctgctgcacgtcgac

SEQ ID NO: 696538 - DNA, 209 bp, Homo sapiens
ttcaggtaacttcctttccgtgcagttctgatgtagacctggatggagagagtttctggaggacacccccgttctcccctaggaaaggattttttctgcattagtaactctaaagtatatttccaagtgtcgatttcccaggaacccccttcaatgatctctaaacaaaggttcttgcttcagatgctgtttccttctggtctcgacac

SEQ ID NO: 696539 - DNA, 764 bp, Homo sapiens
tgtgtgtgtgtgtgtttaacagagaatatggccagtgcttgagttctttctccttctctctctctctttttttttaaataactctttcgggggaaggtgggtttataacggcctgcgccagggtgtagacgtgtgggtgaaatacccaccactaagagtgttgatagagtctccatattttctccattgtgccttcttatgtatttacagagattattcgtgtgcactttaaatttacttaactctaccataaagctgcagtggtgacttttcccacacacgggattgagagggctcttaacttctataagtaataggggccctcgttggatgaactccatataagcagtctattatgtctctataacatatcacacctactttttaaaaacaatatacttatcactatttttaattaggggtgggctcctatataaatttttcttagagattaagaaaatttaagaccccagtagaggtgacgtgtaagtgcaactccaactgcgagttatctcacacatatgtcgtagtatagtacatatccaggggctgacacgttgaacacaactatggccggagcagtattggtcaacaccgggaccaccgggtagaaatgcgtgaacacggggactcgacatatgccaatatgccgcgggcgggcagaaatgaaactcctcaagccaccaggattgctacaccaacgggcgtgcaccgtgggccccagagaattgacacccacctttaagactgcaccggtcgcgacc

SEQ ID NO: 696540 - DNA, 263 bp, Homo sapiens
aaaaacaagcacacacataacaacatataccaaaacacacacgcacaaaacgtacgacatccctcacactcattaatcatatccatcatagcaggcagtagaggtggattaaaccaaacccagctacgcaaaatcttagacatactcctcaattacccacataggatgaataatagcagatctaccgtacacccctaacataaaccattcttcatttacactataatataatcctaactactaccgcatgcctagctactcaa

SEQ ID NO: 696541 - DNA, 148 bp, Homo sapiens
aatccctatacttctgcataatgaatttactatataactttgcaaggagcagccaaagctaagacccgccaaacgccagctccaccttactaccagcacaacgctctagccaaaccatttatccgcaaattaagtactagagcgatat

SEQ ID NO: 696542 - DNA, 421 bp, Homo sapiens
  misc_feature (210)..(210): n is a, c, g, or t
  misc_feature (285)..(285): n is a, c, g, or t
gatcgaaggtctgcctgttcaattggacggtaatgttaacgagccgttcttctacatggtacgaggtgctggatatccccggtgacttccacccgcttctgaaaggtaagtcagttaagaccaccttcgggttgctgttgtttaacatcatcctgatctgggaaccgtttaaaggaacagttgattacgttaaccgtgaattcaccaaanggttctttgaagacctcttccgggaaatcatggtggacaaccctaagcaaggggaagttgttcctcagggtaaancgtcagtggatgaatgcctcatgttcacccacaactgtaacttcctgggaggcttggggactcacttcatcaaacccaggcggtcctggatgcccctgacggttagaccccagaagttattgcgcctgcgccgatc

SEQ ID NO: 696543 - DNA, 1041 bp, Homo sapiens
  misc_feature (436)..(436): n is a, c, g, or t
tgttttcttttgatgttgtttttttttctgtgggttgcttgttgtctttggttgatgtctcctttgttgagtcgattatggcttgttggtcttcttgtcttcctggtgattttcctgatgccctatgtttgtgcactgattttggggtatgctattttgattgacccctcttttgtttggttccttcccggactccgtgattgttcattttgtcctgccttcccgtattttgtctgttcatgttcgctgtcgatcgttgctcctcttccttgtcttggtagccctcgcgttttccccccctatggcgagtccgcctggcctcttgctgttctgttgtcttccaatgtctcggtcttttccttctggtttcctgctcgttgctaagagtcaccatcttttccttggtattttttaatttgccacagatcatcctgtngtgttttgcttctctctagttctcgcggcgtatttcttattctacttatttgggacgtttacttttcaaatctattccaccccgtataaggagccgaaagtggagaaagtgacttattagcgatgcaattgtgaggataaatggatgtaaattcgactcaatacatgactgaagtgggatttacaatacggtctatatggagcaaaactggtatatagggcttaggtgtttatggtacttcatggtagtttatgcacttttgcgcgctcagtgcagttatatggtcttatctatcctatatgcgcatcacacctttataggtagaaatcgctaattgagtatatgtgcttatgcagtcctctggtcttgtatcaatgggcggatatcgtctcccgttgccatggcgttagggaattgtgtataatgtttttctagtataatgttgcaacgagctaaggacaaaggcgaaaggtacaggagcaagaggaagggcgcaagcgagaacggcgtcaggagtaagggaaaagggaaaggagaaagcagaaaggagcaagggaaaggagaaaggagaagggagcaaggttaaggaacaaagaaaaataaaa

SEQ ID NO: 696544 - DNA, 899 bp, Homo sapiens
ccgagcggggcaacaacagcgagaagagatgcagaaacagggcgggcggtgtgccaaaaaatatggtggggccccaaaaagggtgggaaataacgtgctggccggttaaatagcggaaacctccaataagggcgagttgggctcccaaccccaggccggcgttccggaggcctcacacggcctggtcaagcgcaaacctttgggtgccaagggacacctggcttgcctgggagttttccgggtcgcgcctttggttataataagggatcctaactccccccggccttaaaaaattggggccagaccaatttggcctcggaagggaccagacaagcccgggaaaaattggggcgaaacagccaacggggggcaacaaaatggccccaccagcccgggaaggcgaaaccctctggtcccaggcaacttgcggagcacctaacaccgccggtccaaaaagggtctccaccaccaccgccccgtatagggataaaggcgtttctccccctgtgggcaccgccggagtaacaccattggtcccaacctacagcgagaacacttagtgactattggacacaagtgttgtatttcgtcggggagtcactcggaagatacagatacttcccctcttcggttagtacacgaaagaagttggttttcagaaaaacaagggagggacggggatcttctattgctgggcgccccccagagaggtttcttatccaccctctctggaccctgcggcatgagaggcattcccgcagacgacgcgtttggaagaatagacgccggtcgcccggtttatgtaaacaactcgggccctgcatgaatggaaactgacacgggctattacttctaaattgaaatttgccccttccaaaaaagcccactgccaacataaa

SEQ ID NO: 696545 - DNA, 107 bp, Homo sapiens
ggacccccgcctctatatacctaccctactccattgtaaaaaccttattcattcttatagactcaggtcaatgactgccttctcgggggcaggtatgatgaaggacg

SEQ ID NO: 696546 - DNA, 925 bp, Homo sapiens
  misc_feature (132)..(132): n is a, c, g, or t
gctatggccccctcctaaatggcgtccacaaaaggggtccccctgcttcccgtaatatttgtgctcggctttcctccttggggaatataaaaaccacccagtgcgtgtcggggtaatgtttttggcaggccncacatattattgccacatacccggtcttatatatattgggtttatacctacttgatgctttacctttccttgttgcgcatagacaaatgttcttattaacacggggtggacactcgccgctgtctcatgtatccccacacaacgcacggttacaccactcgcaattaatgcattaccacaacgggcgcacacaaaattcaggtgcacaacatttccgtcttagtttaacacccataatatatatggatatcattcttctaccgccactcacaagcttaagtgcctatagcagcttaataactacctaaaaagcttctaataaatatctatgatattctcctctcaccccctcccaccatacataatgagtgaagataagggtcctctcgtccgcaatacaataatctcctcctccagcacaaatttctctcaacaagcttgatcactcaatatgaatattatatttctggagactatcatatgctcgtgcgctgccaccgtcttccctccatccttaaattagtagtacatccgcctgtgtaatactcttcttacagtacaagtggataactcaatagatgacagggaggttttctgcgggggcccaccacaacagagatcagtagtgatacggtcaggaacaaaatacactatctgatgcgactgggttaagacttcttgtcttcagtgtaccgcatctggtgtcagagagccgcctacccgaaacacaacaagacggcagaaggaacagttaccccctcactcatataacaaaaaggatcaacaaacaacc

SEQ ID NO: 696547 - DNA, 374 bp, Homo sapiens
  misc_feature (326)..(327): n is a, c, g, or t
attccagctcccttttactggagtctgtggttgtgtacaggtatgggccaagtgtaaaatctcatccattttaagaacactcgggaaatgagtaaagaaaatgtaaagttgctgctagtcaaatcttttggaaagaatttctggaagtggtcactttaaaaattattttccacccttgcaaaattgccacatttaaattgttttactggcagttctatagtagtccagactttagaaaccaaacacaacaaaatggcttgttgccaatatggccacaccaggcccatcaaagacgccggcaccaccagccagaatagttggttttnnaaaaaaatgaagtcttgaatgctgtgtcaagaaccggcccaaaaaat

SEQ ID NO: 696548 - DNA, 312 bp, Homo sapiens
tgcgataagggccaatagggatacttcttcttgtctaataaggattatctgggaaagcttcattcaagtcctctaatggtcatctgatcaaagtggaattgagttcttcatcttctccatctctttctcatattctacaatcctggccttggagagagacacccacgtcaggacaagatttcacatcttctttttcttcggcatccaccgtggtgtaatatttttatcctcaagcacgggaaccttcagcgcattaaacttcttctcaaagtcatccaccaagccagccttggccacattggccttatcgag

SEQ ID NO: 696549 - DNA, 2396 bp, Homo sapiens
tcccacgaggaataaatttaagaaaatatttgtaggacatgcacattgataacaagccctaaataaaaatagaggtggactttgctcatggagtgttacatcagttctcccaaaactaattgataatttcagtgcaatctctggtaattatagcagatttttttttttgtggaaattgagaagctgaatctaaaaccgatatggaaatacaaatgagtaagagtagccaaaacagtaagttactcatcccagtattaagactgtgcagctacagtgatgagagtgtagtgctggtaagaggactggcacgcaggccagtggggtggaatggagcccggaaagtgaaccacaaacttttggttcacagaggtaccaggataattcaagggggaggaattgtcttatctacaggtggttctggcaacagagtattcacaggaaaaatggtgaacgttaacccttgcatcatatgcaaaaaattatttgaaacaggtcataagaactaaaaccatcaaacttctaggagaaaatacagggaaaaatctctgtggccttgaccatgcaaaaatttcttgggacacaaaaagcatgagccacaaaagaaaacgttgataggtgggatctcatcaaaatttcaaactctctttctttgaaagacagttaagaaaataaaaaggcaagccacgccctccaaaaatacatgcagtacatatacaggacaaaggacttatttctagaacctgtaaagaactcttagaactcaataataagaaaacaacccagtaaaacaatgggcgaaagatttaaacatgcatttcccagaaggtatatgagtgggcattaagcacacacagggtatcattatttatcagggacatgcaaattcacccatgagctacctgaacatacttgctagaatggtcaaaatgaagaagagacagtcttcattgttgataaggatatggagcagttgaaacgctcacacgttattgataggaatgtaaaatggggccgggtacagtggctcatgcctgtaatcccagcactttgggacgccgaggcagtcggatcacttgaggttaggagtttgagaccagcctggctaacgtggcgaaacctgtctctactaaaaatagaaaaactagccagacatgatggtgaacgcctataatcccagctactcaggagactgaggcaggagaatcactggagatggggaggatcacttgaacccaagaggcggaggctacagtaagcagcagtcgtgccactgcactccagcctgggggacagaatgaagctctgccaaaaacaaaaatagggaatgtaaaatggtaccattgttttggaaaacagtttggcagtttcttattaaggtagacgaacacttccatgtgaccaaacaattcaacttttatttccccaagagaaataaaaacctatgtccatgcaaagactgttactactttatgtataatatcaataaactgaaaataaccctgacttccatcaagaatgaaatggatatttggtatgtttgtagcagtggagtgccacacagcagtaaaaatgaatgattattaatacatacagcagtatctatggatctcaaaaacagggaaagaggccaaacaatgaagtatgtgccatacaatttcatttatttgcaattctagaagctaaactaatccatagggacagaaggcatgtctgtggttgcctggggttgggtgtggagggaaagactccctaccagtgggtacaagggaactttctgggcatgatgagaatattctgtatcttcattgtggcttgatgttatgtttgtcaaaactcattgaactctacacttcagatgggtgcattttaccatatatgtcatctctcaataaactgaattttttaaaaattaaaggaatttacttaattgcaaaagaggactggaaaggaaaggctgccgagcatcttggcctgctgtacccctcttccttcaaaggagggtgtggccacgtccgacagcagagttgaatgaagcctgcatgcttgcacaacatcagaactgtcagaatgtcaagatggaatactttcaattgagttttacaaaaagacaagaaatttgctgggtgtggtggcgcatgcctgtaatcctagcactttgggaggccaaggtgggggaattgcttgtagtcaggagtttaagaccatcccgagcagcaaagtgagaccctgtttttacttaaaaaaaaaaaaaaaaagaaaagccatttagaattctaaggtgaagctggacgtggtagctcacgcctgtaatcccagcagtttgggaggctgaggcaggaggatcacgagctcaggcgttcgagaccagcctgaccaacatggtgaaacgtcgacgc

SEQ ID NO: 696550 - DNA, 127 bp, Homo sapiens
ctatgctagtggtgagtgatgatctggtcatggattctgctccgggtagttggcaggtgatcttgaatctgacttgtgatctaccaactctggctccaaaatggtgggattacggggtgaagcacgt

SEQ ID NO: 696551 - DNA, 321 bp, Homo sapiens
gaaccctcagttctggtaattgctcacacctttcccgggaaacttatgaataatctaccccttgtttagcatataatcaataaataaccataaaaataggcaaccagcagcccttggggctactcttcctatggagtagccattctgtatttctttactttcttaatattaactactttcactttgtggactcgcccgaattcttttcttgagcaaggtccaagaactctctcttggggactggatcacgaccgctttctggtaacaggagcaatacaaatgggctattagtaaacggacgctttaagtaactctagtaca

SEQ ID NO: 696552 - DNA, 809 bp, Homo sapiens
tggcgtggcgtggcgtgatatagggtctagacgtgagtatctcctgccaggccagcatgcgccttcggggtgccgcggctagacaggccagtgagtttgcggccaggacaccgggttggttggtctgtagagtcgtgagcgctgagtgatgcaactgatgtctagactgggtagccctgggtggtgcccgtgccgggctgggactgttgctgggtaccgccgtgcggccttggattcctgatgcctctcctttacagtgcaggcgactgtgaagactgcgatgcacaggcgtcatggcactgccaggacacggagctcctgcccaatctcccgtgaggatgtactagcgcagagcattcaggacttccgagacagctcacagtgattgcctacctgacggatgctgtcacaacacgagtgggagcgtgtgagatgcctctagtgctgactcagtcttccacggaaaggacaagagactggtgctgtaacgtctgaattttgtgctagaccagccttgtggtctgctgacggcgtgagtgtggaggagctgagaagcagcctgcgagggcttgcgggggagattgttggggaggtccgatgccacatggaagagaaccagagagtggctcggcggcgaaggtttccgtttgtccgggagaggagtgactccactggctccagctctgtctacttcacggcctcctcgggagccacgttcacagatgctgagagtgaagggggttacacaacagccaatgcggagtctgacaaatgagcgggactctgacaaaagaaagtgaggacgggga

SEQ ID NO: 696553 - DNA, 723 bp, Homo sapiens
tgggggaatggtggtgtattttctaccacttgtgtattgggaaaacctgtatggcagtgatttattcatattattcctgtccaaagccacactgaaaacagaggcagaaactatgtactctgggtgtgatctcttgtcctcagtgtctcttctagggctcctgtccctcttgctttatagctagctgcccggtggaccaatggtacagtgtgaaagcaaggtagcagcttgcgggaggaggcctgtctgggcttaccagtctatacactggtggcctcaacctcccagacgagggcagagaactggtggggcacgctcgttggcgtttctaaggcatgggctgggaaaaggtggggacgctcattggatagactcatgatgggaaactatttttggaaacaggcttcctccttcaggagagatcatggcggactaaactggtgagcaatcccagtgcacctgggcagtagatcctttctcttggcaaagtactggtctcttgggtctccagtaaggtgggaccaccacatgacatcatttccccgggaaccgtggtcactggactaacacagacaatggggactccagagcctcaagagccaggagagggccagtacatacagagggagtcgatggggactccatttgagtcctgccttccgacactcagaaggagcccaggccggagtgtcagggctcggctgggggattgcggccaaaagc

SEQ ID NO: 696554 - DNA, 718 bp, Homo sapiens
gacagaaatcgcatgttggacatggtaagagtgggtgtgtcggaatatgatactgtgtcgagtggccttaagagccaacatgttattaacatactttgtaggtattaaaggttctctgtactttctatatatagttaatatgttgggcactaatacgattgcttgcctacttgttaaaaccatttgatcagaagtacttcacagatatgttggtttagaagtaaaagcaggaataccaagtattattatgtcagttgaattttgtgcacttttcaaagtggtaactgttaagatgtagggaattatcttaaagcataaaaccaaattttgatcagtttaagattattggttgtttgtgaacccaactaaaaggtgaaacagaaatgtgtgtacaattttaaatggtatatgtcacaagaaaaaaaacttgattttttacctgtggggccaaacttttttatgagacagtctcgctctgtggtccaggcaggagtgcagtggggctatctcagatcagtgaacccatgcgatcttgggttcaagcgattgtctgtgcttcagacttccctggtagctgggattacaggccacaacgccacatgcctggtagatttgatcctaagtaagagatgggtttcacgggtagccgggtggcttgaatctgacttcgggatcaactgctggctccaaatgtggatcagcatagcactttttgcaa

SEQ ID NO: 696555 - DNA, 150 bp, Homo sapiens
  misc_feature (28)..(28): n is a, c, g, or t
  misc_feature (74)..(74): n is a, c, g, or t
  misc_feature (77)..(77): n is a, c, g, or t
gcaagccgaacggttgggcttatccgtnactattggctgaagtcaccggttagaaccaattattgcacttgcanaanccattgtacacgattgccaaccaggttttagcgtcctcaaaatctttgatgtgggctaattcggtcacttaaa

SEQ ID NO: 696556 - DNA, 171 bp, Homo sapiens
  misc_feature (2)..(2): n is a, c, g, or t
  misc_feature (52)..(52): n is a, c, g, or t
  misc_feature (113)..(113): n is a, c, g, or t
  misc_feature (131)..(131): n is a, c, g, or t
gncctcaaaaaaaggtctcttttcgccaggcacatgtgctcatgcctgtaancccagcactttgggagggtgaggcaggaggatggcttgagctcacaatgttcaacgaccangtctgggaacatagcaanggtatcgtctctaaaaaaataataaaaaattttaaaaagc

SEQ ID NO: 696557 - DNA, 152 bp, Homo sapiens
gggaggatgaagagccagatagaaaaggagggagctatctcaggctgcaagcagtgacagtgcccaggctctgatgcgtctctcacagctgtaaagtgtgagacagctgccttgtgtgggactgagaggcaagagtgttcctgccacaacct

SEQ ID NO: 696558 - DNA, 423 bp, Homo sapiens
tggaaaatattatatgcatattcttggtaaataccttattaatttaaatcagcttttaggaagaactttgtcaaattcgatatcagcatatattagagttctcttcaatcaataaaaaactttttgcaccattccctcaagtggatgcagtattctcaagtgtccgtcatggagcagggactttctttgtttactgttgaatccatcctcgccgcctctcacacactctggcatcgtaggcattaaatgaatatcacaatgaatgaaccaattgccagcatttgcctgcaactgttatattatctgtgcactttatgactttgtttagatgattttaaatgctgagatctttcctttttgatattttgcactaaacatctaagagtatagatggcaaatttcctctgactaggatcatatact

SEQ ID NO: 696559 - DNA, 383 bp, Homo sapiens
  misc_feature (140)..(140): n is a, c, g, or t
ggactcgcgtcgcgccgcgagacgtgaagctctcgaggctctccgctgcggtcggcgctcgcctcgctctcctcgcctcgcccggcccggcccgcgcccgccatggagaagactgagctgatccagaaggccaagctgcnaagcagcgaagcgctacgacgacatggccacctgcatgaaggcagtgaccgagcaggccccgagctgtccaacgaggagcgcaacctgctctccgtggcctacaagaacgtggtcgggggccgcagtcgccctggagggtcatctctagcatcgagcagaagacccgacaccttccgacaagaagttgcagctgattaaggactatcgggagaaagtggagtccgagctgagatcatctgcac

SEQ ID NO: 696560 - DNA, 343 bp, Homo sapiens
tgggcacggtggctcacgcctgtattactggcactttggaaggctaaggcaggaagatcacttgagcttaagagtttgagaccagtctagcaaacacagcaagaccctctcactacaaaaaataaaaaattagcccagcatggtggtgcacacctatagtcccagctactcgggaggatgaggcaagaagatggctggagcctaggaaatcgaggctgcagtgagccatgttcatgccactggactccagcccgggcaacagagcgagaccctatctcaaaaagtaaattaaaaaaataaactctaaaacaaaaaataaaaagtacacagtcctatcttctcc

SEQ ID NO: 696561 - DNA, 168 bp, Homo sapiens
aacggtcgacggacataaagacattcaaatgccagatggcatcaggcgagaggagtatgtgcagtgggtggagttgctccccgaaacccagacgccctcctggatgggcctgtccaacaacgtcgagagagtcctccttaccacacagggtgtatacgtgatcagtaa

SEQ ID NO: 696562 - DNA, 149 bp, Homo sapiens
tccataattgaaaaatccttgccggtgcctatagtcccagctactcatgatgctgagacaggagaaacactagaacccaggtggcagaggtcgtagagagccaagatcacaccactgcactccagcctgggtgacagggagattcagtc

SEQ ID NO: 696563 - DNA, 1271 bp, Homo sapiens
gcggttgtgagcggcggtactgcggcgcatgccagcggggcgccgtcggcggactgtgccctgtcggccgcgggatgacgtgaacgcggaccgagcgccgtcgccttgtggagcatgtagcgcgtgcgccgccgtcgggctcgtcgctcctccggctcggtgcgccgcgtgcgcgtggacgtccgatctgccgccgtgagagcgaggaatcctactgcctgatcgtggcgccgtgcggtcgtgcgtgaggccgccgtcttgccgcatggctctgagcgctgcgcgacattgataggctgtgtgccgcttgtgtggcaggctgacaatgcggctggtgtggtttgctgccctgagtgaatgattacttttcttgtggtttctggggttgtagcatttgccacttccgtttctcatcaaactatgtcctgtgaatacagtgccaaaacttgagtttgtcttgagatttcgtacacgagttcccgtatctcagtatgatttgaagagaaaagcacatggatcaacggttatgaatcgacacgtgtaactacgtacctgcgaggcagaggacagacgtgaccatttggagtcttggcactaccggtccctgcagtcttggtggcaagaactgcccgaaggcaagagaccagatgtggtatgaggatgccttgggcttccaggtcgaccctatcatttctgtacctgcattgggaacgcccggtaccagaggacggcggacaccggtgtggacgctttaccaggtgctgacgttccttggttaccatgttggtcccctttgactaccgaggtgggggtgccacgggggaccgccatcctgaagggggtcgctgacccaatgaggccagccgcgatttggacgggaaccaagggcgaagtggtggacaccccgggtcacttgttgcccacctcgggccgggtgtgccactgtgtgcgcacccgtacgaagaacccccagccccaaatggagccccaacacgcgcgcaaagacccaagaataaccacgcggaggacgaccacccaacagcgcactataacaaggagaaacacctacacagttgagcaccgccacacagtacagcacgagactgatcccggtgcgccctccaagaactgactcgagaccacagacactagaacgctaccaggaaccactcacagcaaaccacacgacgcccaacacgaaacaacaagcaacagacgccaccaccacagcccgagcaaagaacaaaacgacaagacagcgaacaacaacc

SEQ ID NO: 696564 - DNA, 148 bp, Homo sapiens
gcacagatctgcacattatctaaacttaagtataatttaaaataatttttaatacagcttaataagcatcctccatcctagttggttgtacttactgtaatgatttcacctttccatgtattataatcttttgcctatttcttaatgt

SEQ ID NO: 696565 - DNA, 810 bp, Homo sapiens
  misc_feature (338)..(338): n is a, c, g, or t
  misc_feature (353)..(353): n is a, c, g, or t
  misc_feature (449)..(449): n is a, c, g, or t
  misc_feature (463)..(463): n is a, c, g, or t
  misc_feature (476)..(476): n is a, c, g, or t
  misc_feature (478)..(478): n is a, c, g, or t
  misc_feature (481)..(481): n is a, c, g, or t
  misc_feature (518)..(518): n is a, c, g, or t
  misc_feature (579)..(579): n is a, c, g, or t
  misc_feature (605)..(605): n is a, c, g, or t
ctccaattttgcaacgacgggcgcggaggaggaggttcccggaagccacgcgcagctggagcagcggcgaccgcagctggaggcccggagcgcctgcggggctggcagaggcgagggaggttgcgggtaggaatgggcggactgcgcgcgccccctgcgtcccgcgcacctcggggccggtccatgctcccgacggctgcgggcttcagcatctggggccaggttggggcggcggggtccagggcgcaggtggtgcggccgatgcgccgggccggaggctgaggccgcgctgcggggctgggacagcactggcatctccagagcaggcccggggccancaagggaggcgccgngatgccagacgaaaatatcttcctgttcgttgcccaacctcatcgggttatgcccggattgtcttcgccatcatttctttctacttcatgccctgntgccccctcacggnctcctccttctancntgntcagcggcctgctggacgctttcgatggacacgctgntcgcgctcttaatcaaggaacccgggtaatggggccatgctggacattgcttgacggaccnctgatccaccattgtgcctgtatggntcaaccttggcccttgttgtaccctggagccacgctgttcttccaaatcagcatgagttttggatgttgccagtcacttggcttcacctccacatttctgtggtccgaggcagtgagagtcacaagatgatcgacttgtccgggaatccggtgcttcggatctactacacctcgaggcctgctctgttcaccttgtggctgcgaa

SEQ ID NO: 696566 - DNA, 756 bp, Homo sapiens
  misc_feature (341)..(341): n is a, c, g, or t
  misc_feature (350)..(350): n is a, c, g, or t
  misc_feature (365)..(365): n is a, c, g, or t
  misc_feature (377)..(377): n is a, c, g, or t
  misc_feature (400)..(400): n is a, c, g, or t
  misc_feature (428)..(428): n is a, c, g, or t
  misc_feature (430)..(430): n is a, c, g, or t
  misc_feature (485)..(486): n is a, c, g, or t
  misc_feature (508)..(508): n is a, c, g, or t
  misc_feature (519)..(519): n is a, c, g, or t
  misc_feature (550)..(551): n is a, c, g, or t
  misc_feature (558)..(558): n is a, c, g, or t
  misc_feature (574)..(574): n is a, c, g, or t
  misc_feature (581)..(581): n is a, c, g, or t
  misc_feature (594)..(594): n is a, c, g, or t
  misc_feature (610)..(610): n is a, c, g, or t
  misc_feature (618)..(618): n is a, c, g, or t
  misc_feature (631)..(631): n is a, c, g, or t
  misc_feature (638)..(638): n is a, c, g, or t
  misc_feature (644)..(644): n is a, c, g, or t
  misc_feature (646)..(646): n is a, c, g, or t
  misc_feature (650)..(650): n is a, c, g, or t
  misc_feature (671)..(671): n is a, c, g, or t
  misc_feature (695)..(695): n is a, c, g, or t
  misc_feature (738)..(738): n is a, c, g, or t
ctccaattttgcaacgacgggcgcggaggaggaggttcccggaagccacgcgcagctggagcagcggcgaccgcagctggaggcccggagcgcctgcggggctggcagaggcgagggaggttgcgggtaggaatgggcggactgcgcgcgccccctgcgtcccgcgcacctcggggccggtccatgctcccgacggctgcgggcttcagcatctggggccaggttggggcggcggggtccagggcgcaggtggtgcggccgatgcgccgggccggaggctgaggccgcgctgcggggctgggacagcactggcatctccagagcaggcccggggtattttnttgtgtttntgttgtgattttatntttaaaaatatntttccttgtttcgttgccctaancttcattcggtttattgcccgtgatttntntttcgccatacattttctttttctactttcatggcccttgctggcctcccttcanngggccttccttcctttctaacncttgcttcagncggtccttgcttgggaccgctttttctgatnnggacacngctggctccgcggctnctttaantacaaagggatanccctggtttttggggngcccatancttgcgactattncttgtancggtancngctntgcttcccacccatagttgcnctgttttgggttcaaaccttgtgncccttgcttgttacctcttgggagcccactgcttgtttctttnccaaaatccaggcattga

SEQ ID NO: 696567 - DNA, 1041 bp, Homo sapiens
  misc_feature (282)..(282): n is a, c, g, or t
gccattgcaccccagcctgggtgacagagagcgactctgtctcaaaaaaaagaaaaaaagaagcaataagatgacctaacctcatgcaaatatgtagttggtagaaggtgtatttttaaagttttcagacagttgtgggtatttgttaacactaaatcaaaacttcacaagtggtggtttcttaaattagttacggtggcattttacatattaataaatttattccatcagtactcattgatctttcttgcacagtaaatggatcttttgctccatacttgnatttataatatcatgcattagttacttggaatatattggtttatgttttattgtgtcaaaaatcacttttagtttaaccaccaatcttactttaacacgcctttaagtattgaaaagctgccaagcctacagtagaaggaacaagtttttcaaagtccagaggaaagcttaaattttatcattgggaacaaatacgtatttcccttgaagtgacaacctctcacttcatttatttttgagaatgatagttgaactggttttttagaccgagtttcactctgtcacttggctggagtgcattggcatgatctcggctcaagcaatcctctcacctcaggctcctgtgtagctgggaccgcagatgtgtggcaccacgccaggctaattttcttatatgtttgatagagacacggtttcgttatgttgcctaggctggtctcgaactcctgaaggagctcaagccatctgcctgctttggcctctcaaagtgctgggattttacaggcgtgagccactgcgctggcccagttgtacttttaaataaaaatgatgttctgtgaaaaaagtgatttttcagttcacagttaaatcacggattctttaaaaacaaacaaaaaaagcgcttctggttaactttccacttattcagaatattagagacatgtcaagatttaacaacattaatttttactgcttcatcaaaaacatagcctgaatttcttaagaatgtctgtcgacgcggccgcgaatttagtagta

SEQ ID NO: 696568 - DNA, 720 bp, Homo sapiens
ctggcacagctggtcatgtgacgaaggtcggaggggccgatggggaccaatgctggatgatgacttcaaagagatggagaagaaggtggatgtcaccagcaatggcggtgacatgaagtgctgtgccatggaccatcgatgtacctgcgagcccaacccagcctcgcgtggctaatgctgaccatgctcaacactggtgtccaacgatcctggtggccagtgtgagagaacccctggctacccgcagatcggaggtggcttctggtgctgatgtgcatgatcctgccacgtggaagtgacgctgggcaggctgagtccaacttttgtgtgacgctattgctgtgatgccgtgcgatgtccactgaatgcgccttggcacgaggtgaatggactcccttggacatcgcaggtcaacgcacgaaccttcatttgacccccatccagaacactgtgcgagaaatgacctgaaggatgatccagcaccacctgaagaaacttggagtggccgccgcctgtgacttttgcactacaagaatgaagcggcaggcgcaaagatccccgcattgaggaagctacagccacgtgcgctgcgagaagttcatgaggagtccaaggatggtggcagcaagaccagcatgtcataaatctcctggcagactgacctcatgagcagtgtgagtccagctcatcggacctggtggatgcacatttggacttacc

SEQ ID NO: 696569 - DNA, 1153 bp, Homo sapiens
ggtagaggctgaggcaccgccagagctcgctgagacagagactgagaactgcccccggccagattccccccgtgagagacccgggtagggacagggacagagagacgcctctagtgggcagaggccctgggaggcaaagacccccaggagagatttacccaccccagacggaaagcgcggctcagagtcggacgaggggagacttgtcagatgtgacaactgccccctagtgtctcctggtgagacccctgaatgctgatcccctgtgtggtgcatgccctgtgtgcctgttgtccgtggctgagggtgacctatccttgtgtttgagacgcgattggggacacaatgccctgcatgggcttcctctttctcctcttcctcccgctgctgcatgccgcgtggggcctcggcttgggagcctgcacagtccaggcctgtccgaatgcttccaggtgaatggggctgactacctgctggcaccatgaacctgcacttgtgccctgtgctgtgggctgggcctgcctgtgcctcttctgggaccagacgcagcaacacagctacatgcagctgccatgtgacccccactggtcgctgggcggctgggctgcgcaacaacttctgccggtaacccagacggtgacgtgcaagcgtggttgctacgtggcttgagacacgaggacgggcatctactgggggctactgcggacatccccttcttggtcgacatttgcaaggctacctggggatggcttgtgggactcaaggggcaacccccaggccttaggcggcccaacgggagcattcccagaaagctcaagaggccaggtgtgcatacagctattgccgcttgaacggcgctccacttggagggcatgagcaggcgggggatacaacacgtgaaacttggaggcctggaagagcagccattgctcagggtgcaaaccgggtgtccccgaccacacgatgtgtacaaacattattttgcgaccccgcgaacaacgttgttgtcacacgaccaagctgctgcacgtacacaacgagttggacctgctttaccacagcttggcagacagcagtcataccatcatcctcgcacaccgtagccagcgacagagaacaccacgcgccgcggtcagccctcactgcgtccacc

SEQ ID NO: 696570 - DNA, 657 bp, Homo sapiens
  misc_feature (338)..(338): n is a, c, g, or t
  misc_feature (353)..(353): n is a, c, g, or t
  misc_feature (426)..(426): n is a, c, g, or t
  misc_feature (452)..(452): n is a, c, g, or t
ctccaattttgcaacgacgggcgcggaggaggaggttcccggaagccacgcgcagctggagcagcggcgaccgcagctggaggcccggagcgcctgcggggctggcagaggcgagggaggttgcgggtaggaatgggcggactgcgcgcgccccctgcgtcccgcgcacctcggggccggtccatgctcccgacggctgcgggcttcagcatctggggccaggttggggcggcggggtccagggcgcaggtggtgcggccgatgcgccgggccggaggctgaggccgcgctgcggggctgggacagcactggcatctccagagcaggcccggggccancaagggaggcgccgngatgccagacgaaaatatcttcctgttcgttgcccaacctcatcggccatgctggacattgcttgacggaccnctgatccaccattgtgcctgtatggntcaaccttggcccttgttgtaccctggagccacgctgttcttccaaatcagcatgagttttggatgttgccagtcacttggcttcacctccacatttctgtggtccgaggcagtgagagtcacaagatgatcgacttgtccgggaatccggtgcttcggatctactacacctcgaggcctgctctgttcaccttgtggctgcgaa

SEQ ID NO: 696571 - DNA, 180 bp, Homo sapiens
gtggctgactacgggggaaggtggctgactacgggggaaggtggcgactacgggggaaggtggctgactacggggaaggtggctgactacgggggaaggtggctgactacgggggaaggtggctgactacgggggaaggtggctgactacgggggaaggaggctgtggcacggtgtgaag

SEQ ID NO: 696572 - DNA, 958 bp, Homo sapiens
aatgtggggtgacatcctgaggtttcatgtgaggcgctgtctgtgggattgtgctcgtgtatcttagacgtgaagtgttccggggggaaggtgacgccgataggtgacgttgtagcctacctagatcacgcattgtagcaaacacagagtcaggcgccaaagaagtcccgagaaataggcgcagcggagggaatagggcaggaccgatatcgaaggttcttatgtgcagcaggaaccggggagcgcgcagaggtaggaagctaccgcggatcgtgtcatggggagagtaatctgggagagcgcaccgccggacagtctaacgagttccatgtctcgacttgctgctcgtgccctgcttgtagggaccgtggtggccgtgaacggtcggtccgacgttctgtccggcgcgccgttctgaacggcgggtcgcgttgtcgcagccggttggccgtgcgctgttgtgcgcattccgtcctttagggggttcccttacccaatttgggctgctacccttgtgaacgccggtgcacgcgtggggacgcccgcgagttcaaggactggccgcggctcagggggggggggccctataaggccgtgggcccgggggcccgggaaccagggggggtcgaacacactagggggacttgctggggccttggaaacaggccgccggcgggtaaacggctgcccgtatgccgggggtgctgctgtcccgtggggcggggcagataaatgggggggccctacccgttgtgtcccccatccacgtttttcaaacaaaaaagcacaacatacgtcagacggcaccaacaaacaaaaacaaacacaaaaaaagaggggccacaaaaacaggaggagctcgtaaggaagcccccggaggagcaccacacctgtatatacaaaagggggtctcacaaaaagggcgccaaaaagggagacacataaggagccggacaac

SEQ ID NO: 696573 - DNA, 142 bp, Homo sapiens
gtatctagcgatcccttaggagccttaccctggggcctgagattacccagctctcttgtctcagcccaccactcattgtgacttatgaggagcaagcctgttgctgcaggagacttggggagcaggacacttgtggggccct

SEQ ID NO: 696574 - DNA, 161 bp, Homo sapiens
cagctggaccagcttgtcatgcttccgcttcttcttgctctgcgcttcctcacggaactgattcgggggacattgtgcctgatttacgcgtctttatggctacttttgtgtttcccttccagagtacccaatccatactaccccaacctgcccatttcccc

SEQ ID NO: 696575 - DNA, 124 bp, Homo sapiens
ataggaccaatactattatattatgtggtccgttaaccctatttaaaagtttggggttttttcttggtggtagaggggcccagaattccattttgaatgaataaaggttaaaaaaaatccccca

SEQ ID NO: 696576 - DNA, 245 bp, Homo sapiens
  misc_feature (72)..(73): n is a, c, g, or t
  misc_feature (76)..(76): n is a, c, g, or t
gcctactactactactactactactaaattaacggccggtcgactgctggtcagcggtgcccagttggcatnncgntggagcatgacccgcctgccggaaccgacacagtggctggacgccctgatgactcaggacgtatcgttactcgccttgggtgtagtggcggcatcgatcctcgcctacgccctgtccatgctttgctggctggccgccttgccgacctgccattaggccgtggtcgacg

SEQ ID NO: 696577 - DNA, 263 bp, Homo sapiens
  misc_feature (130)..(130): n is a, c, g, or t
  misc_feature (142)..(142): n is a, c, g, or t
  misc_feature (194)..(194): n is a, c, g, or t
  misc_feature (196)..(196): n is a, c, g, or t
ttattatttttttggtcctttggttagaaagagcagactttcttagggctttttttccccacctgtacccattggcattctcaagttgctggcttttctggtacccagccaaggatatgtaaagcaaaangaaaacttaggnattcactactgtattattccttgggtcccaaagaccctagtcagtcttcctncntctctccacattttggaattatgcttatttaatatatagcgtccagagctttttgtagttaagcagg

SEQ ID NO: 696578 - DNA, 399 bp, Homo sapiens
gcggccgctactactactaaatttacaccccgtcgacgattcgggcttcaggtgcaccacgcaggttggacagtgacagcagcgggaactcctggcgctggcctggcggttcgaggcgatgaaacagccggcctccaggtgctcggcgcggtagaaacgccggcactggttctggaagtcctccagcaactgattcaaacgtttgcgccaatcctcctcgcccagcaccagcaggaaatcatcgccgccgatatgcccgacgaaatcccggctcgggtcgacgcggtcgttcaagcattgcgccaggcacaacagcacctcatccccacgcccatagccgtagatatcgttgaacggcttgaagctgtcgatatccacatagcgtcgacgcggccggaa

SEQ ID NO: 696579 - DNA, 415 bp, Homo sapiens
  misc_feature (396)..(396): n is a, c, g, or t
  misc_feature (403)..(404): n is a, c, g, or t
agcctatttaatatacattaaagaggccgggcgcaaagtggcacgccctgtaatccccaacaacactttgggaggcccccaggcaggcgggtccatgaggtcaggagattgagacccatccctggctaacacggtgaaaccctgtctctactaaaaatacaaaaaattagctgggcgtgatggtgggcgcctgtagtcccagctactcgggaggctggggcaggagaatggcgtgaacctgggaagcggagctcgcagtgagccgagatcacgccactgcactccagcctgggcaacagtgagactctgcataaagagcatacccatgtgtgtacctatctatctatctatctatctatctatctatctatctatctgtatatagatatattaaantgtaaannaatggcataaa

SEQ ID NO: 696580 - DNA, 599 bp, Homo sapiens
acacagctcaggcataaggcaggccacagaggacaaggacagcatggagacatgacgactggacgtcggatcccggcacagggaccagcgtgatggggtgtgtgtcctgggcctgcacctggccaaggagctgtgtagaggtagacgaggatggtgactcctggctgcaggtaacccgcaggctccccatacctacccaccctacctcaccactctagaggtgagccttcgctatagaagcatgaacctagcattatacactagagagccacataagcatctagctacctcaccctggctcgcactcagcagggagccacagcagtggcttggagctaggacatacacccagagcataagttatgcccctatctgagtgtgtaccaggctgagcacctaacggcacaagcacaagacacctagtgcctctcggaagtccctgggatgcccacctcttggccatggagtctaccggcctagtacatgttccctgatggagcagctgctacaaaactactgctgctaacaaacttcccttgcctgatggcccttgtgactaacagtgggtagtccacctaggagcggactttacagttgct

SEQ ID NO: 696581 - DNA, 128 bp, Homo sapiens
gcggagagactgtgtggaagaagttagatttacgccgatgaatatgatagcgaaatggatgggggcgtaggtttggtctagggtgtagccggggagagtcttcgactgatccagagtcttcgcctgat

SEQ ID NO: 696582 - DNA, 909 bp, Homo sapiens
tgcttattctctcgaaaccacaaacgacattgggacaggatccctattattcgacgcatgaacttgcagtccgtattgcacagctctaagacactcactataatacgagccgcgactggtgactcaggccaggacccaccttacatagtgtaacctgacgcacaactcctaacgaatgctgttgatctgatagactaggagcccatgcaataatgtacatagatctttacgtacatgatgtaatcaaccaattgatagattcgtgtggcctcgtgagaaccttgaatacggtgcgcccttacatgaatctgggaatgtgctcccggactagttgggcctgttcactcgcgccgccatgtaaaatcgagaaggttcagggacctctacatgtaactcgtgaacacattaccatcctaacttcactactgcccgtgtcgacggacttcatacgtattcggatggagcggccgggatgcaagagaagcaccgtggtagacaggcacgttcatagaccccttcaccctctacgcaagggagaatcatgacccttcaccgaccacactgtgggaactgaccctttagaaacagaaacctacgaagcaaacgtatcgtgcgctgttaacacccatcagacaaggttgtgactaccgtacagaatactgaaaggagaaataattcaaataaatcaataccaaatagaacaaagttacattcataaataattataaaaatcctctcattctcaagaaaaccgcccatcattatccaacacacgaccacccatccagcaaaacataaaatcagaacaccataatatgcctaagacacacacccataacaatactcatacccttaaactaataatattacccgagacataaagcagtgctgtgcatatcaacaccaata

SEQ ID NO: 696583 - DNA, 124 bp, Homo sapiens
ggtccagaatgggtcctgcgtggctagatggaacacggacaggtgagcagaatcctccccttgtgagtattaaaaacatttggttacggtcgggcacggtggctcatgcctgtaatcccagaca

SEQ ID NO: 696584 - DNA, 187 bp, Homo sapiens
gggagtcgtgtggagcgccgcactcccgggagcgagcctcacgtggctgaaatgcagatggactgccagtgactgggctgctctcagcacaccacactggtcccctcacagtggtctcccgcagcctggctgggggcgcagggcagcaggatttactcctcctagttatgtagtagtagtgcggcag

SEQ ID NO: 696585 - DNA, 709 bp, Homo sapiens
  misc_feature (526)..(526): n is a, c, g, or t
  misc_feature (554)..(554): n is a, c, g, or t
  misc_feature (584)..(584): n is a, c, g, or t
atacattccattgatacctagtctgttaagagtttttagcatgcaggcgtattgaattttgtggaaggccttttctgcatctattgagataatcacgtggtttttgtcattggttctgtttatgtgatggattgcatttattgatttgcatatgctgaaccagccttgcatcccagggatgaagccgacttgatcatggtggataagctttatgatgtgctgctggatttggtttgccagtattttattgaggattttcacatcaatgttcatcagggatattggcctagaattttctttttttttgttgtgtctctgccaggttttggtatcaggatgatgctggcctcattgagttagagaggattccctctttttctattgattggaatagtttcagaaggaatggtaccagctcctctttgtacctaaggtagaattcagctgtgaatccatctggtcctgagctctttttttggttgggaggctattaattactgcctcaatttcagaactcgttactggnttattcagagattcgacttcttactggntttagactgggacatgtatgtgtccagaantctatccatttcctctagaatctctagctgattgcggtagaagtgctataagtctctgctggtagttgcatactggggcatcagtgcgatatccccttgattatttttatggcactatttgatct

SEQ ID NO: 696586 - DNA, 274 bp, Homo sapiens
ccccccgggggggggggggccccttggggggaaaatttcccccttttggggggggggggaaaaaaaccccctcaaaggggggttgggaaacccctttgggggggaaaaaagcttcacccccctttttttttttttttttaagggggggggggggaattttttcccccaagttttttttttcacaaacccccccggttttttggggattccccaaaatggggggggggggttttttttttttttaaaaaacccctttaaccccccccggggggga

SEQ ID NO: 696587 - DNA, 125 bp, Homo sapiens
  misc_feature (65)..(65): n is a, c, g, or t
ctctttgtcatctgcgcatcctagacaggacaaggttgtgttacctttgcttgcatgaaccatgnaacctgtggacggaatcatttcatcctgaacttcaccaagctccgcctgtgggtgaggcc

SEQ ID NO: 696588 - DNA, 357 bp, Homo sapiens
tcagacatcatgagatgggccttgcgcccccggaatttaaagctctacttctatgctctcttatatctctctttaacatgtgtagcatatgtgtgctaccacagacacactggtggatcttagatgaaagagatccgaggtattggccaactacctgtggcattgcagaattcccggctacctatcaaacccaagtggacacgggtctacaggctttggaagacatcttacatctaggtggaaacccaacatctgaagtcaaaccggtggttaaagcgattccactcacttataaacccgagggatcatctccccatatgagagacgctgctaccttgttccccgaggttcgatttt

SEQ ID NO: 696589 - DNA, 391 bp, Homo sapiens
ccttggttgtgctgcgttcatgacgtttttaggtgggaaagatgatctgctgaatccactacaaggtgcaactgaacctcgtattgcaaaggccggttcagtctggcgcagaccatcagtggcacgattccatccttgtgtcagtcgagagcgcttcatggtgtgagaaactgatctattatcatttaaagcttcattatgcatgatatgttccactctattaacactaagaaatagtaccatcgatgagaaaggatatcaacctctatgtgtaccaaaaggggcgtacggcacacggggaatatttgcttgtgttgaggtacgaatcggaggtgttctgtctgacaggggcattattttttaatgactaaccctgcgcttttattacgtt

SEQ ID NO: 696590 - DNA, 115 bp, Homo sapiens
gagttaacaccgtcaccatcttggttgagaacatgaaagctcagcttggttgttattgcacatgacgttgatcccattcgagtctggttgttttttttgtccttcccggttttgg

SEQ ID NO: 696591 - DNA, 313 bp, Homo sapiens
aaggatgggagcaaaagcccagcatgtttatatgccagtggcaacaattcactgtgagaaaaatgtaaaggatgaattagttcctggagtgatacccttgaggggctaagagatttagtttacaagtgtagggattgacatatagaaacttggataatttatctgtgtcagtgggcagagatacagtttaaaagtgtagacagtggatggtggttgagtgggttgtgggagtttatggaagttctcttcaaatagcttcatgaaaaatattttctttcagtgaagtataggaagcaaagtcttcactgtaaaa

SEQ ID NO: 696592 - DNA, 523 bp, Homo sapiens
gctctccaggcccggttgaaggctccccgcagcccccccccacccattggaatggccaacaagggacctgcatatggcctgagccggaaggtgcagcagaagattgaaaaacaatatgatgcagatctggagcagatcctgatccagtggatccccacccagtgccgaaaggatgtgggccggccccagcctggacgcgagaacttccaaaactggctcaaggatggcccggtgctatgtgagctcattaatgccctgtaccccgaggggcaggccccagtaaaaaaaatccaggcctcccccatggccttcaagcaaatggagcagatttttcagttcctgcaagcagctgagcgctatggcattaacccccctgacattttccaaactgtggacctttgggaaggaaaaaacatggcctgtgtgcaccggacccttattaatttgggtgggctgcctcccatggtttggggctttaggaaaataagtttgtttatttaaataaaaaatttgtcctttttta

SEQ ID NO: 696593 - DNA, 428 bp, Homo sapiens
gcccatccacaactattgcccgaaatcaggggtgagcttcaaagtgcagtcccccccgatgtggaaaatgtttccatccccgtggaatgaggaaaacagtcacctgttctggccaaaggggtttggaaggacacaaaacccccgttggttactgaagatgacactgagctttaatggcttaaaacccagatcagggcagtgacagatcacagggacatttgtggctcccagttcaggacagaaaagactaagggtttggctggttcccttttccattttaggcccttatccctgtttagttttgaaagccaacttgaaaaaccatatgctagcatttccagtccccaactggggcttggtgtgaggactttttttatggctattgtgtcaggtccctgtggataaaggcaaagacagattttttttta

SEQ ID NO: 696594 - DNA, 856 bp, Homo sapiens
  misc_feature (35)..(35): n is a, c, g, or t
  misc_feature (68)..(68): n is a, c, g, or t
  misc_feature (73)..(73): n is a, c, g, or t
  misc_feature (78)..(78): n is a, c, g, or t
  misc_feature (80)..(80): n is a, c, g, or t
  misc_feature (96)..(96): n is a, c, g, or t
  misc_feature (98)..(98): n is a, c, g, or t
  misc_feature (114)..(114): n is a, c, g, or t
  misc_feature (125)..(125): n is a, c, g, or t
  misc_feature (152)..(152): n is a, c, g, or t
  misc_feature (158)..(158): n is a, c, g, or t
  misc_feature (164)..(164): n is a, c, g, or t
  misc_feature (206)..(206): n is a, c, g, or t
  misc_feature (215)..(215): n is a, c, g, or t
  misc_feature (240)..(240): n is a, c, g, or t
  misc_feature (254)..(254): n is a, c, g, or t
  misc_feature (261)..(261): n is a, c, g, or t
  misc_feature (286)..(286): n is a, c, g, or t
  misc_feature (295)..(295): n is a, c, g, or t
  misc_feature (317)..(317): n is a, c, g, or t
  misc_feature (353)..(353): n is a, c, g, or t
  misc_feature (370)..(370): n is a, c, g, or t
  misc_feature (398)..(398): n is a, c, g, or t
  misc_feature (406)..(406): n is a, c, g, or t
  misc_feature (410)..(410): n is a, c, g, or t
  misc_feature (413)..(413): n is a, c, g, or t
  misc_feature (421)..(421): n is a, c, g, or t
  misc_feature (428)..(428): n is a, c, g, or t
  misc_feature (481)..(481): n is a, c, g, or t
  misc_feature (500)..(500): n is a, c, g, or t
  misc_feature (521)..(521): n is a, c, g, or t
  misc_feature (540)..(540): n is a, c, g, or t
  misc_feature (559)..(559): n is a, c, g, or t
  misc_feature (561)..(561): n is a, c, g, or t
  misc_feature (573)..(573): n is a, c, g, or t
  misc_feature (603)..(603): n is a, c, g, or t
  misc_feature (640)..(640): n is a, c, g, or t
  misc_feature (672)..(672): n is a, c, g, or t
  misc_feature (689)..(689): n is a, c, g, or t
  misc_feature (724)..(724): n is a, c, g, or t
  misc_feature (741)..(741): n is a, c, g, or t
  misc_feature (776)..(777): n is a, c, g, or t
  misc_feature (786)..(787): n is a, c, g, or t
  misc_feature (791)..(791): n is a, c, g, or t
  misc_feature (853)..(853): n is a, c, g, or t
aacagagaatatcaggtggtgaaggagatacaaanatatgcaaaacaatcttcaaggatcttacacanaaggnggaananaaagccaaaaaatacntncaaaccacaagttatngagtttccaangaaaacgagatatcttccaaccaaggnctaaangaaaancttcaaaaagaagctggcatttcaaaagggccctgaggaacnaaaatgaanttcacaagtaggggaacaataaaangaaggggctgaaanctcaacntcgcccatagctcctgtttccaacnttgaaaacncttttagatatgacaacccatncagtcaacttcccagctatgttgccagccccttaantctgcctctcttcctgntaaacacattctgactatcccaaaaaanccctttcngaangcnacccttcnactcctnccccacaaagatgcccccttcagctcttctgggtgtcacaaacaacactaatnaagcaagaaagagtagtantgacagtctcatcagaatccncaacccatacccctgcttncaccccattgaatcctgcntngtgaaagatgcnatccaaagttagaaacctggcgacgaacgnggccatgcgatctcaactctcacttaacaatacatcngtgactcctcaaattatatttctcaactgggnacatgaatcttttctgnccattctcagcactccccactccctggttcacagngactctttgtagacccngccacatgcacacacaaatgtgcacacacactcannacaccctgnngtantttccttctgtctttgcttgtgcttcccctatgtattagtccattctcacattgctataaanacc

SEQ ID NO: 696595 - DNA, 995 bp, Homo sapiens
ctcgttcgcaaggatagtttgtctgatcaatagcacaaggtgtcgtgaaaactacccctagaaagtccaagacatgtgacacggcacaacagactcatatcaacattgtcgtcattgacacgtaaattcggcgcaagctctcacaagcaatacctgccccatcgtgcagtctaatacagtgcgtccgggtacttcgatctacaagatgcattgagtcatatgtgaggaaaggacgatgacgtgagatgggaccgggctaccttcagaagctatgcctggcggtcttgcaataaaacttgagagctgactgtgagcctggtatcatcgcatagtatatctccttgtggaaagccgaaaccaggaagtaactatgtgacttatgattgatgcccccggactgcagagacttaattgcatactacatggatcgaccggcagatctcaggactgacctgtgcttgtcctgatttgtcagctgctgctctttgggttgaaattatgaaatctgggtgtctcccaagaaatgggtcaaggacccgacggagcattgcccgttctggcttggcacaactggtgtgatcagaactcattgtcgttggttacaatatgtgattcactgcacaacctatgtcagaaggaggattgagggaactttggtgctgtgaggcgtccttgctctccagaaaagattgtctgcaatacccagaccaggatcattcgtgccacgtgctggtatgggtggtgtccccctgctcgatcattgtaccatgcctggtaaagggtggactccccggtggatgtgctccaggtgcaccctggtgggcctgttgagcctcaccgcgtgtattgagcctttgcctcgggctcacatgggtgtgcggcactgcgggggtggtgcccccgcgggggcgtgtgtgccacgttttgacccgtgcggtgtctggaattagtgtctctgcccaccgtgtccacacatttacgagatgtgctccgtg

SEQ ID NO: 696596 - DNA, 426 bp, Homo sapiens
atgcagttcacccccactactggactggccccaaaaacggtcatcccttctgtcttctgtctagtcacactcctattcaccgttctcaactactcataaataccctactcttgtttatactgccagtttacactgtttctccaagccatcgcagctgatatctcctggagctatccccaaaccgccactcttaactccctcttagagtggatagatgatctttgctggcagggcaccctccaatactttcaccctgatgaagttctattctttacttttatactcaatcttattctcattcccattcttatgccaccctctacctctccccagctatctccaccacactatcaatcttactcactctctcctagccatttctaatccctccttagcgagcaattgctcgccatggagtaaatggca

SEQ ID NO: 696597 - DNA, 661 bp, Homo sapiens
  misc_feature (470)..(470): n is a, c, g, or t
ctccagacacagatgacctgaagcagctggccaatggtgttgacagatacatctccaagtatgagcttggacataagcccttctccgactaggcaacacgcctcgaatcgaatctaccctggacaaggtcgtcgacacctcgtgaaggaatgactgctcatagcgtctctcagaagttcaccaaaatagctttaactggtaagagcctgtagtccagtgccgtggcaggcaggtcaagggtctaacgcctatttacaacctctggtaggaaagagcttgttagcccggttctaaccatctcggaatagaggaaggcataggaaatagtcttgacatctaatggcttctggcacgtcgaatgaaactggtggccgctggtgcttgatggagacaattgctgtctattacacaaaggtacgggacagagcaaggctcatgctctgggcaatgaaactgtgccatgcgacganagtggcgccttgtggaagtccccatgggcacgatgggggagctaattggttgtgacaagaggaacaccctggagcatggcgtccgaaaaaggcctttccaccgtcgttggttcgctagatagacaccttttcgatccgtaggtcactaattcaatcgggtcccaatttagacgtcacggatcccagtcaaa

SEQ ID NO: 696598 - DNA, 224 bp, Homo sapiens
gagctcggtcccctattcaggaggctgacaggagaattgcttgaacgtgggagcagaggttgcggtgaggcgagatcacgccattgcattccagcctcggcgacaagagcaaaactctgtctcaaaaaaaaaaaagaaggcaatttcctaaattcatttattggaaaccattttacaatttccccaggtcagccttcctgagtagggggatttacgggcttgca

SEQ ID NO: 696599 - DNA, 265 bp, Homo sapiens
ggaacctttttcccccgaacccaaaggggggggggttggttaagtggacccgtcccgcaaacccaaaaggcggggggccggttaaggggacccatctttccccgaacccaaagggggggggtttggcttagaaggggccggggccctcaagcctgggcaataagaattaacccgggtgggcccaaattaaaatttcaaaaaacaaaacaaacccccccctcccaaaactaccaaaggattaattaattattttaaaattaaatta

SEQ ID NO: 696600 - DNA, 195 bp, Homo sapiens
atttttaccccctttttttttttaattttaaaaaaaacccccccttttttttgaaaggggaaggaaaatcccaaagggggggaacccggggggcctttcctttttcccggccccccccctttaaaaaccagcccctttttttttccccttaaaaattccccaaggggcttaaaaaaaatttttttttaaagggga

SEQ ID NO: 696601 - DNA, 425 bp, Homo sapiens
cccctccgatcatgcagctcctgctcgggctcttgtcaggttactcttctgctgcctattcttccaacggagtgctcttggccgcttacacagacttctcaggtactctcacttattttcaaaaaaattccaatagaaattcctgaacgaaaattaaaagtctctaatttctcctccggctccatccctccaaaaattccctccttcaagattctcctccattgacatttgggaatggtattcttccacaacttcttttttaaaggtggaccacaggccatactcctggcagtacactggagagtatctctatggccggttaaacactggtggttaaggcctttccagtggtaccattcctttccttaattcctttagaggaaacccttggttacagagtaaggtggctaatccttcccaatttc

SEQ ID NO: 696602 - DNA, 135 bp, Homo sapiens
gattaccatggggagaatgccaagacagtttgagtacgagctggagcaggcctggaagcccagtagaagtacattgtgattagagcccactcgcattggagacgagacagcccgctggatcaccgtgggcaaaat

SEQ ID NO: 696603 - DNA, 805 bp, Homo sapiens
ggggcggccggggctgcgtactggctgtgggatgggaagtgaagccccagcgagcggtgcagcggggcgtgaggagcagccaggggaggcggcgggagtcggtgagcagctgggaagagcagaaccggggcggagcacctgcaggcgcggggggggcccaccatggcgattcgaagaaaagcacaagagcccccccagtgctgagcacgaattcgtcctgcagaatcacgcggacatcgtctcctgtgtggcgatggtcttcctgctggggctcatgtgtgagataacggcaaaagcttctatcattttgtactcttcagtacaagtgtcaccctcccagaacggaagaacaagctacttgaatcaggtgtccctttataactaatggcatcaaagattgtggctaactgtttcttctacatgctagtggggataattattcatgcgtaattcaggaggttatgtgggataaaattaccaggcgaatgcattctcaaaaagaaaaacagcaagtttaatgaatctggtcagttagtggggttctaccttttgtgcctgtggtgggggcacattcaattctcatctctggaaaattacattttcagacccaatatcttatggagggtttttccccataactgatgacacttcaaatgagttttctacatttcacacgtggttaaggtcacgtttcctggaatttattccgaaacaaaagaaatttctcgcggtgtcacatggcttcccttcacatgtgggcccttgaaatctgcgggcttgggggaacacgcatcccccgcggggc

SEQ ID NO: 696604 - DNA, 895 bp, Homo sapiens
acgctgtttatggccggtttgtttaagagagagatggtggaagaaaaaacttggtgttacacaaaacaggggggctttttcacatctgtgggggggtcaaaacaccacgctggccagacatacaccacacattggggggggcgatatatcagatttggtctggagatatgtcattgtagacaccaccacctggtgtgaccgacaccacattaaattgagacccccccgtcggtattacatactcgcggcgggacgatcacagaccgctcgtcgtgcgtttatgatggagcgacgctcatcgtagtgctgagcgtcgtgtgcccacagagagatctcgcttcactacccacggaggagatttatatcagaaaagagggggataccccccggggtgtggtgtcgacacacacgcaggagaagattctcccccccggaaatcaatttgtgtttggggccggtttgagcacctctcctggcgccaaatattttcggtggggcgtctttttcctcacacactgtgtcgtgtttttactgggaggcccaccccttataatagctctgagaacaatgtggagatgcacatcacctcggacagttaatagaactcaatacgccgtggggtaaatacaaaggtggtttttttgttttttgaaatgttagggaactttgggtgaaaacgacccctgttgaagccgccacctacttcacgtctgtaaaagcaccttagtgtgtccacaaagtctttttttctcggggggaaaaaccctaggtttcaaaagaagtttacatcccgtaagtgaagttttaaaaaccgttttccactaagccgccttttttttgtcaaacccttgcctgattttaaaataattaaaaaaaaaggtgcgttaatatttta

SEQ ID NO: 696605 - DNA, 484 bp, Homo sapiens
cggggaaaagtagggagaggaagtagcatgcagaaagcaaaggcagattagggcaagtttgtggactacggagagagaattgtaagcatagacatatagcaagaagggtactaccttatttcccttacgtggaactaatatgaaaaacacttattagatatactggaccaaaagagaactacgtactccaactctactgcagcattacaaaaaaaaacatcccttcaccacagtgtacgatttcagggcaagctgcccaaggatgcatgttatatcaaacacagcaagattgctgctgccctgccaggtacttccaatccctacccaggtcctactgaaatacgggtggtcccaattagttttatcgaaataaatctttaaagaacaagataaagcatgtgaaccagacaagtcaaaatgcatcaggaaccacatatccaacacaaactttatcctcaaatgagttctgttggcctcgcactta

SEQ ID NO: 696606 - DNA, 1016 bp, Homo sapiens
  misc_feature (16)..(16): n is a, c, g, or t
  misc_feature (34)..(34): n is a, c, g, or t
  misc_feature (42)..(42): n is a, c, g, or t
  misc_feature (62)..(62): n is a, c, g, or t
  misc_feature (78)..(78): n is a, c, g, or t
  misc_feature (133)..(133): n is a, c, g, or t
  misc_feature (193)..(193): n is a, c, g, or t
  misc_feature (259)..(259): n is a, c, g, or t
  misc_feature (265)..(265): n is a, c, g, or t
  misc_feature (271)..(271): n is a, c, g, or t
  misc_feature (285)..(285): n is a, c, g, or t
  misc_feature (311)..(311): n is a, c, g, or t
  misc_feature (316)..(316): n is a, c, g, or t
  misc_feature (358)..(358): n is a, c, g, or t
  misc_feature (372)..(372): n is a, c, g, or t
  misc_feature (379)..(379): n is a, c, g, or t
  misc_feature (409)..(409): n is a, c, g, or t
  misc_feature (437)..(437): n is a, c, g, or t
  misc_feature (441)..(441): n is a, c, g, or t
  misc_feature (452)..(452): n is a, c, g, or t
  misc_feature (454)..(454): n is a, c, g, or t
  misc_feature (491)..(491): n is a, c, g, or t
  misc_feature (526)..(526): n is a, c, g, or t
  misc_feature (540)..(540): n is a, c, g, or t
  misc_feature (548)..(548): n is a, c, g, or t
  misc_feature (603)..(603): n is a, c, g, or t
  misc_feature (616)..(616): n is a, c, g, or t
  misc_feature (642)..(642): n is a, c, g, or t
  misc_feature (672)..(672): n is a, c, g, or t
  misc_feature (699)..(699): n is a, c, g, or t
  misc_feature (755)..(755): n is a, c, g, or t
  misc_feature (797)..(797): n is a, c, g, or t
  misc_feature (815)..(815): n is a, c, g, or t
  misc_feature (822)..(822): n is a, c, g, or t
  misc_feature (825)..(825): n is a, c, g, or t
  misc_feature (871)..(871): n is a, c, g, or t
  misc_feature (881)..(881): n is a, c, g, or t
  misc_feature (890)..(890): n is a, c, g, or t
  misc_feature (893)..(893): n is a, c, g, or t
  misc_feature (902)..(902): n is a, c, g, or t
  misc_feature (906)..(906): n is a, c, g, or t
  misc_feature (936)..(936): n is a, c, g, or t
  misc_feature (979)..(979): n is a, c, g, or t
ttgtcagcatccacanggatagacgcggacagcnggccaggntggtgggctaagaggcagcntgccgggcctgaggcngcggggcaaaccgctgcatccgcccctcgagccccggccgaaagtggcggatcanaccctgcacaggccagggggccccgtaacccagagcacaaatcgtatggcctcctatctncttgctgacctcccacagggagtggatctcggccggccgggcatcccccctcacgaaacgtgccancacctngtccanccagtccacacccncacggcatggggtacactggccaaanccctngtgcttttagaactcaatgaggcgggcgagggctttcacgangtccgttgagcggnccatgangatcaccgcagccgtccccaggcctgtttntccctcccccagcccatcgaagtccatnagcnccgtctcaaananagacttggggatcagtggggtagacgagccgccaggnatcacagcaaggaggttgtcccagccgcccgtaanacccccagcatgcntttcaatnagttctttcaagggcacagacatctccccccccacagtccaagggtggttgacanggccagagaagtngaatagtttggtgcctgagtagcgtnctctgccaaagccagccaaccagggacctncacggcggcagaatgtgggggacactnccactttttccacgttggccacagttgttgggcagccaaacactcccacgtttgcngggaaggggggcttcaggcggggcttgccctgctttttcttnatggacttgatgagcgcngtttccnctncacagaagttggccccagccccgcgcaccacaaacacgttaaaatnatagcaaganccacatgcnttnttgccaatnaganctgccttataggcctcttggatggccaccngcagattggaggctcactgtagaattccctcggatgtagatanaggagcccgggccccatggccggcccccacaggaagc

SEQ ID NO: 696607 - DNA, 301 bp, Homo sapiens
tagctgggatgtaaggcatgcgcaccacgcctggtaatttgtatttttagtagagacggggtttctccatgtcggtcaggctggtctcgaactcccgacctcaggtgatccacctgcctcggcctcccgaagtgctgggattacaggcgtgagccaccatgcctggcctcatttttcatatatttgtaaattccaatgaggcagggaaatgtgctttcttaaaatattgttatcttgtgctctataagtgattacaaaaacaaaaaatgttaatttagctgaagtggctaataattttaat

SEQ ID NO: 696608 - DNA, 773 bp, Homo sapiens
cgatgacacagcatgggcccagaggcaggtttgctacacaggagcgagcgacgcaggcggcggccccagtcgactcgcaactgcctccctgacgcagcaggcggcctagcgcctcaatcgacccccgagaagccatcgccgtccaccgggcaggagaacctacggtgatccataacagccatgcttcgcgagtcgactaaagctacgtcaacaactatggcgggcgacgggcggcgggcagaggcggtgcgggaaggatggggtgtgtacgtcgacccccagtggcccccaatccgagatgggaaggggccggctcgcccctcaataactggcggctagtagcggagtgcgtcctggcgtaccatgatagcgtcctcgcgtgcgacagccaagtgggccggcaggtgaaagtagtaggtgtctcgagagcgaggcccgtcagagagtgtaccgggggaccttcgaggctccctgggtggccatagacgagaaggtccctcgggtgggaatagagcgaatccctggctacgaacgagttgccgggtccgagtgtctgcgaagagaggagagtgacgagaaagcgcgttacttaccgttcggtctaggcatgcggtaggcagcctgcgtaccccgaaggaaaccggaggatagatgaaggacgccgaaggcactaccctgtcttcagcagcagaatctcagagcatgccttccgtctacgagccggtctcctgttgacgacccaggagaggggctgcgggacttctcagttccta

SEQ ID NO: 696609 - DNA, 560 bp, Homo sapiens
gactagttctagatcgcgagcggcctgccctcatctcatttctattaaacgcctttgccagctaaaaaaaaaaaaaaaaaaaaaaaaaaaaaaaaaaaaaaaaaaaaaaaacaaaaaaaaaaaaaaaaaaaaaaaaaaaaaaaaaaaaaaaaaaaaaaacacacataataaatgaaaaagaaataataagaataagagaaaagggcggggtcgctttaaccaatgatcgttgattggggaagaactgcatagcttggggaatcttaagttagaaggaacctaacgttctgtgagttgtgacataattgggaaaaacataccgtacagaggattttaaagctacaaggggaaaaatagtagaagattgtgtaaaaagttggtaataaggggtgtttaaacagtagactgacaatattggcttagccgtggttgtgcaaaagtttgtggggcataatccagggagattctgaatttaatgaaaacttattttattacgccgggaagctatagctgaaaaaggagatatagtatagtagatataaatacacaataatatagtg

SEQ ID NO: 696610 - DNA, 218 bp, Homo sapiens
aacattcctggcgttcttcctttctttctttctttttctttctttctttcttttctttctttcctttctttctttcttctttctttctttctttcttttctttctttcttttctttctctctctctctttctttttctttctttcttctttctttctttctttttttttttttttttttttttttttgtttttttttttttattggaaaaaaacccgg

SEQ ID NO: 696611 - DNA, 707 bp, Homo sapiens
  misc_feature (60)..(60): n is a, c, g, or t
  misc_feature (92)..(92): n is a, c, g, or t
  misc_feature (320)..(320): n is a, c, g, or t
ggccttctcctgctgctgctgcgccccatccccccgcggcggcagttccagcccgcaccngcgtcggtgcccgcgccctccccgggccccgncatgggcctcaccgtgtccgcgctcttttcgcggatcttcgggaagaagcagatgcggattctcatggttggcttggatgcggctggcaagaccacaatcctgtacaaactgaagttgggggagattgtcaccaccatcccaaccataggcttcaatgtagaaacagtggaatataagaacatctgtttcacagtctggtgacgtgggaggccaggacaagattcggnctctgtggcggcactactttccagaacactcagggcctcatctttgtggtggacagtaatgaccgggagccgggtccaagaatctgctgatgacctcgagaagatggacggacgagctgcgggatgcagcgctgctggtactaggcaaccaagcaggacctgcccacggccactgcccgtgagcgagctgactggcaagctgggggctaccagcacttacacagcccggcacgtagggaaggtccaggcacaccaggggaccaccaaaaggcaacaggtcaggaagagagggccagggaattggctgatcacaacgagctgaacacagaggcaaaccagccaaggggcacggcacactgacggcccggacagacaccatgcgtacaa

SEQ ID NO: 696612 - DNA, 209 bp, Homo sapiens
tgcctgctgagtcgacttctagagttatccccctccataggaccgcatgtgacgggcgatccacttcttgcttcagcgcttctagcaaaggtgtcagaccaaccgacgctgaaccatcaccagctggcgcgcccatgtttgtgaaaccgcgttttgccaaactctggccgaatttatccaagaaccctgctgctgcacatgtgtgtcct

SEQ ID NO: 696613 - DNA, 590 bp, Homo sapiens
  misc_feature (60)..(60): n is a, c, g, or t
  misc_feature (92)..(92): n is a, c, g, or t
  misc_feature (320)..(320): n is a, c, g, or t
ggccttctcctgctgctgctgcgccccatccccccgcggcggcagttccagcccgcaccngcgtcggtgcccgcgccctccccgggccccgncatgggcctcaccgtgtccgcgctcttttcgcggatcttcgggaagaagcagatgcggattctcatggttggcttggatgcggctggcaagaccacaatcctgtacaaactgaagttgggggagattgtcaccaccatcccaaccataggcttcaatgtagaaacagtggaatataagaacatctgtttcacagtctggtgacgtgggaggccaggacaagattcggnctctgtggcggcactactttccagaacactcaggtggagtgttgggaggggactttctaaccgcactggaaaaggcgtctgggctggaacaacagaatcggtggcctacgctgggcccatatgccacggaagctacccttatccacttctaccctttctgcttggatatcctgtactcactattcaggactcaccttagtcttcaccagctagcacttatattcagaagcatgatgctgggaccaggctgactgattgatccgtcataac

SEQ ID NO: 696614 - DNA, 391 bp, Homo sapiens
gcgtcgacgataacatataaatcctttcacatctatttcggagtagtagcctactgtccttctttgttgcagcctaatgcagatcccagttaagacgtgccctcaccagtgtcaagtgaagtcagcaagggctggtcaggtgccactgatactagaggcagagggcggagaggatgagagagaggagctgagagaggaggagaagagagaggaggaggagaagagagtgcaggtcctagtggtacaagaggtagatgatctagaggaagagagaagagaaaagagagagtgcaggtcctgcacaacggtcaagttgacatggcatttcgtaaacctgtctggttcgcctcgagataagaagtcgttcagtgatgctgaatattgaaatttc

SEQ ID NO: 696615 - DNA, 152 bp, Homo sapiens
gttaatctgatgtgtaggcttacaggattgtagaatttgatggatgtatttggagaccgggttatgagactagtttggtatttttggtagggacggggtttggccatgttgcccagggtggtctccaactcctggtctcaagggaccgcccc

SEQ ID NO: 696616 - DNA, 1684 bp, Homo sapiens
  misc_feature (283)..(283): n is a, c, g, or t
aatagaggtgtcgttccgatgattaccccatagacagccaacagatgggaaggggaacatacgagtcatatcgggcattggtgcgctcatctgggacacgctacgcattcagtgcggccacagatcacacccaggtacgtgggccgactcgtggactcgtacttagagatggcgggtaggatctctcacaagacagacgaacgcagtcggaaagagagtttgcacggacacggcagggcgtgcctggaagagtgtgcgcatacacgggggccgtcccttgcanagaataaactgccctggagaggtcatgtgagcattaacaaatcttggaacacatggcatagaaggacggctggaaaaccagtttgcgtttactcccatcgcgagtcttggagtaaggtacatgctcatctgtttggagaacatactatgtggaacgcaacgctatggctagaggctctaattgaagttgtttgggagcgtaaagtgcgagtcttggaatagacgcttcgcgatggggaaaacgaaaccaaagggagggcaccgtatgttagtaactagacatatgagcgagttgaagtataccaaggtgcgcaacggattcaagtccatatgcgacatatgggaccctgagggtgtggccatctggatacctcttcggggattgtgggtggtaagcttttggcttggggagattaaggtataggggttttggaggagttatatggggaaaaagggcattacggagttacaacttcacttacggcggaaaaaggaatagaattggtggccgccacgaaggtaaaccacccagagaatttgaaagctccgcaattaggccacacccgttcgtataccattgtggtgggcaacgttacttccaatcaaatcggaaggcctctcggtgtgagagaattggggctcggttaaggacaaaaaccgaacaaaaccctttaaggaggatttgtgggttacaccctgttgcactcgcgaattacgttattaccatttagagagaataggatgggtggccaaatttttggccaacacccaatgtgttgggggtaatgtccccttacaaatttgcggccacggttattaaaacaaaagggaacggccgaagtggacaggaaacacaaaggggcaaattaaatttagggcaacggaaggggaaaaacaatgttcatgaggttttatgcaaaaagaagggggaaactagaggggggttccacgaaattggaggaggcaatctggtgtgattggaattcccaacttcacttaaaggaagggcaaaacaaccaacacaaacgtatttgtggcgtgcccgttttaatccacagagatatagtgcccccccaccatgtaatatggcaaagcctatatggtatgaaaaagccgcaaggctcatgattaggggagtatgggtggcgccacacaatataatggtgatatgtatcccacatgtggtgggtacattttttgagcgtcaaaaacattagggggtgaattggaaaacacaagatatactttattggtgtggggccagttaggagagggatatagcgacacacagaaaacagagtgtgttatgctcgtggataataagaccacagagcgtttgcggtcgcgcaggaattaatgaggaaggacagatatataatcaacaaaacgaggggagagagaa

SEQ ID NO: 696617 - DNA, 111 bp, Homo sapiens
cttgtcctcatctaatctcgccggcatgtggtcgttctttttgatattttttttacccctacaaaaaaaaaaattataagggtcattttttacaaaaaaaaaccaataggc

SEQ ID NO: 696618 - DNA, 690 bp, Homo sapiens
  misc_feature (12)..(12): n is a, c, g, or t
  misc_feature (40)..(40): n is a, c, g, or t
  misc_feature (64)..(64): n is a, c, g, or t
  misc_feature (72)..(72): n is a, c, g, or t
  misc_feature (79)..(79): n is a, c, g, or t
  misc_feature (124)..(124): n is a, c, g, or t
  misc_feature (126)..(126): n is a, c, g, or t
  misc_feature (145)..(145): n is a, c, g, or t
  misc_feature (167)..(167): n is a, c, g, or t
  misc_feature (204)..(204): n is a, c, g, or t
  misc_feature (228)..(228): n is a, c, g, or t
  misc_feature (253)..(253): n is a, c, g, or t
  misc_feature (267)..(267): n is a, c, g, or t
  misc_feature (270)..(271): n is a, c, g, or t
  misc_feature (280)..(280): n is a, c, g, or t
  misc_feature (293)..(293): n is a, c, g, or t
  misc_feature (332)..(332): n is a, c, g, or t
  misc_feature (358)..(358): n is a, c, g, or t
  misc_feature (365)..(365): n is a, c, g, or t
  misc_feature (368)..(369): n is a, c, g, or t
  misc_feature (390)..(392): n is a, c, g, or t
  misc_feature (454)..(454): n is a, c, g, or t
  misc_feature (457)..(457): n is a, c, g, or t
  misc_feature (463)..(463): n is a, c, g, or t
  misc_feature (467)..(467): n is a, c, g, or t
  misc_feature (482)..(482): n is a, c, g, or t
  misc_feature (486)..(487): n is a, c, g, or t
  misc_feature (490)..(490): n is a, c, g, or t
  misc_feature (501)..(501): n is a, c, g, or t
  misc_feature (526)..(528): n is a, c, g, or t
  misc_feature (533)..(533): n is a, c, g, or t
  misc_feature (538)..(538): n is a, c, g, or t
  misc_feature (541)..(541): n is a, c, g, or t
  misc_feature (546)..(546): n is a, c, g, or t
taagggtgtgcncttggccacagtctcagctgggctgtgnggtacatgctgccaagggtcgggngccaaaanaaagcanaatgaagccaggtccccaaggaagtgagggcccaaaatagggagngngggtgatgagggtggagtncaaatccagatgtcagagctanaatcgcccccaggtagcggagctcatgggcaagggcngggccaaggggctccttcccgaantccaccaggaagtgggggttcaatntcagccctcctttnacnngtgtctacntcaacctgcagantcacagagccttccctgatgagatcagggtaaaactggngtgtcccaggcactggtacagcgacntggtgantgnnaaaggcgcttcccatccaggnnngagcgggatcatctgagggcctccagccacccgttttcccttgaccataggggctcgtggtnggngacttnagtncctcgtcctccagantggnnacngggcctccctnaacaatgctgcctccgaggaaagannngtccngtganggnggggnctcggggggtcagagatgtcaaactggctacaggtccccatagagtcaagttgctgaatctacaggaagggggcggcagggacacgcaggatgcggaagacaggcctggcatacgggcaagagcagcctacaaaactagggagg

SEQ ID NO: 696619 - DNA, 110 bp, Homo sapiens
cttcatgttgactctagagtgatcccccctcgattgtgcttctgcacccctcagcctgcagcccccgccctgtccctctccctgcctgccccacagagagagctgtctgt

SEQ ID NO: 696620 - DNA, 402 bp, Homo sapiens
  misc_feature (49)..(49): n is a, c, g, or t
taccttaaaccgtgaaatataacatcttttaaaatttatttttaaatancccatgcaattttcacattgtaagggcccactttttcatgtatcatttatctctcttctcagctaaagactggggccgggcacagtggctcactcctgtaatgccatgactttgggaggccgaggtaggcggtttgcctgaggtcaggagttcgagaccagcctggccaacatagtgaaaccccgtctctactaaaaatagaaaaaaattagccaggcatggtggcatgtgcctgtagtccagctactcgggaggttgaggcaggagaattgcttgaacccaggaggcggaggttgcagtgagccgagattgcgctactgcactccagcctgggcaacagagcaagactccat

SEQ ID NO: 696621 - DNA, 929 bp, Homo sapiens
gaaagatggctgtccttgcgcctctgattgctttggtgtactcggtgccgcggctttctcgatggctggcccgaccttattgccttctgtctgctctgctttccattgctttcctcctcgtgaggaaactgccaccgatttgcaatggtctccccacgcaacgcgaagatggcaacccgtgtgactttgactggagagaagtggagatcctgatgttcctcagtgccattgtgatgatgaagaaccgcagatccatcactgtggagcaacatgtaggcaacatctttatgtttagtaaagtggccaacgccatccttttcttccgactggatattcgaatgggtctgctatacctcacactctgcatagtgttcctgatgacctgcaagcccccgctgtacatgggtcctgagtatatcaagtacttcaatgataaaaccattgatgaggagctggagcgagacaagagggtcacttggattgtggagttctttgccaactggtctaatgattgccaatcctttgctcccatctatgcggacttgtccctcaagtacaactgttcagggctaaattttgggaaggtagatgttggacgctacactgacgttagcacacggtacaaagtgagcacatcaaccctcaacagaaagtcctaacctgattctgttcccaggcggagaggtcattcgtcggcgggatgacagaaaggcgagtggtcttggactctctgagggaagggatcgggatcacttgatgggtttcacggaccaaaagctcaaggggggacttcaagaacgtggccgtcccacggcatgggacacagcaatgaccgggtggcccccgatagaattggcgcgcctaacacttcggcttttggccgggcgccttagaagacaaatagaccctaaaaataagttcccactcac

SEQ ID NO: 696622 - DNA, 619 bp, Homo sapiens
  misc_feature (17)..(17): n is a, c, g, or t
  misc_feature (30)..(30): n is a, c, g, or t
  misc_feature (44)..(44): n is a, c, g, or t
  misc_feature (46)..(46): n is a, c, g, or t
  misc_feature (49)..(49): n is a, c, g, or t
  misc_feature (71)..(71): n is a, c, g, or t
  misc_feature (75)..(75): n is a, c, g, or t
  misc_feature (99)..(99): n is a, c, g, or t
  misc_feature (155)..(155): n is a, c, g, or t
  misc_feature (169)..(169): n is a, c, g, or t
  misc_feature (186)..(186): n is a, c, g, or t
  misc_feature (196)..(197): n is a, c, g, or t
  misc_feature (214)..(214): n is a, c, g, or t
  misc_feature (227)..(227): n is a, c, g, or t
  misc_feature (243)..(243): n is a, c, g, or t
  misc_feature (249)..(250): n is a, c, g, or t
  misc_feature (274)..(274): n is a, c, g, or t
  misc_feature (276)..(276): n is a, c, g, or t
  misc_feature (283)..(283): n is a, c, g, or t
  misc_feature (297)..(297): n is a, c, g, or t
  misc_feature (313)..(313): n is a, c, g, or t
  misc_feature (318)..(318): n is a, c, g, or t
  misc_feature (329)..(329): n is a, c, g, or t
  misc_feature (332)..(332): n is a, c, g, or t
  misc_feature (336)..(337): n is a, c, g, or t
  misc_feature (339)..(339): n is a, c, g, or t
  misc_feature (342)..(342): n is a, c, g, or t
  misc_feature (348)..(348): n is a, c, g, or t
  misc_feature (364)..(364): n is a, c, g, or t
  misc_feature (382)..(382): n is a, c, g, or t
  misc_feature (388)..(388): n is a, c, g, or t
  misc_feature (415)..(415): n is a, c, g, or t
  misc_feature (437)..(437): n is a, c, g, or t
  misc_feature (442)..(442): n is a, c, g, or t
  misc_feature (462)..(462): n is a, c, g, or t
  misc_feature (475)..(475): n is a, c, g, or t
  misc_feature (489)..(489): n is a, c, g, or t
  misc_feature (493)..(493): n is a, c, g, or t
  misc_feature (496)..(496): n is a, c, g, or t
  misc_feature (502)..(502): n is a, c, g, or t
  misc_feature (511)..(511): n is a, c, g, or t
  misc_feature (532)..(532): n is a, c, g, or t
  misc_feature (538)..(538): n is a, c, g, or t
  misc_feature (541)..(541): n is a, c, g, or t
  misc_feature (543)..(543): n is a, c, g, or t
  misc_feature (603)..(603): n is a, c, g, or t
tattacgtaagggtttnttttatttaaaanatcattcacaaaanancanatccatagatttactttctgtnatanagctgaatgtgttaagtgtttggnattccattcttacatttaaaagtaaactgggttgcccagcagtttagatgcatgtnttttgttctttatnttatccacattgaagangtaagtgggnnatctgaaagcatcgggnttgattacaccanaaaatgcatgtttttntgaagnnaagtgttggggttacacaaatggntnttatctnagaagcagagaagnggaaaggggggagggnggggngagagtgctgnggnttgnngnggncttgtnacaagaaaaagtaggnaaagcccaggatgacggngggggnccaaatactaagcacattccgctgggngccccaggccaccctggccctnccatnacctggcgagggcctttttnccaggctcctgcngccggccgcccccnaacngcnccccanaggacaaantgggacttgggttctgaaggntttttnatntnttcacacgcaggcgttcaagcacaaaagcctaaaccctagcactcccacataacttctgnaccctgcacatgggaa

SEQ ID NO: 696623 - DNA, 196 bp, Homo sapiens
actatagagtatcccggaggagacacaggtcagcatgcgaacaggcactcagcagaggtgtgaggcggcaaaggttgtcaggagaaaaagaagacgatagatacagcggctcacgcctgtaatgccagcactttgggaggccaaggcaggcagatcacctgaggtcaggagtttgagaccagcctggccaacatgg

SEQ ID NO: 696624 - DNA, 285 bp, Homo sapiens
  misc_feature (77)..(77): n is a, c, g, or t
  misc_feature (165)..(165): n is a, c, g, or t
  misc_feature (169)..(169): n is a, c, g, or t
  misc_feature (203)..(203): n is a, c, g, or t
  misc_feature (240)..(240): n is a, c, g, or t
  misc_feature (255)..(255): n is a, c, g, or t
  misc_feature (264)..(264): n is a, c, g, or t
  misc_feature (273)..(273): n is a, c, g, or t
cagggttttttttttccctttatcatctgatgatgaacttaatgtttccctttgtattaaaggaaaactaagtcccnctgtgatttttgaaccaagctattcctaggcctgagttttattttgttgacccaaaaataaattaaaaggccaagcgtggtggcatgngccngtagtcctagttgctgaggtaaaaggattgcttnagcccaggagttcaaggctgcagcaagctttgattgngcccctgccctccanccttggggncagattaanacgctgtcccca

SEQ ID NO: 696625 - DNA, 247 bp, Homo sapiens
accacttcgagctcggcacccatccttccttctttcacggaagttgagcatttggtgactgaatgctgcgtttgtgcgtcctaacccctgtaattgtgggctgtgaaagcatgtccccagatctgggctttatgggcctctgagggagccccagagacacgctttggaaacataaaatactaaactgggggtggtggtttccctcctggcgttcctacaatagatacatcattgcgggaaaatagga

SEQ ID NO: 696626 - DNA, 755 bp, Homo sapiens
ctcaaccgggaggcggaggttgcagtgagccaagatcgcaccactgcactccagcctggcaacagagcgagactctgtctcagaaaaaaaaaacaaaaaccagtttaggctgggtatggtggctcaccagcactttgggaggctgaggcaggtggatctcttgaggtcgggagtttgagaccagcctggccaacatggtgaaaccctgtctttactaaaaatacaaaaattagccaggcatggtggcgtgtgccagtaatcccagctacttgggaggctgaggcgcgagaatcgcttgaaccctgcagatggaggttgcagtgagcagagatcgcaccactgcactccagcctgggcaagagtgagactgtgtctcaaaaggaaaaaaaaaaaattaaaaatgtggctggtattacttcaaacctactcgggataaatttcccagtagggcatctgaaatagctttgggcaaaagcaaaacaggttagtcaattaccccaagggggcttcaacgtagtttacatgcgacctaccgtgtcgaggggcttttttacctgggggggaaaaatccttagctgaacctgctactcctgggcgcattaggtcgttttatgcgactttggtttacggagtttctggggggacaaaccctggcgagagctacgggcccgacctttttttaaacagaggcacggcaacgtggccggggatgtagtgacccttgccggggctcctagggaccgtctacacggggg

SEQ ID NO: 696627 - DNA, 623 bp, Homo sapiens
  misc_feature (1)..(1): n is a, c, g, or t
  misc_feature (63)..(63): n is a, c, g, or t
  misc_feature (75)..(76): n is a, c, g, or t
  misc_feature (78)..(78): n is a, c, g, or t
  misc_feature (84)..(85): n is a, c, g, or t
  misc_feature (105)..(106): n is a, c, g, or t
  misc_feature (128)..(128): n is a, c, g, or t
  misc_feature (133)..(133): n is a, c, g, or t
  misc_feature (137)..(137): n is a, c, g, or t
  misc_feature (140)..(140): n is a, c, g, or t
  misc_feature (171)..(171): n is a, c, g, or t
  misc_feature (188)..(189): n is a, c, g, or t
  misc_feature (191)..(191): n is a, c, g, or t
  misc_feature (198)..(199): n is a, c, g, or t
  misc_feature (202)..(202): n is a, c, g, or t
  misc_feature (208)..(210): n is a, c, g, or t
  misc_feature (213)..(213): n is a, c, g, or t
  misc_feature (242)..(242): n is a, c, g, or t
  misc_feature (275)..(275): n is a, c, g, or t
  misc_feature (277)..(277): n is a, c, g, or t
  misc_feature (287)..(287): n is a, c, g, or t
  misc_feature (301)..(301): n is a, c, g, or t
  misc_feature (361)..(361): n is a, c, g, or t
  misc_feature (376)..(376): n is a, c, g, or t
  misc_feature (380)..(380): n is a, c, g, or t
  misc_feature (399)..(399): n is a, c, g, or t
  misc_feature (422)..(422): n is a, c, g, or t
  misc_feature (424)..(424): n is a, c, g, or t
  misc_feature (445)..(445): n is a, c, g, or t
  misc_feature (481)..(481): n is a, c, g, or t
  misc_feature (486)..(486): n is a, c, g, or t
  misc_feature (488)..(488): n is a, c, g, or t
  misc_feature (495)..(495): n is a, c, g, or t
  misc_feature (500)..(500): n is a, c, g, or t
  misc_feature (539)..(539): n is a, c, g, or t
  misc_feature (587)..(587): n is a, c, g, or t
nggttggaacttgctggaaaaaaaaaaaagttttaatggtattaaaaataaatttaaaaaagnattctagcacannanttttcnntaaactagattatgttgtcnncttttttcttaatcttgtaggngtgtnggtngtnaagaactagggcttattcctattccaaatcnatcttgggctccggggnngnggcggannggnacttgnnngcngtttctttaagatatggatttcttttttnttcttgctggtaatattttgcggcactgggtgngngcaatttttnttcaagggcgtcgngatgctgagaagtttcgttgataacctgtccatctctagtttcaaccgtcttaatcagangtgtcctttttgagngggnatcaaccagggggggtggntccagattagtttccctcaggtnanaggaggaaaagtttggaagangcagagaaatcctgctctcctcgccttccggcagcntcgcngnggggggnaatcncaatgtcaagggccctctttacattgagcaggtcttggnattcacgggggggggggcgcatttcctccttcatattctgaatctcancctgcaggcggccaatagtgtcttggtagttaaaag

SEQ ID NO: 696628 - DNA, 975 bp, Homo sapiens
aaaacgacagggtctgccccacgagaggctagtaagagctagctgtctggtctggtcattccttcttggagatagagatgtcttctaataggaagatctgtgctaaatcgtcaaagaagtactagctacatgacttgagttccaccatcccaatcaagatacttgtccatgacaatcaagctacgtgtgaaaggcatctctcgtgaatgggatacttgctgtttaatatcgtcattgtagatactcgcttgaatttcaagaaggtgcatgaggacatttagtaaacagctcattgtccaaggacataagagcgtatctcataggtgactggacgtaccccagcgtgccctcgtgcatgatgtatcgggtctcttgccaggggatcggcactctcctcactgaactcacttactcatagatctgtgcaccatttagtctcgtcaaaccactaagtgtggtgcataccatggcgtgttatatgtctactatcctgtctcgatctgggcgaggtagagtacttactcatgctcttgtgagaacgaaaaaaccctctgagggaaggaggcatacagaaaatcgaacctcagtcactgtgctgtacaaccccttccacagtagaggatcattcctactccctttcagggtgcttgatgattgtttcatcccaatttgatcggattcttcttggtggtagttaaaacatatccgcaggtatctcttgcggagtaacagggggaaattgtgggtcaccatcaggaggtggcaagagcagagatgggagagggaattgaggacggtccattgtaactgaggatttggttgccataggaaggggtggcggggtctcccgaaaaaaattgtggaaagtgtcaagcatgaaagtaggatcggaggatagaaaaggagagcaaaacatggtgaaatatggagacgtcacagcagaataaaaaacgggtggtgattatgtatgtgagt

SEQ ID NO: 696629 - DNA, 1657 bp, Homo sapiens
  misc_feature (192)..(192): n is a, c, g, or t
  misc_feature (217)..(217): n is a, c, g, or t
  misc_feature (403)..(403): n is a, c, g, or t
  misc_feature (448)..(448): n is a, c, g, or t
  misc_feature (488)..(488): n is a, c, g, or t
  misc_feature (636)..(636): n is a, c, g, or t
  misc_feature (1080)..(1080): n is a, c, g, or t
  misc_feature (1131)..(1131): n is a, c, g, or t
gtgcctgtctttcctggcctgtgcccctgtttcccagtgactgatagtgtgcactcctgcacctggacccctgtgtccctggctgctgctggctgtgtggcactgctgcccatccctgctgctgctgctgtgtgtgctgctgttgtgagtggtgtgtgtgtgctgtgcctcgtgcctgtgctgtgtgtgacnatgtgctgtgtgtgtgacctgtgtngtatcctgatgtgtcgcaacctgatgtgcttcacgctgtgtcgcattgcgctgtagtcgtgttcgctgccgtgtgtgctgtgtgaaattcatttgacctatacgacagtgcgtgtcccgaagtctagtacagtccacaacatgaaattgtgtaaggctcaatgcgctcgcaagtttgtcgcttccntacacagcgcaagtgcaagcgaatagcgaccaagacagttggtcntttgagacccttttgcctgtgattccccttcattcggatnacttatgatagacgactgtgcatgtgacgcaaatttgtgagcgagaatcgatagacgaccacttctagtgctacagttatgtgtgttcacacagaacgttcaagcgctttgatcattcaagcttggagcctggtagatctttagagancacgccaaggacatacaaacatgatttacacacgttagtatcaggatatgcgctgatgtgtacaacaagaagccactaagtagctggcctattagcgctcttgcactactatccttcggccttgtccgacgagaagtggcacttactgcgcacacggaacgcgccggaacactacagacaacgctgaactctacacacgacaagtgctggacacagcttacgcctgtactctgagacctgcgtttggcagcgccatgacccaccaagaggcccgaagttataattcgcccattggtgtgctacaccttatattgctagaacagccattcgcttgagctttaagaagacgctcagagaatggctcgatgaactgggactcagatagatgagcactccacggatttttcacactgagatcctgagtaatttctggtaaccttgaanagcattcaagcgtgactacacagtggctggatcgcattattatggcgcccnatatacattgagctaccatcacagtgtgaagagctattctttgttaccactcacacttggaaggcgttcagaacatttaacgtcgaaccactcttagcgagttatgaacctgtttcttgaaccacgtggttgtaccacttgggccaccagagttcagaagttccgcacatccatggggcgacttgtgtataccccacctagtgaaagcgggtgggtacggaggaccccgtgcccagggtcagtcaatcatcggacacaagtatacactgcattttgtttagtccacagtaaaaagcatgaagatagtgccaaccatgtagatggggacgtatagatcgccccaacccgaaccaatcaaaaccggggatcacaaggagtaaccaacaccagcacccacaggagtcaccagctatatataacacgcgggtgatgaccattcactatgatctgattgtagataaccattgatcgcaggtagacacctttacgtgtggtgaaacccgtgtgtggaagtgacatcgggtag

SEQ ID NO: 696630 - DNA, 133 bp, Homo sapiens
ataatacaagcccggatggggatactacagagcccgcgtgacattatcccattctaacctttattcccgaacagcgtgaagtagagagctgctagtgcagttcacgattacaatgggataacacgttcgcgag

SEQ ID NO: 696631 - DNA, 1313 bp, Homo sapiens
ctcggagctggggagaaacaggccctccttgtcctatgtgcagcccacacttttgtcctggctgtgggtggcatccattttgagacacctctgccacggctgcacgaccctggaggcgacacgggacgtgtggacacgacggacgggtgtaacgtggtcgacctgcgtgctgacatgggacggtgcaggtcctcggtgcgtttggcagaacgacggcttctggagtttcgaggcacataccatcctttcaagagcttcaggatattgagggcgacttccctggtgtctaggcggagtgtaccatgtccccatgttcaggtcagcacctgcggagaccactccacccctcttcccctatcgcccctggactttcctgacatactacctgggagttcgttcactagtgacaggtcgtgacgctgtagctcgatcctatactgatcatctgtatgatacccgactttttcctacctagacagaagggatggtggacgacgggtcggtggatctccttctacacactcactcataatctgaacacagcgcaatcgaggcgctttggccaagtcgccaggtcattctcaaacttagtccgccacagtaaaccatgaatatatgatcttgcaccttccaccttcacactattgcacaacaaaacgcctctttagaaatcccttaacaatgggccgctcagcatttcagacggaaattactcagcaaaggaccaggtcaagctcttcaccaaggaccaagttgagggcacctggcttgatgctcaggagctatggccatgggtgaatgctagggactccaacgcccctcggggtcgccaatgtattcgaccaatacctcgggctgagccaagttacaatggacagggccgacaacaccgcggcaccgcgcaccacgagccacatatacagggcatgacagcacggcagcggagaaccaccgggacactgccacatggtaggcaccggccagcgtcccacgtcgaacgtggcaaccactgagcagaaaggcgacactccgtatgtggcaaaggagcgacaacgaacaagctggtactcagagccgagacagggacagatgacaggagcaagcacgcggacgactagagcgcgcagggccgacatgaaagcgaaaagccaccaagccaatgacgcagaccggggatcagcaaggacgtagagctaccactgaaaacagcacgaaccagcaggcactagccttacatcagcggtgaaatcgaagcaacaggctgtggtacgactggtcgtggtcgtgcttcgctgtagcacagcccgcacata

SEQ ID NO: 696632 - DNA, 870 bp, Homo sapiens
  misc_feature (744)..(744): n is a, c, g, or t
ctacagtttaaattctgatttttctggctacaagtttctaaaataagttgtgcttccttaaagtcctatgaactgaaaactagatgttttatcaggcgctgcctctaaaccccccaaccatcacagaaggaaatctcttcactgctggcattgacaactaataactgagggtgcccggaatccttcaccccatgtctagtgagtctacggaaccagggtaattgagacaatatctgttacaggaatcaactcctggatacatcacacttgagtcaaagcctggaaagctgaggaagcaacccctgagagcccaaaggaacgtcctaaatataatggaaattatttactacgccttgtgggaattgctttactctactatttgcagtaggactatatactatagcaccttcagggtggaatatctgacagggaatctcaattgctgtagcattttgcttaattattatcctcatagcaggaataactgttactaacaaaagataatatgtgggcctttccaaacatgtgcctctgcctctcattaggtagggaatgttgtttctatctcaaccaatcaggcctagtaagagactgctgaaaaacttaaaggtctaaaaagctaagggaataccaaaacaaccagacagattcttggtttgggagcagaatcatagcatgggtcaccccattcctgggccctctcctaataatatgcctaggactaatggtcttaccctgcctaantaacctttttcaaaagatttttagctgacagactcatgaccatttcacacacactacccaaaaacattacagggtatttctgcagtcaatccaagacccaaaactgctggccccttgcacaggaag

SEQ ID NO: 696633 - DNA, 359 bp, Homo sapiens
cgcgtgctatcccagtctctaggaggctaagaggcgggaggatagcttgagcccaggagttcgagacctgcctgggcaatatagcgagaccccgttctccagaaaaagaaaaaaaaaaaaaaaaaaaaaaaaaaaaaaaaaaaaaaaaaattagggttaatttccttaaaagaaaaaacccccccccccgtgggttggacccaaggggttttcactcggtgttgcccaggatgggttcttcaattctcttgactctcgtgactcgggcccaacttttggccccccaaagggtgctggggatttatgggctagtacgcccacggtgcccgggccatctgtgcggttgtttattaccgttt

SEQ ID NO: 696634 - DNA, 115 bp, Homo sapiens
tgaggatccccctgcatcccggggaggtcaccatattgatgccgaacttagtgcggactttcgatcggcatagcgcactacagcccagaactcctgttctcaagcgatcctccca

SEQ ID NO: 696635 - DNA, 1220 bp, Homo sapiens
ggccagcatggcggcgggggcggctgaggcagctgtaggcggccgatggaggaggtcggctcagccgggtcagttatgaggagactgcatgcgccgtcaaagccaagtccctgtccttgtgtggatccagtttctgggtcaccatgggctccacagtgtgcacagatgaacagaagttggtggcagaggttagctaagaagaactccctcagggttgcagtgtgtgaaagtgggaacgctcgaatggtagttcctgcaaggtagtcgtgaaaacactatgaacatttaggcctcgtgtttgccccagcgtatttcctgtgtgttcgatagaaggtctcaaggaagagagtctgcaccggatgttagagtggatgcaccatgctccccaggatgctggacccaaaacatacaggttcaggcgaaacatgacaatcttaagtgggctttccttctctcttacctcatggggtctagagtgaaacaatcttagatatgcagacgattccctgcaaagcacctttcgacttctggaacaggacaatttgtggaccgtccaatgtctagcacacacccattgacaaatgacatggtatgtgagtggacacacgggggaacctccatactaaatgcacacccagcggcgtggggggcgttttccatgcacacacgcacagcagtagcggtggagacaacacgttgtccttttcaaacgaagagtcgagttacaattaatttccaacggtgatctaacggccaaaggctacaatcggacataaattccttagtgccttccacggactggacaacgcaggggttttccgaacccaggggggacccgtcaacagaggggcccataaatattcccgaaggatggcgcgccctagccttaattccgctccaggcgttcttagttgttatcacctgggaaggaagggcgtccaattacggaaggggaaacgtggacctacttataacttccaaaggggacgccgtaagtaaaggccggtcctctgaaaacagggagaccttagcgaatataccaaacatgttgggtcccccaagtgatggtcatccccagagatattacgaagagggaaacgagggggctccaaagcagggtgcgctgagccacaaaacttaaaacgagccattcctggtcgaaactgccacccctattaatgtgctacacagggggcaactctcagtaccgggacacgcca

SEQ ID NO: 696636 - DNA, 119 bp, Homo sapiens
agttataatcagtgagggtggccaagggaagcttgacgcttttagagccgagttatcaaaatttcttccacagagtataatacaggactgtctgtatgggaaggcatccgacaagactg

SEQ ID NO: 696637 - DNA, 374 bp, Homo sapiens
tttttcccccgggtttgggggggcccccagttttttggcccccccccggggggaaaaaggggggtttttttgtttgttttaaaaagttgggggggttttttagccccccccttgggggggccaaattttggggcccaaaaaaggcctttaaaggggggggggttttttttttccccccccgggggtttaaagggggggggaaaaattttaaaggcttctcccccctgaaattaaaatgggggggggtggagggggggtggccccccggaacccggggaaaaaaatttggggcccccccaatttggttttttgtttttttttaaggggggggggcccccccccggaaaaaaaaggttttttgtttgttttgccca

SEQ ID NO: 696638 - DNA, 347 bp, Homo sapiens
cgacggttcgcatgtatcctatcatcaggcactttcccccttatccaactagctagcctataccctctgctgcccaagaaaatgagcccaaccagtacaccaggagtggggctccatatcagcccctaaggtcaagcctgtgtccactgtggaaagtagttgatggaaatgagggaacactcaaagagtacatatgccactttccatgtctaattagaccttataaaaggaaagaattggccagttttcagataaaccagaaaagcttatacaagagtttgttacgttgactatgttcttcaaattgccacgatttacaaatattgtcatccgcttgctgtgctgtg

SEQ ID NO: 696639 - DNA, 149 bp, Homo sapiens
gacgtaacacaatcaacaaagcaaaaaccacaccaaaagatcgctgccacattatgactgacaccagcatgacaggactgcatctccggtacaccattctaagccgaggctcagtcgtatgagattctgtgcgattgtccgccaccagg

SEQ ID NO: 696640 - DNA, 122 bp, Homo sapiens
  misc_feature (2)..(2): n is a, c, g, or t
  misc_feature (5)..(5): n is a, c, g, or t
angtnactgcacatcagtgttgatatcaactctttgaacagacgttgcacctttttctgatatactgaggaaactcggtctctagcaatttcttcaagtcatccctgtagacggatggaatc

SEQ ID NO: 696641 - DNA, 149 bp, Homo sapiens
gggattcaggaatagcactgtgcctggcacagcatatatttttaaagattattgtatacccttttatggtggtgaatgtctgtttatattccttatctatatttttttacctttgggaaacaataagcactgtgcggccgaagacactg

SEQ ID NO: 696642 - DNA, 1008 bp, Homo sapiens
  misc_feature (1)..(1): n is a, c, g, or t
ntgttgatacctctcaagtaataggaccccctggttcactcatagactcctctagaatggcattctcgttaccctgcttcgaattatacggccccgcgtcactcgttggtggccttcctatgagctgcaatcttgcgcccattttgccctcagtggcatcgccatatggacgcatacggtcatgtacgcgattgaatagcatcaagtcattgcatgcccatcaaaagatacaagtactaaacttatgcaagcgcagcacacaactcatgcgcttcaatgtgttgcccctttggggtagtttcacgcgctcttatatacgaaccttgcgtggcccacgaacttataactactgcgacgcaaatatcacgtcattacggacatatttttggaggggtgactagaagttccagtaatgcactgtccctagatcctcccgctgtgtatcttatcactctccacgcgtagcgtctatcgcaggagtaatggcgtatgcatagaaggcccaacagcttactagggtttccctatcttttgagcgacgtccaagccttgtagcaaaggagcaagcagaaaccttcaccaggcttgcctcgagtgccttggagagcctacgcacaggctccctctcgagccacatacatgcatgtccacgagtcccgctggtgctcctagccctttcgctgccctgctagtctgacagtgccagctacgcaaatccctttggaccgacagggttatcgtctctagctggcgttgaaagcacaaaatcggttctgtagtaattcaatctcgtagacccgaatagcttcattactaggctgctgcgcagccccactttctatagcagtcattatctcctcttgctggggactcatgtcagcatgctactagacaatagatctagtttaacatcacctgtgtcaactacaagatcacggaaggcatttgatgcagaatttatgcatgacaacatagaaataatatataaatagtgtttgttctgaactg

SEQ ID NO: 696643 - DNA, 800 bp, Homo sapiens
gatccatccaggccaaagtgcttgatcccccatatccaagtggctcccacagccctgtgtttaaccgacaatacgaacaaaggaccagtccaagaggggaacttctcttaagggtgttgtcggaaaactgacaaactaggaatttcatgagtctctttgtctgttgcagtccccgctgaaggagagcccttcatttggagaatgacagtttctttcggggagacggctcgaggacttgaacaaaattccatgcatttgcgaaatggatggtgaaagtacagtggtagctatgtccctttccgtctttcgtctttcatcttgtgatgtcccaagttgtaagaaatgtgaaagataaggtactatgttaagcccacataaaggtttacctccttgtagagacactgtccagaatctggactccctcttgtccaggcacgtgctgcccaagcctccaagctccatctccactcgcagattttatgacagctgcctgcaagtactatgacctcactatcagaagagttctcagctcccaaggctctgagcaaacgtggctacctgggggttctttcttcatctgctgaaggaatacattgctccttgacattgtagagcttctggcaccttggagacttgtactgaaagatggaactgtgcctctgcctgtctcccccaccaggggtgggagctctgcagagcaggaaacatgactcagtatatctctcaggtccctgtcagggccaagcacctagcctcgctcttggcaggactcagcgatgaatgctacatctgggcaaatt

SEQ ID NO: 696644 - DNA, 858 bp, Homo sapiens
  misc_feature (352)..(352): n is a, c, g, or t
  misc_feature (412)..(412): n is a, c, g, or t
ccactccagcccccattccagcatgaacagtggagtcggtcggggtccccagagtggcagctgtgtgtccgcgggttcacccgtgagaatccaccacaaggggtacccaccgcgaggcacgacagcttccttcaagctctttctgctcaaacattcatcgcggggcaagaaaagccgtgttgaatctctaccgggccgaaccttgggccttggtgtcagcgcacggcagggccacagagactacagccctggggttccagagccggctctcccgtgctctccagaaatcccagccatagtaaaaagaatctgttttttgagatggagtctcgctctcgcccaggctggagtncagtggtgcaacctctgcctcccaggttcgggcggttctcctgcctcagcctcccaggtngctggggctgcaggcatgcgccaccacacccggctgattttagtgtttttggtggagatggggtttcaccatgtttacctacctggctgctctcgagctcctggactcaaatgatccgcccacctaagcctccgaacatggtgggacgacaggtatgagccaccgctcctggcccgaaaggcagactctacatctctgcacttggccaggtagaaaccctcatttgtgtcccgatgatatcagagatcaggaaagctccgtgagccctcgtcttggtcacgtgactcggcccagaggcaagtggcaaagcaggaccttccaccatcagccctgtgggtcctgcacaccctccacaaaacagcctcgacccacggggacctgggctccgagttcctgcctggagctgtggtcaccgcttcattcactcttggatgtattttcactcc

SEQ ID NO: 696645 - DNA, 180 bp, Homo sapiens
gttcacacagatacaggcaatttgcaggctagctccatagatcacacctttttaggcctcaatgcaggcagaacaaaggccaactgatgtctcaaaagcaattttatgagtgataggtctccgtctttcaagaatgaagaaagtctggtttacaccgaccaagttgtcccgttgatgcac

SEQ ID NO: 696646 - DNA, 105 bp, Homo sapiens
atgctatatcaagcaacgacatgccaattctcagccaaatgatgacgatgcctcctcgtgatgcctacggctattgagcctgctctctactggtttcacgcactg

SEQ ID NO: 696647 - DNA, 686 bp, Homo sapiens
  misc_feature (352)..(352): n is a, c, g, or t
  misc_feature (412)..(412): n is a, c, g, or t
ccactccagcccccattccagcatgaacagtggagtcggtcggggtccccagagtggcagctgtgtgtccgcgggttcacccgtgagaatccaccacaaggggtacccaccgcgaggcacgacagcttccttcaagctctttctgctcaaacattcatcgcggggcaagaaaagccgtgttgaatctctaccgggccgaaccttgggccttggtgtcagcgcacggcagggccacagagactacagccctggggttccagagccggctctcccgtgctctccagaaatcccagccatagtaaaaagaatctgttttttgagatggagtctcgctctcgcccaggctggagtncagtggtgcaacctctgcctcccaggttcgggcggttctcctgcctcagcctcccaggtngctggggctgcaggcatgcgccaccacacccggctgattttagtgtttttggtggagatggggtttcaccatgtttacctggacaacatggtgaaagccctatctctacgaatgatgcagaaaaattagccgagtgtggtggcacatttctgtagtcccagcaacttgggaggctgaggcaggagaattgcttgagccctggaggtgaaggttgcagtgagccgagatctcgccactgcactccagcctgggtgacagagcaaggctctgtctc

SEQ ID NO: 696648 - DNA, 647 bp, Homo sapiens
tggagatgggactctcgctctggtcgcccaggctgggatgtgcagtgggcacgattttgggctcactggcaacctccacctcccaggttcaagcgattcttctgcctcagcctcccgaggcagggattacagggctgtatgccaccacgcccagctaattcctggtattttaagtaaaagacaggggtttcaccacgtgggccaggctgggtcttgaactcttaacctctagtgatccacctgcctcggcctcccaaaggtctggggattataggcgtaagccaccgtccccagcctgctgggctattttctaaattttatataagggaatacatatggtattttaataatttatcatgagaaaaaacctttatttatcacctaaaaaatgggtcttaccggcctaagggagaaggacctagatcagttgaccccctgaaagtctaactcttagtgattgaaccagtatccaggaaatagcatctttagaaaacctggaaggacatgtctacttctggggctctaagccttcggtcctataacaaattcatctccatatttctcctgccttcatggcttaaagctgtgacatttattcccatatctatgtttcttcatactcctcttggacaacggggagaaaaccc

SEQ ID NO: 696649 - DNA, 988 bp, Homo sapiens
gataggtaaatttctcaagggttataggttgaggttcttacaactttttgtggtgtgtgttgagcctatagctgactcagagtgcgttagtgacttcacctaaaaaagctaacctctcgtgctgagcgcgagcggatatgcggcgtcatggatgagtcctcagggcttcatgtctaataagtctgtgtgatgaaagccggttctgcgctgttccttcgatggcgaccttaattcatgatgaatgagctaatgctttatctgactttatacctcattggtcgcataccgtgtgccagatggtggttctcaataatgccatcgaacctcgtgcgtaatcttcccatcatttgtggtcaacccggggtagaattcctccataaacggtaaatccaaacttgtatgtaacgaagctgagcgcagagttctttcactggtagcaagttatgtcgcctgtacctgatagatggtgccctattctttaaagctactgctcctttcgaagttagattattggatggactgataaggactttacgttgagagatcgtgatagactagttgcacgcgtcaagtaagacatccatttatggactccctgatcggaggtgaagaactctggtcagttgttgcttgctctgaagaatgacattgatatatgctttgtgttccactgagttgagcaatctctgtcccctcgtcgggcaataattagtgtccagtgggagtttccaccaaggcctttgaactgtctcccctgtgggactaccgcgcatgttcttggattccagtgtccatcacaatgactctgagggtgaatacgaaacgtttgagccagttggcctggacattggcgttcttgcagggctggtccatttgggacgctttattaagatgccaacttaccagaattcattagattaatacccatttggttctgggactcacgccagaaaaacagcagttggaaaactgggcgtgccaagggaaa

SEQ ID NO: 696650 - DNA, 133 bp, Homo sapiens
cgtaagggtctgtaatttttttaaccagcactacaatagcaacaaacctagagagtcagttcatgacggcttctccctgtaatgctgccttacaactctacagaacagcagtcactgctgcacagttagatac

SEQ ID NO: 696651 - DNA, 286 bp, Homo sapiens
  misc_feature (3)..(3): n is a, c, g, or t
  misc_feature (13)..(13): n is a, c, g, or t
  misc_feature (120)..(120): n is a, c, g, or t
  misc_feature (124)..(124): n is a, c, g, or t
  misc_feature (208)..(208): n is a, c, g, or t
  misc_feature (210)..(210): n is a, c, g, or t
  misc_feature (213)..(214): n is a, c, g, or t
ctngaaaggcctnctggcagggattgagcaagcttggtctgcgctttgtccgacttgaggtgcatctggcacatgcgccccagctcccggaaggcctcgttaatattcccgcaacgcgcnaccntcccgcgcgttattggccatgcgcctctcccggtccctcaggtctttctcctccagggacagcacctcgtccgtactgctggtncncgnncggggggccttcagctccttcttctcctcctccgagtggtcagccgctgacgtgtaggactcgtcctccttc

SEQ ID NO: 696652 - DNA, 183 bp, Homo sapiens
gagtctcagtaatagatatgtaacaaaggagtagagcaggactctttataagagctagatggtcgtaaggagaggcatgggtacagcagtggttcatgcagaatctccttacgaccatctagctcttataaagagtcctgctctgctcctttgttacatatctataactaagactccgggaga

SEQ ID NO: 696653 - DNA, 118 bp, Homo sapiens
cgaagacccccatgctcaaaaacgtcgcacacatcggcattgccgtgacgcctctcgggccgtcccatgaactgtacaggaagcttcacggcgccgcccattctacagtcgcggcggt

SEQ ID NO: 696654 - DNA, 278 bp, Homo sapiens
  misc_feature (86)..(86): n is a, c, g, or t
  misc_feature (188)..(188): n is a, c, g, or t
gtatgatatttcttaggccataatcgtgacagctagggtcagaatgatgtggttgcttcctggaatggggccaggggccaagggangcaggcatccggtaaaatctggagaaggttaggaagtgttctctctcccctagagagagtgtgtggtcgtttaggctactagaggtgtgctaagttattccnggaatcataggagacttatatagataaggtctactgacggagatttacattttggacagagattccaaggaggtgagggcaccagctatg

SEQ ID NO: 696655 - DNA, 330 bp, Homo sapiens
  misc_feature (35)..(35): n is a, c, g, or t
  misc_feature (47)..(47): n is a, c, g, or t
  misc_feature (60)..(60): n is a, c, g, or t
  misc_feature (86)..(86): n is a, c, g, or t
  misc_feature (90)..(90): n is a, c, g, or t
  misc_feature (158)..(158): n is a, c, g, or t
  misc_feature (175)..(175): n is a, c, g, or t
  misc_feature (266)..(266): n is a, c, g, or t
  misc_feature (307)..(307): n is a, c, g, or t
agatccacttaaagaagcttgcaaaggaacggacnttaagggccttnttagaaatagaanaaaaggaagtgggcttaacaggtggnggtnggggagaatccggactttaagagctttggattggccaatttaatgtgaatccctgcgtagcagtggancaggttataataagccnggcgagactcttatcagccatttgcagggatggaagtccccaccgaccgggtagactcatttctttggttcaggatgaacctgctgctatnacttcatgccctttagaagccgtaggttggtctcaacttanactttgagggccccgggcttttg

SEQ ID NO: 696656 - DNA, 713 bp, Homo sapiens
tagagatgccgggatcctgcagctgaagggctctagagttgtcatgagaggatctgagagcttctgtggagaccctgaagcggggtggtgggcctgtgcagctccgaggaaatgtgctcggtgagaccctagtggttgctgcgccagatcatcactggaccacctgctgtgatgcaactgcgtgtgtgtgatgcttgatgtgatgcttgactcctgcatgatgatgtggcatgtgatgtgatgactgtgcctgctcatgccctcctgatgaccacctgtgtgtgcaacagtgtgtgctgtgagagtgctcaagattatcctgtgtgatggatgtatgtgcatgactccatgtgacgcagctgacgagagtgatcagcagtgagtccctgcacacaacttgttgacagtcctgtgaggtgcctaaactgaggatttcatgcttccattatgcccaactccatgtccaacatcattgagtgcgattaaatgagcttgctagtgtgagctggaagtggcacaattggatgaacattgcatgcccagtgctctgtgagcacattcactccaatgatggttgatcatgaccattggcttctcccgaacatgtaggagggccttcctcagatgatgctgccctgatatgacgaaattccatgtcatttgtaagcagagtgtgctcctttcttgccaggtgtcatgaccattggcttgta

SEQ ID NO: 696657 - DNA, 367 bp, Homo sapiens
  misc_feature (77)..(77): n is a, c, g, or t
  misc_feature (175)..(175): n is a, c, g, or t
  misc_feature (219)..(219): n is a, c, g, or t
  misc_feature (228)..(228): n is a, c, g, or t
tctggaactggagagcgtttcacttaccaactttaaccagacctcgaaagaacatttcaatccgaacaatgcctttnacgccgaagtttaaccaaactgactcaggaaacagagcgccgtcgccgcgaacgtaacgaagttgaacaggatgtagaagttgcggtgcgtgaaaaanatcgcgatgcgctatcgcgcaagctggagattgaacagcaagangcgtttatnacgcttgagcaggagcagcaggttaaaacccgtactgccgaacagaatgcacgtattgcggcttttgaagctgaacgtcgtcgtgaagcagagcagacacgaattctggctgaacgacagattcaggaaacagaaatcg

SEQ ID NO: 696658 - DNA, 555 bp, Homo sapiens
ggaggcgagagcttgcgaaaggcgagaggctgcgaagggcccaggtgtcgggcgctgttctcgttcatcatatagacaaaacagccctggtgaaaggatggtcaagtacctaaaaccggaagaaccttcttgtaagaatgtggtggcaagcatcagcctcacaaagtggacacagtataagaagggcaaggattcttggtatgcccaggaaggaggccgctatgatcggaagcagagtgctatggtgggcagacaaagccaattttccggaagaaggctaagaccacaaagaagatggtgctaaggtgaatgtgttgagcctaagttgcagatccaagaggatgctggccattaagagatgcaagcatttggaacctgggaggagataacgaagagaacgggccacagtgatccagttctaaactgtgggatatttttcttcaatttgtgacgagacacatggtgaagccatagaaaagttacccggggacaactaaattccggtggttattcttttaccacaaagaaaaaaatataaaaaaaacaaaacaaatt

SEQ ID NO: 696659 - DNA, 1753 bp, Homo sapiens
tggtgaagggggaaaggaggggggggtgtgcgttggggctctccgggaaggccgtccgggctgtggggcttgttcggccggggggcggaggcacctcgcgcgggggatgtggcccacgtgggtgtgacctgtggtcagctgtgttccattttccgtgtgtgaccattcttcattgtgcacaagggacactcggctctccgaaggtcggaacccacatctgtgggtctccttttatacgaggaaagtgtgtgggaagagggggcaagctgtggtgcttgtgagacttggtgccggaaatgtgaagcggtggtgcggaacactgtggctcaaacgccctgtggagtgtttctctcccgagagaaactctcattaccgagcttggtgagtatcaccgtgcttgtgtggagaaacagagctcccaaagaaagagtctctcagccgcctgtgggtggaaaactctatagtcgcagcaactgagaacaccacaccatgagataccgccctcgtagacagcacctgtgtgacgcgtgagaagatgcatgtgccacctatctcccctatgaagaggggggtgtgccgagtgagggggtgtgtctcccctattaagaggatcatcaagaccgttgtgggttgtctccacgaagaacaccggacgaggtgttcaccgttggaactcatctcgtcaccccacgctgtgttgatctgttctcttgaagagaacgcccgctgttggggaaaaacaaacaccaccgactgccgctgttagtagggcgcggtggggagagacaaccacccacatgcacagctgggtgagcaactatcctccgccgtgtgggcgacaacacaacatctccaaggtaaagttcccccaaagtatacttcggtgggggaaaaggagtacatccataactatcgcacgcacgcaccaaagtggggcgggtcgatcaatcgggcgtgcgcaaacacagtgtgggtgacccaccccctggaggtgagagagtggtcataagacacgagacacatagtcacctcaagcagaggaggccttacacacatcgacacggagagacagcagaaacccgtcgtgtggtaacaacacccccctccgcaacaccagttgtggataccaaggcgctcggctaagagcaatctgaccaagtgatccccccccgcgagtgattacgcaagacaccaagatctcacgccgacgagactgcggactgagtagtggaaacaccccccgccaacagagaaacagatgcccacaattcacgcagggggatctgacacccgaatgcggcattcgccccgacaagcgtaagatgcagacaacacgaggtgtgcacggtggggtgacatcagaccgattgtgaaactcctaccacacatcggcggaaacacgccgattaacccaaacaaatcgaaaggcttctcggtgccaccacgagacttttgaagaggggagaatcaccgtcgtaccgtagaacgtctcgtgagcaggtgacatcccaaccccgtcgttagaacaaccccagacgtatcaaacatgaacaaacagcgcatccacagacacctctcgtgcgacccaataccgagggggccaacaacatatggtcgcggcgatcataaacagcacggacgatcacatccacctttcgtcggcgacaatgcagttcacgagtgagaagcatcgctgagacaaacacaaatccactggcagtatgcacgctgggaccacctagcggggcaccag

SEQ ID NO: 696660 - DNA, 160 bp, Homo sapiens
cgtgcactgccctcggctgtatgcccacagccatacctggctgaggacaaaggcttgcactgtctcgcctgcgcctgggccccaccaccctccccggccagcctgaggctgctgaggaaggaaggacccgcttcctgttgtcggtgccgattaatagcga

SEQ ID NO: 696661 - DNA, 197 bp, Homo sapiens
tgtgatcgtggcagaaatcaaagcttagcgcgagacccacgatgccttccgctcctccctcagctctgccaggctgacttcaaccagctgtgcgagctgtgacgccagatcaagagcttccgtgtagcctccaacccctacacctggtttaccatggaggccctggaggagacctggaggaacctacagaaaatcat

SEQ ID NO: 696662 - DNA, 379 bp, Homo sapiens
aaatccctgtttatatggatcccatttcctgccagagtcaacactcgtgtcttggcggttgtgaatcactgtccatcctttggttgacagacacaaaaagcgcatatattaccccacagcaaatattgtctctttgaaaataatatctgaatccccggtccattccatttagtatatattgggtgctctaaaatagccccaataaggaaataaatatgagagtgtaaccttgtaaattcatacctttttaaatctcgaggttgaattccacctcaaatcactctgtgtcagctatgttagatgttagagctaagtcgtgtctccgcgctttataattaattttttttttgagagacagtatctcacctcgtgccaattc

SEQ ID NO: 696663 - DNA, 1028 bp, Homo sapiens
gggcgctgcatctcggaagaggaagaagaaggagaaacgaaggaacgaagaagaagaactaagaagaactaagaagaaggagaagaagaaggagagaagaaacgaagaaacggagcaacggaacgaagaagaactaagaagaacggaggaagaaacgaaggagaaggaacgaacgacaccggagaaggacgcaaggacgcaggcgaacgcaaggaacggacgaacggaacgaggacggaagaaactaaagaagacacggagaacggaagacggacaccgaacggacgaacgaacggaagacgacacgaacagaacggaaccacggaccgaagcgacggacggacacgaacgagacgcgagcgagacgaacgcgacgagacgcaaccggagcgacagagaacttagagacgcgacgcccgcgcgacacgagacgcaggacgagacgacgggagaggacagcgacctggacggacacggaagcggcacgcgcagcgggggcagcgctacagacacgggaccacgacagcacacagaaaacacaacacgtctaccccatcgtttcgcaaagcacacaccaaatcgggacaccgcccacggaaaaaaggccacaggaccggacaagcaaacccttatcgcaaatgtaggaggcaagccacgaaggggacgcgccaacaggcaagggatcaaaagcaaaaggacacgtttgtgggacaaccaaaagcaaagggagtaaaggcgcaggaaaggaaacccgcagaggtagaggcaaagggaaagggcaacaagaaaagcatagaggacacggtaaacgcacaccaacggaatagtatacaggggaacaccggcccgccgggggcgagacaaacgcggagagggacgatttactgggcgagaccgaaacggccccccggtaggtagaaacgcgtcacagggaggcacgacaacaacggcgggggcttcttatagcacagggcagggaaagtcacgcaacacggaaggggccgccagaagtcgaccgatttaggcgc

SEQ ID NO: 696664 - DNA, 1040 bp, Homo sapiens
  misc_feature (5)..(5): n is a, c, g, or t
  misc_feature (426)..(426): n is a, c, g, or t
  misc_feature (442)..(442): n is a, c, g, or t
  misc_feature (448)..(448): n is a, c, g, or t
  misc_feature (458)..(458): n is a, c, g, or t
  misc_feature (472)..(472): n is a, c, g, or t
  misc_feature (482)..(482): n is a, c, g, or t
  misc_feature (490)..(490): n is a, c, g, or t
  misc_feature (516)..(516): n is a, c, g, or t
  misc_feature (523)..(523): n is a, c, g, or t
  misc_feature (533)..(534): n is a, c, g, or t
  misc_feature (539)..(540): n is a, c, g, or t
  misc_feature (542)..(542): n is a, c, g, or t
  misc_feature (544)..(544): n is a, c, g, or t
  misc_feature (549)..(549): n is a, c, g, or t
  misc_feature (552)..(552): n is a, c, g, or t
  misc_feature (554)..(554): n is a, c, g, or t
  misc_feature (558)..(558): n is a, c, g, or t
  misc_feature (561)..(561): n is a, c, g, or t
  misc_feature (565)..(565): n is a, c, g, or t
  misc_feature (570)..(570): n is a, c, g, or t
  misc_feature (573)..(573): n is a, c, g, or t
  misc_feature (576)..(576): n is a, c, g, or t
  misc_feature (580)..(580): n is a, c, g, or t
  misc_feature (586)..(586): n is a, c, g, or t
  misc_feature (592)..(592): n is a, c, g, or t
  misc_feature (596)..(596): n is a, c, g, or t
  misc_feature (638)..(638): n is a, c, g, or t
  misc_feature (697)..(697): n is a, c, g, or t
  misc_feature (699)..(699): n is a, c, g, or t
  misc_feature (706)..(708): n is a, c, g, or t
  misc_feature (715)..(715): n is a, c, g, or t
  misc_feature (969)..(969): n is a, c, g, or t
gctgnctgcttttgtcccggttcatcacggccaatcagtatgagatgtgtaaggagaagtctttcaagaatgacggaataagagacctgttttaaaaaggaactgcagcaatctttgaaagacttccaaagaatgttagagcacagtacataatacacttgccctgctccctctaccccttaccccacaacgtgcaactgacactcccacccagtctctgctccacctttcagcccacgtcacgtgtagtgtccattttgtgaagccctgttgtgccacagagtgtagccaggtccccctgcagctagtcctagtgaacctcaccccgaggccctgcatgggccagcccctccatctgtacttggtccaactgcaactcatcatcggtgactggttatcacaccatcgctggcccctttgggcccngcatgtagtgtgggangccccngttagccccncactgtggtaaatnccacacaccnttaagtanataagcagacgatagttatctgcccntttcacntaatcccatnnggttnnantnccccnccncnaacnctncccnacccnccncangctncctaanacatgnaacnaaacaccccaataattgtccatgaggagaaaaaaagcatgtntcatgcatgaaggaaactgaacttgaggtggcctccttgcttgtacaacctgggtatgngnaggcagnnnagtgcanctttgcccctcagttgaaacctgtataaccctgttacaaagctgtgttgttgcttcttgtgaaggccatgatattttgtttttccccaattaattgctattgtgttattttactacttctctctgtattttttcttgcattgacattatagacattgaggacctcatccaaacaatttaaaaatgagtgtgaagggggaacaagtcaaaatatttttaaaagatcttcaaaaataatgcctctgtctagcatgncaacaagaatgcattgatattgtgaacatttgtgatatatgtattaataaatagagcaattacaagcaaag

SEQ ID NO: 696665 - DNA, 674 bp, Homo sapiens
tgaacgcttgatctcaacaaagcttcaaacccggtatgcggccccaggcgggttggctcaagatagccccacaaccggctggcatattcgagcagcaccctggcatcgacgccggcaagcggttgcttgaaatgcggcaaatgctgggccgacaagctgtactcccaggagcggcagtaggcctcaagcaccttgaggcacacctccaccaccgcttgcccttccaggcggcggaaaccaaagatattcagttcttgagcgagcgcctgcttggtcggcaccctcaccggcgtattcagcggctttggcctcgggccatgcaatagagcatgggcgaagtcctggaaggtatgcccggccttacgctcccgcgcttcccaccatgcgcgcacgcagggtttcgagtttagccgggggtgcgtgccaaccagtaaggtcttttccgggcgcaggtgctccagcaaggccaccagcaggtgactcttgccaaatgcctgcatagccttgaacatgcaggtcttcgttcaggttggcgcggaaggttctgagcaggcttgtcttgctcggggctcaaccagcgctcgcgatgcctgggcgtgattactgctggctgacggatcattgccttgaggtgcggactatatcgacgtccattgccctggcaaagatagccg

SEQ ID NO: 696666 - DNA, 655 bp, Homo sapiens
  misc_feature (17)..(17): n is a, c, g, or t
  misc_feature (70)..(70): n is a, c, g, or t
  misc_feature (72)..(72): n is a, c, g, or t
  misc_feature (95)..(95): n is a, c, g, or t
  misc_feature (104)..(104): n is a, c, g, or t
  misc_feature (116)..(117): n is a, c, g, or t
  misc_feature (121)..(121): n is a, c, g, or t
  misc_feature (125)..(125): n is a, c, g, or t
  misc_feature (142)..(142): n is a, c, g, or t
  misc_feature (148)..(149): n is a, c, g, or t
  misc_feature (151)..(151): n is a, c, g, or t
  misc_feature (153)..(153): n is a, c, g, or t
  misc_feature (155)..(155): n is a, c, g, or t
  misc_feature (158)..(158): n is a, c, g, or t
  misc_feature (164)..(165): n is a, c, g, or t
  misc_feature (170)..(171): n is a, c, g, or t
  misc_feature (174)..(174): n is a, c, g, or t
  misc_feature (179)..(179): n is a, c, g, or t
  misc_feature (182)..(182): n is a, c, g, or t
  misc_feature (185)..(185): n is a, c, g, or t
  misc_feature (189)..(189): n is a, c, g, or t
  misc_feature (193)..(193): n is a, c, g, or t
  misc_feature (204)..(204): n is a, c, g, or t
  misc_feature (206)..(207): n is a, c, g, or t
  misc_feature (209)..(209): n is a, c, g, or t
  misc_feature (214)..(214): n is a, c, g, or t
  misc_feature (219)..(219): n is a, c, g, or t
  misc_feature (222)..(222): n is a, c, g, or t
  misc_feature (226)..(226): n is a, c, g, or t
  misc_feature (232)..(237): n is a, c, g, or t
  misc_feature (240)..(240): n is a, c, g, or t
  misc_feature (245)..(245): n is a, c, g, or t
  misc_feature (249)..(249): n is a, c, g, or t
  misc_feature (256)..(256): n is a, c, g, or t
  misc_feature (258)..(258): n is a, c, g, or t
  misc_feature (260)..(260): n is a, c, g, or t
  misc_feature (263)..(263): n is a, c, g, or t
  misc_feature (266)..(266): n is a, c, g, or t
  misc_feature (269)..(271): n is a, c, g, or t
  misc_feature (274)..(282): n is a, c, g, or t
  misc_feature (290)..(290): n is a, c, g, or t
  misc_feature (294)..(294): n is a, c, g, or t
  misc_feature (301)..(301): n is a, c, g, or t
  misc_feature (305)..(307): n is a, c, g, or t
  misc_feature (311)..(313): n is a, c, g, or t
  misc_feature (315)..(317): n is a, c, g, or t
  misc_feature (319)..(320): n is a, c, g, or t
  misc_feature (324)..(325): n is a, c, g, or t
  misc_feature (327)..(327): n is a, c, g, or t
  misc_feature (329)..(329): n is a, c, g, or t
  misc_feature (335)..(335): n is a, c, g, or t
  misc_feature (342)..(342): n is a, c, g, or t
  misc_feature (584)..(584): n is a, c, g, or t
tacgggttagcacaccnccgcgcgccccggtccgcccgccagcgacgcgcccaccccccgcggccccccncntcgcgcccaaagcccacacaccngcaactacncaccccccccanncttntctnttcttttcactcaatcncatccnntntnanttncccccnnccaannctnccctnccntcntcangctnccccacacatntnncnaaacncctcnatnattntccatnnnnnnaanaaaancatntctcatncntnaanganacnnnacnnnnnnnnnccccctcncctntcacatncctnnntatnnntnnncnntttnncncntctttncctctcngttgaaacctgtataaccctgttacaaagctgtgttgttgcttcttgtgaaggccatgatattttgtttttccccaattaattgctattgtgttattttactacttctctctgtattttttcttgcattgacattatagacattgaggacctcatccaaacaatttaaaaatgagtgtgaagggggaacaagtcaaaatatttttaaaagatcttcaaaaataatgcctctgtctagcatgncaacaagaatgcattgatattgtgaacatttgtgatatatgtattaataaatagagcaattacaagcaaag

SEQ ID NO: 696667 - DNA, 80 bp, Homo sapiens
  misc_feature (3)..(3): n is a, c, g, or t
  misc_feature (14)..(14): n is a, c, g, or t
agnacttttcaagnaaaaatacttgaaaataaattacattgccttttgtccattaatcagcaaaaaaacatggccttaac

SEQ ID NO: 696668 - DNA, 1080 bp, Homo sapiens
  misc_feature (5)..(5): n is a, c, g, or t
  misc_feature (426)..(426): n is a, c, g, or t
  misc_feature (442)..(442): n is a, c, g, or t
  misc_feature (448)..(448): n is a, c, g, or t
  misc_feature (458)..(458): n is a, c, g, or t
  misc_feature (472)..(472): n is a, c, g, or t
  misc_feature (482)..(482): n is a, c, g, or t
  misc_feature (490)..(490): n is a, c, g, or t
  misc_feature (516)..(516): n is a, c, g, or t
  misc_feature (523)..(523): n is a, c, g, or t
  misc_feature (533)..(534): n is a, c, g, or t
  misc_feature (539)..(540): n is a, c, g, or t
  misc_feature (542)..(542): n is a, c, g, or t
  misc_feature (544)..(544): n is a, c, g, or t
  misc_feature (549)..(549): n is a, c, g, or t
  misc_feature (552)..(552): n is a, c, g, or t
  misc_feature (554)..(554): n is a, c, g, or t
  misc_feature (558)..(558): n is a, c, g, or t
  misc_feature (561)..(561): n is a, c, g, or t
  misc_feature (565)..(565): n is a, c, g, or t
  misc_feature (570)..(570): n is a, c, g, or t
  misc_feature (573)..(573): n is a, c, g, or t
  misc_feature (576)..(576): n is a, c, g, or t
  misc_feature (580)..(580): n is a, c, g, or t
  misc_feature (586)..(586): n is a, c, g, or t
  misc_feature (592)..(592): n is a, c, g, or t
  misc_feature (596)..(596): n is a, c, g, or t
  misc_feature (638)..(638): n is a, c, g, or t
  misc_feature (723)..(723): n is a, c, g, or t
  misc_feature (725)..(725): n is a, c, g, or t
  misc_feature (748)..(748): n is a, c, g, or t
  misc_feature (756)..(756): n is a, c, g, or t
  misc_feature (1009)..(1009): n is a, c, g, or t
gctgnctgcttttgtcccggttcatcacggccaatcagtatgagatgtgtaaggagaagtctttcaagaatgacggaataagagacctgttttaaaaaggaactgcagcaatctttgaaagacttccaaagaatgttagagcacagtacataatacacttgccctgctccctctaccccttaccccacaacgtgcaactgacactcccacccagtctctgctccacctttcagcccacgtcacgtgtagtgtccattttgtgaagccctgttgtgccacagagtgtagccaggtccccctgcagctagtcctagtgaacctcaccccgaggccctgcatgggccagcccctccatctgtacttggtccaactgcaactcatcatcggtgactggttatcacaccatcgctggcccctttgggcccngcatgtagtgtgggangccccngttagccccncactgtggtaaatnccacacaccnttaagtanataagcagacgatagttatctgcccntttcacntaatcccatnnggttnnantnccccnccncnaacnctncccnacccnccncangctncctaanacatgnaacnaaacaccccaataattgtccatgaggagaaaaaaagcatgtntcatgcatgaaggaaactgaacttgaggtggcctccttgcttgtacaacctgggatagggggttttgggtttaaagcccgccaangnttttaaggctcggccccaatttntccttttnttgccctttcggttgaaacctgtataaccctgttacaaagctgtgttgttgcttcttgtgaaggccatgatattttgtttttccccaattaattgctattgtgttattttactacttctctctgtattttttcttgcattgacattatagacattgaggacctcatccaaacaatttaaaaatgagtgtgaagggggaacaagtcaaaatatttttaaaagatcttcaaaaataatgcctctgtctagcatgncaacaagaatgcattgatattgtgaacatttgtgatatatgtattaataaatagagcaattacaagcaaag

SEQ ID NO: 696669 - DNA, 319 bp, Homo sapiens
  misc_feature (190)..(190): n is a, c, g, or t
  misc_feature (197)..(197): n is a, c, g, or t
  misc_feature (205)..(205): n is a, c, g, or t
  misc_feature (229)..(229): n is a, c, g, or t
  misc_feature (259)..(259): n is a, c, g, or t
  misc_feature (265)..(265): n is a, c, g, or t
ctagttttagaagtttcaatcagcattcatcttatatagtttcccacttgggcatcatccgtgtgcaagaaagctggtggtcttggtgcaactctgcgcggggccgggtcactgggtgtgcctgcttaatgcgtcgaaagcctttcatgcgtgttccatcgtcctgaacagacataaagtgttcttcctngcccaanttaccctngtcatcgtgctacgcggcatcctncattctttctgtgttttaagggggactgcnctcccnacacttttactttgaacgcggtagctagctgctatggaaacttctaaaactagg

SEQ ID NO: 696670 - DNA, 351 bp, Homo sapiens
aacgtcatatagcgtgcttcatactattctatcagtgtcctccaaagatgattcctaagtattttaatgtcatcctttattgactcataatagacttgaacctgttaggttatttgctcgtcagttaagtacacataaatatcatgtggaatttagacatcaaaatttgcactgtccttagcagtcatgacttctagcccccttgcgcctgaacagggcttgattaaacgaaagtgaggttcgttagaaccaagaaggacaattatcattagcttccaagaaactaacttggttattgtcttcatttccagggagtttcctggtctggtttttggacaggatttgatcttc

SEQ ID NO: 696671 - DNA, 901 bp, Homo sapiens
  misc_feature (215)..(215): n is a, c, g, or t
tggctgtaaataactttaaggtgttgatgtgggagtcacaggggaggtatgtttgctccaagggttcttcagtgccatcctcaaagctggttagtgcaggaggtagggcagagtgggttccagttttcttccaggaagggtttagggaggtcccaggagccccaggaatgagtccctcggtaccatggcaagcacaatttaagaggggttttctngcccacccttgagcctaccccaggtccagcagaggaacgaggaggccagatgggccaacttgctatagacagcgccgtatccagagcccaactgcgcatggggtcattttctctatctggggcagatcctcatgccagcaccttttctctctcacactgtgtgatctggagccaatgtgtcgaggttgtgccttggttgcagaggcctctggtccgtggggatcgctgaggtgcggaggggggcaaccgagcgagccctaggggagtggtctggggggacagcatccatggcaaacaggttcgggttctcccccaggcagggcttgggtccagctctggggctgggccactgaggcagtgcgagcggggtgtataggcaggcgacaggcgtggttctgtgaaccttggccagccacgggtgtggggggttgtcctccaagccctttgaggcctctccccgctggggtcaggattgtctagtcacccgtttgcgatagttcatcccaggagggtcaaataagccttccgtattgggacaggggccccttgttttgcccgagtgctggggggggtcccggcgggagcgggggtttccacttcttggattttcacacaggctcgggtcccatgggcattgtaaaaaaggggtccagagcctccaccgttgtgaggtccccattgtgtaa

SEQ ID NO: 696672 - DNA, 147 bp, Homo sapiens
  misc_feature (66)..(66): n is a, c, g, or t
ggccatggccgctttcaaaccatggaggagaaaaaagccttcctggggccccttaaaaaaaacccnatttccaaggaaaaaggggctttatgccagggacaaatttttccgttgggggggtttccataaaaggttttttccccttga

SEQ ID NO: 696673 - DNA, 1330 bp, Homo sapiens
cgacttgcccaaaccctacaaaaaattggaaattttcaaaaaaaaaaaaaaaaggggaaagggagggaagagagaaaaggaattgggccctttcgtgcacaaagaagtttgagaaagagttggctcttcaagtgaatctcaggctttaaccttagttcctttgcagattgagttaagactttccacagcttaactattgttgaaagaaagggtggaaccagagggaccaggttcacgcaggcacttctttttccacaaagggggggggattctccgggaaccaacattgaagagaccaaaccaccaacctttgttgccagttgtggaagaatatattgaaggtgtggtgaggttatctccgagtggacacgtgtgtgtgggacacagagagaacactctcgagccctttgagcgtgaaattgagagcgacaaagaggtttgtgggaaagaaacttcttatttctccaaacctgtgtaagaaagttttggccaattctctccattaaagtgttgtgcgcaaaagccgagaagagagcctttatgtgaaaaaagagcttttctcacaactgtggggcaacagggtgcgctatttaaatttcagaagatctctgtggcccacaatgttggagttttaaagagggcaagtgtgtccccagtataaggcgtatacatgtgtggcgaataacattggtgaaactattatgtgtggccacccaatttttgtggcgatatataagggggacctgtggggtaaacactctcaaacatgtgggttttttacccatattaggggccccaagggaggaagggtttttccaaagtggcccattttatgggaggaaaggggcgccacaaggggggtatatattcaaaactcttctttatccgcccaaaggcggcaacattttgtcggcccttttcaactctctaataaagttgtgaggggcggcgcacatctattacttataaaccctccaagaggatatccctttttccccaaagggctggagtgatttttcaccatctctgtgggggagggaatgtggcaaacaaccgccccaggggtgttgtgtcccaaacagattttcttttcccgccaaaggttttcatctaccaatcgtgaaggaaaaacggtcgttgctacaaacaacccctgtggggggagttttccacatctacttggggcgttaacaccgtttcttcattaaaaggatgttatcacacccgtttttataggcccacattagacctcttttcaagccaccatttcttttcttgggggccccaaacaatggacaaaacacgggggcttcatttggccgaatgtctg

SEQ ID NO: 696674 - DNA, 145 bp, Homo sapiens
gggtgctctgcctatataaggtcttatgtgtgatgaaaagtgtaagttgatgttgcctgagtcaggacgacaggtgttaggtattatgctcagcctgaggatttgcttcatgcacggggtgtttagtaataaagtgacgtttgca

SEQ ID NO: 696675 - DNA, 973 bp, Homo sapiens
  misc_feature (209)..(209): n is a, c, g, or t
aaatgacctatcctctaaaaggcctttctttctctttttaaaattctttgttaaatttttaataagtaatacacatatgtgcttcaagctttaaaaaatgcaaaaggcggccaggtgtagtggctcccacctgtaaacccagcactttgggaggctgaggcagaaggatcacttgaggccgggagttcaagaccagcctgggcaacctngtgagaccctgtctcttcaaaactaaaaataaagaaattactctctggtgcttcaagcaacatctctggagagtcgtgttgtgtgaattggtttgtatacattagtatgtgtatgtattcacacattcatatacactcaggatacagttggcctaattatcattggggccataggtaaaacttatgaagaatgttctcatgctgaattgtaattttcttttacctgtaaagtaaaatttagatcaatcccatgtctgtgtttattttgaatatcatagatatgctgtacatttaaagaggcaatgctactgggattatgtaggttctaactcattttaacaagggcactgtcaggcctctaagcccaagctaagccatcataacccctgtgacctgcatgtatacatccagatgacctgaagcaactgaagaaccacaaaagaagcaaaataggcagttcctgccttaactgatgacattccacccttgtgatttcgttcctgctccagcctaactgaacaactgacctcgtgacattccttctcctggactgagtctcaggagctccccgacaagcacttgtgacccctgaccctgaccaacaagagaaaaaccccctttaactgtaattttccactaacctaaccaaatcctataaaactgcgccaccccatctccctttgctgactcctttatatggactcagtcggctgcaaccagatgatcagaggctttatggccaacaaaccacaaataaaacacac

SEQ ID NO: 696676 - DNA, 508 bp, Homo sapiens
  misc_feature (141)..(141): n is a, c, g, or t
  misc_feature (256)..(256): n is a, c, g, or t
tttttaaaaaaaaaaaaaagtatggttgggcgggcccttttttttaaaaaaaaaaacccgtgtattttggcggattcgggggggccccccccccccctctataaaaaaaaaaaggtttttttttagggaccaccccccccnaaaaaaaaaaaaaattttttttttaaaaacacccccccccccccccccctaatgttgtttctccccccccggggggggggagaagaaaaaaaataataattttctcttttttttntaaaaaataaaaaaaaaaaaaaccccccccccccaccatttttgggggggaaaaaaaaaaatttttttttcccccccccccccccctgaaaaaaaaccccctctttttccacattttttttccccccccttttttaaaaaagggaaaaatggggtttttccccctttaaaaccctttaccaaaaaagggggggccccatggaaaagcccaattcccccccagtttgtggacaaaggtaggccagtcaacaaa

SEQ ID NO: 696677 - DNA, 987 bp, Homo sapiens
  misc_feature (118)..(118): n is a, c, g, or t
aggtgcggtctcggctcgctgcagcctccgcctcccaggttcaggagattctcattcctcaacttcccgggtagcttggattacaggcatgtccaccacagccagctaattttttttnttttttgaaatggagtctcactctgttgcccaggctggagtgcagtagcgtgacctcagctcactgcaacctctgcctcctgggttcaagggattctcctgcctcagcctcccctgtctcttcaaaactaaaaataaagaaattactctctggtgcttcaagcaacatctctggagagtcgtgttgtgtgaattggtttgtatacattagtatgtgtatgtattcacacattcatatacactcaggatacagttggcctaattatcattggggccataggtaaaacttatgaagaatgttctcatgctgaattgtaattttcttttacctgtaaagtaaaatttagatcaatcccatgtctgtgtttattttgaatatcatagatatgctgtacatttaaagaggcaatgctactgggattatgtaggttctaactcattttaacaagggcactgtcaggcctctaagcccaagctaagccatcataacccctgtgacctgcatgtatacatccagatgacctgaagcaactgaagaaccacaaaagaagcaaaataggcagttcctgccttaactgatgacattccacccttgtgatttcgttcctgctccagcctaactgaacaactgacctcgtgacattccttctcctggactgagtctcaggagctccccgacaagcacttgtgacccctgaccctgaccaacaagagaaaaaccccctttaactgtaattttccactaacctaaccaaatcctataaaactgcgccaccccatctccctttgctgactcctttatatggactcagtcggctgcaaccagatgatcagaggctttatggccaacaaaccacaaataaaacacac

SEQ ID NO: 696678 - DNA, 179 bp, Homo sapiens
ggagcctggtttctcatagacagacccaattcagactggttttctacatgtctctgactgcagctctgcctgctccctgctcaaacccgagcatctcgggaactcccattagtgtctgacgctggagtgtgcccaggatgtggacgcattatgagcctgcagcaccgcagagcactgtc

SEQ ID NO: 696679 - DNA, 104 bp, Homo sapiens
  misc_feature (76)..(76): n is a, c, g, or t
ctttagtgtatgtccatgtgtcatgggcgcttcaggccttggggcatagcccatgttcttgagcacctcggtgttnggtgtggcattctccaggcctcccgctg

SEQ ID NO: 696680 - DNA, 160 bp, Homo sapiens
cgagggggtattttggaaggttttataaaatcaaccaacagatgagaatttaagggacattttgagaaaagtaaaatgatcttgaacttaaaggtttatgacattgaaaaggtaaacttgaacatttttctttaataaaattaattcaaaacaaaaatat

SEQ ID NO: 696681 - DNA, 533 bp, Homo sapiens
atatgagagaacctacatttttttttggtgaatgagaagagacaaatatctagactgggaaagggtgcctggcactcagctggagcactgccctagtgcggaggaagagatgcagaatatgatggggctcccacctctgtcccgtcttcctggtccctctccccttctggaggtgactgagttgctggtgtctcatgagatgtggtaaagcatcctggttaagagcacgggagatagtatccagctgggctttccatccggttatgaatgggcagattaaccttggacaagtgatttgaacacggcctcagttcttaatctgtggagtatgaagaaaaatagacctacctcccagggttatggggcagtttaaatgagttaaggtatacgaagtatttacatcagggtggggcacccagggatcacggtatgagaatttcctgaacaacaacaacaaaaaaacccttctagaaatatttttacaaattatgagtgtattttcctaattttgaaaatacaactagtagaatacc

SEQ ID NO: 696682 - DNA, 200 bp, Homo sapiens
gggtgaatgtgagtacagggaagcagcggccgccatttcagggagcttttcgacgctgtcgcaggggttggatcctgagctgccgaagccgccgtcctgctctaccgggtggggttttttaattccattgtttttttttagattcttctcgggcctagccgtccttgggacccgattatttggggtggggggttccgcgg

SEQ ID NO: 696683 - DNA, 357 bp, Homo sapiens
atacacctccataacgtgtgcccaggctgaagtgaaatagcgcgatcttgactcactgtaacctctgacttctgggttcaagcaattctcctgcttcggtctgcgagagcatgtgggattacaggcgcacgccaccatgcccagctaaatttttggtatttttgtagaaacagggtttttccacattggccaggctggtcttgaactcctgacctcaaggaatccatcctcttcagcctcgcaaagtgctgagattataggcatgagacaccttgcccggcccctgtgactcattcttaaaaaggatctttggattatgggtttccacttttgcaaggaaatgtgagaatgatactt

SEQ ID NO: 696684 - DNA, 1006 bp, Homo sapiens
tggtggactccgccgcggtctctggtgctgagatcgtggaatcggatcaaggcgagaggatccggcaggcaaggagcttcgtgggagcgggggttgggccgcacatttacgtgcgcgaagcggattggaccgggagctggtgacgatggcggggccgcagccctggcgctgtagactggaagcaggttgttgaacccgcgaaacaaggcgaggcgtgaccctgtaatgcggaccccgtagtgacagccactgcttgccagggtgatttgactagggtttgatgaaggggaatgatggggagaggtgatttcctagtagtggggtagcattagaacacactggcattcgaggctccctgcttggacacggacaaaaggtgttgcggaaaacctcctctagaaaagcatggaatgaagagcattgggagcagactctgcacaggatcgtctgattgagtgaaatatctgatgaggaaggggtctggacgatgaagattctagcagggactggagtctggaaggaatatgatgaggacagacctgggtgattgcttgaagaacaggagtgtggttgatcacgaggcatgagcaagaagagtgagaagccagtctgtaaaaaaaccggtgcttaagtgtccgagagtatcagtgacttgagaaattatccctagggactggatgacttggtgagcctgtgagcgaggaacgaagaccgacgagacggcctggaacccaggggatgacgcggacgaccccccagggcacacgctgggaacaaggcctgcaaatccaaccccggcgcgaagcgggcgggacgcccccacagggccaggtccgacgaacggaacagacagcggaaagccaccgggggcacccggaagacgtacaaaagcctcggccaacgcccccactgcacgcacacgcgccaaaccgcgactcagcaccgtggcgacatgtccaaacaacgccaacacacggaccggcgacacaacgcggtacaacgaccg

SEQ ID NO: 696685 - DNA, 128 bp, Homo sapiens
ttgctccacttgggtgtgaggagttcagttatatgtttgggatttaataaggtagtggtgtgttgagcttgaacgcttacttaataaggtggactgcttataaggccgtactatagggtgtctaaata

SEQ ID NO: 696686 - DNA, 247 bp, Homo sapiens
accgccttcccctacagtgagctgatgatcatgcattcggtctagcctgtgtgacagagtgatgatccatccttaagcataataaaacaaaaaaaacaagacaaataaacaattcattgcggtattgggtggcattaagttaaatcacttgtggccaaatttttttttgaaaatggttttccggttttttataaaggaaagggtttttttttaaattgccccctttttgggctggtatgcacaactt

SEQ ID NO: 696687 - DNA, 785 bp, Homo sapiens
gtttcggtccaagttggtcgcttccctgcgccgagagtgagcagtagtcaaacatgtcagggtgggagtcacattaggaaaccgagggctgaggaagaagcacgaggaggaacatagcacagagaagcttgagagcaagtggaatactataaatatgcaggaagagatagtttgatggtttcggttgatgcctccaatggctatgttggaattctcagagtgaagatgagtgtgacaatgcttttgacattgagcttgtccaggtgatatccaagagtgtgtacatctagtaagtatcatcagtcagtagatctgagatcagcttggctgtgagtgtctctatgggtaccgaccagaagaccaacattcagtgaatattagagaattgaggtgtatgttttatagggagctgggagtagatcgcgaggtgcaaaacgaattttagagctgtgacccgagtattagaggggctaggcgaagggacagaaacatgtttgatcgagatatgatgggctcgcggatctggatagtggactcagtggaagtgctgtgggtctgtgacagactcttataatgatgtccagatgcaacgattgagatcatcaagacggatgcatggctgttgccccaggtgaatgacagatcgcgcaatggtaatggagctggtgccggaaagctagccgggccgagggaccaggaggtcggttatctccggagatacatggcatctgccttggacttggtgccctgaagaaaacttggggttgaaaatattcttggtctaa

SEQ ID NO: 696688 - DNA, 370 bp, Homo sapiens
  misc_feature (17)..(17): n is a, c, g, or t
  misc_feature (52)..(52): n is a, c, g, or t
ctgcttcggataggcancccaagtctgcgagaggctcctggaccgggcactngcccttctggctctgaccagcaagaccagaaagacttcatctggctactcgcgcctcccaggtgtaggcaaagctgggaaagccccgatccaggatgatggagaaaggcatcttccagaaacctggggtatctgaaggtcagaggtcacctcacacataaagtcctcaggtcactgagaaggctcatttgaggcaccccattccaagacacaagcatacaataaaaactctcagaacatcacagtggcccccagctcgggaactggttagcaagtgtggtcatccgaagcaagttgacggggtaccgagatcgaatac

SEQ ID NO: 696689 - DNA, 551 bp, Homo sapiens
  misc_feature (64)..(64): n is a, c, g, or t
  misc_feature (68)..(68): n is a, c, g, or t
  misc_feature (314)..(314): n is a, c, g, or t
tgatccgcgttctggtaaaagctggaagatggccttaattcttgaagtctggtgatgctgccantgtngatatggttcctggcaagcccatgtgtgttgagagctctcagactatccacccttggggtcgctttgctgttcgtgatatgagacagacagttgcggtgggtgtcatcaaagcagtggacaagaaggctgctggagctggcaaggtcaccaagtctgcccagaaagctcagaaggctaaatgaatattatccctaatacctcccccccactcttaatcagtggtggagaacggtctcagaactgtntgtttcattggccattaaagtttagtagtaaaagcctggttaatgataacaatgcatcgtaaaccctcagaaagaaaaggagaatgtttttggggaccccttgggttttctttttgcggggggcaggttttaagtaataagtttttaaaaccagtccttttaaagggaaccaccttgcccaaaatttggccccagatttttaggcccctttaaaaaggttaattgagaaaaaaaaaa

SEQ ID NO: 696690 - DNA, 900 bp, Homo sapiens
gggtcgtgtctgctctggggtggcgacagttctgtttatttgtgggtcccaggtgcttggcggtgctcccgtgttggttccgctcggcctggttgccgtcctgtctgttttctggccccctggtgttgggctctgctgtcgttgtggttgtggcccccgttcagtggcctgtggggcccctgggctcggggatttgagacggttgcgttagttggtcgcccttggccagagtgacattgcgacaatgtaaagtgttcacacaagatgtttgtaggactgtcgggggaagcccctgtggtcggattgtagggccagatgtcccagatgggcgggcgttctccccctgggccggtcaccgtgctcttgttcggggtagtgcgcgcccacgtgtgttggtggcgcccagtacctctgagtgtaggtccaggccctgtttctggagatccgccagtcccatgcccccgttgtggccccacccgcccctgggaccccctgccctcccacctccaggtagttgttttgatgtttagccccctccccattgtcccaacaccctcccttgctatcgcccggtgccctgaccccaggagccccacctggtttatgggatcccaggagtctccccgcccctggggtcttggtctctctgcccctctctgcacgggattgtcgccccccgtctttctccagaccaccccccctgaggggggccccaggtttagtgctgctgcgtttctactgctgcacccgcagcccatcggccaggcccccccagaccagccctttgtactcttgcttgcggagggctgggagacccctccaggacattctccaccctcccccctgtctgcccagttgtagctatagctacccaattaaaaaaaaccctgttttcccaga

SEQ ID NO: 696691 - DNA, 282 bp, Homo sapiens
caccctcggatcgtgtcttgacgattactcatctgctgagggtggaagggcgagtgagcagacactcaggaggtgtcttgagattatcatccgctagagtggtggaacggggagtgagcacacactcgaggaggtgtcttgacgattatcatcctgctgaggtgatggaaaggggacgtgagcacacactacgggaaggtgtcttagagacttatccatccgctagagtggttggacagggagagtgcagcacgacactatgggcaggtgtctatgaggcta

SEQ ID NO: 696692 - DNA, 420 bp, Homo sapiens
  misc_feature (365)..(365): n is a, c, g, or t
  misc_feature (409)..(409): n is a, c, g, or t
tcttgcctgaggaaccctgcttgtccaacagggtgtcaggatttaaggaaaaccttcgtcttaggctaagtctgaaatggtctgaaatatgcttttctatgggtcttgttattttataaaattttacatctaaatttttgctaaggatgtattttgattattgaaaagaaaatttctatttaaactgaaatatattgcatcaatgttaaataacctatttttttaagtcacttaaggagaagttcaagctctagtgtaaattggaaattcaatattaagagatttacccaagaatcttatggagttactggatgtctttctacacaagttagcttttacaaggactatctgctccataactagtntagaactttcagtacatgtgaatagttgattttaagcttaggtnttactgttctg

SEQ ID NO: 696693 - DNA, 1046 bp, Homo sapiens
atctggggcttggtgcaggtgagaccacaaagcaacccatccactttgaactgatctgtcctctgggttcattagtccacattacacagtgactgtcgtcgtcgagcttggtatccggtgcagcacttgctcatggtaaggctctgggaggtgcgcattgcccggcatgggatatggcgcattgactgatgaaattatgtgatgtgcatcctactggtggatcgcacccaggctacactccctcatactcccacgagcattttcgtcccaaaaaagtcagcgctaagctccgttcactacaagcaccaaaaagtgtgatgctcttgttcgcggctagtacgtcgacctaactagactgtagccaagggccctagccatatccggtagtatactaccacgactattggtagcgtttgtgtgggcgagggacgtggaccccatcgagatcggcgcgtacgtccccttcatggggatctgtccttgcggcgcgctgctctgttgccctctcggtgtgtcgagcgatgatactatctcggtcggtatagcattagcgaggcagcgaagggtcggtcgtgtctgcctcgtctgcatggcccttcctgtcctccgtactacattcagctttgtcactcggatggtaccattacccagatctgcatgatgcacgcgaagcgacgggggcctttcctttcaaggttcgtagcattgggcggggcaaggtatgggcatcgtctccctgtaatgcgtgatgtcatgcgtggggattccgcatgaggagcggcctgtcaggtggcacccgagctgaagactggtgggctggtgctgacgggtgggcccgcgtggggcgggctggtcttgacttgggtggttgttgttgccgtcgattcgtgggggttgggcctgccgaccgtgaggccggctttggtcccggccctcggagtgggtgttggggggacctcgagggtgcggcttattgtttgcagagggcccgggataaggtcccgggagggtgggtggtgccgctggctggtggacaagaggggttc

SEQ ID NO: 696694 - DNA, 84 bp, Homo sapiens
  misc_feature (79)..(80): n is a, c, g, or t
gtgttttcctctttttctgtgtgaggttttttttttttttaatctgcatttattagtattctaataaaagcattttgtnntgga

SEQ ID NO: 696695 - DNA, 194 bp, Homo sapiens
tgcagatccctagtctgtagccagagctaaggcactcgtccttttccttttatttaaaaagaaaaacaaaaaagcatggatagcagaggcctcggagctctcaaatgccttgtcttacccttccctcctccctcccggaaagttttggccaagtagtgatgctttatattaactgcaaagtgaatggactagag

SEQ ID NO: 696696 - DNA, 811 bp, Homo sapiens
ggatttgaatcggaggctgctgtgaaaagggatgcagcttctgctagccactgtgaacttctgaatctcactagggtgggtctgcttggggcactcagataaccccagtatttcccaaaccagcgtttcccttgtgcttcaggacatatctgtacccaagcctgcactatggagaagtgggacggtcaatgagggcacctcagcttttcacatgccctgagtggatgatccagttggctgaccagaagcaagaattcaacaaagtaggcagcaaaattggacgtcgctctgtgtctcgttccatttctcagtcatctactgacaggtacagttcaggggcttcatatacagatagctctgatgatgagacatcggccagggactagcagcaaaagaactctaagggaagcaggtgacttctgtgttaagaacatcaaaagggcagagtgtggcgaagagacaattgagattggtggaacaagaaatgctgcattgatggcttgaggaagagagctcaaggagaaaaagcctttgtggtggagccaaaatcgtgggttgaccatacatgcatgtcagaactgtgtgcttatggaacactctgggtgctcttggggggccagtgccgatggggctggctgcagacatctattccactcttcactgaaggtggctgcttgtctagcagaaagtgggtttctgttgttggcctggaagggagagttcggacattgaatttggggggtgtatccacacaactttgtggactgtggagggggtgcgagcccacacttgatcttgggttgattggcgg

SEQ ID NO: 696697 - DNA, 118 bp, Homo sapiens
cagagcgggctcaaggataggtgattttggaagaacgatctcggtccggcaacattggtcacagtgggacgcaatttggggtgagtctctctcatatgatctcctcttaattcacatg

SEQ ID NO: 696698 - DNA, 282 bp, Homo sapiens
  misc_feature (114)..(115): n is a, c, g, or t
  misc_feature (181)..(181): n is a, c, g, or t
  misc_feature (228)..(228): n is a, c, g, or t
  misc_feature (235)..(235): n is a, c, g, or t
  misc_feature (260)..(260): n is a, c, g, or t
gtgttgaagaagaccagacggagaaccccctgatcctcatcgacgaggtggacaagatcggccgaggctaccaggtggacccgtcgtcggcactgctggagctgctggacccanngagcagaatgccaagctttccttgtggacccaaccttaacctgggaccggtgccaccgttggcacntttgttcccacagggtgcctgcttcacaatccttgcgacggtgcgcnaaacggnttccacctgtgtacctacgccaaantcccccccccgtaagcccccgg

SEQ ID NO: 696699 - DNA, 157 bp, Homo sapiens
agaagttctatctaatcattaaagtaaaacaaagccatctagggtcttatattcaagtactgacagttctcatgaagaagctcttcagactaaaaagacttctacttcatgttccgtcatccctgacacatcaaattctgatactgaaaccaaaacg

SEQ ID NO: 696700 - DNA, 971 bp, Homo sapiens
  misc_feature (858)..(858): n is a, c, g, or t
  misc_feature (885)..(885): n is a, c, g, or t
  misc_feature (963)..(963): n is a, c, g, or t
  misc_feature (965)..(965): n is a, c, g, or t
  misc_feature (967)..(967): n is a, c, g, or t
ctcaaaataataactccccagcatccacttgccttgaccagaaaagctgtcattccacaattgtgctaatttgtcccagaaaagcagacatcctatacatgaaaacagacttgtataatgcatgatcattatcataactctagctatagtaactaacagctttctcataatcaatgagggacccattttctctggctttattgaaacttccttagtgaagatcaacttcatttccttagcaaataactctcattcggactccatcatagtaccttttcctacctctagtaaaaattcctctcactttatttccaaaccattctctatatacctctcaaacccccatccacaaacacattaaacagctctcctcgtcctactctccaatttccaaaccagtaagtctcagttcccagtaacttacctaaaatacacatacttcttactctcttcagttcacaagtttcttaacattaatttagataccttcaaactgccagcttaagactatggggaaaatagcaatcagaaaaaaaactgcccagttacctcataatactgaaattgttctggatcatcagttagctatgttctaaggcaggagtcagaaatttctttacttctctctgaagaagtaagcttgagtgccactggtaggcctacagcaagagtaaaagtggagagagaaacaaagaaaaaggataggagagagaagatgccagatgtacatggtaaggaggtaggtcaagtaccaccaccaactacctgcatttaaaattgccaatccactccagctgaatgggagtttgacccaaactcaacatgtgtctgataagtcattagctgatggctatcatngtttgagctagtcaagatgaataggtnattcacctgtcccataactttaactgccacttcacgataaggacagttttttcttaaatcctcctaggatccttccangncnaatt

SEQ ID NO: 696701 - DNA, 768 bp, Homo sapiens
ggtagaaacatgcttgccttatgtatcagaggacatgctcagcagatccaagagatatatttggcaactttttctagaaaaggcacattgggtatcattcattacattctctgatgttatttcttggggtttcttgttctttttgttttgggaaacaggtctggtgggggttcgtgcccaggctgggtagtgtgggtgggccccaagtcacagctgcatggcagtcctcaagtcacccaggcctaaacaatcctcccaccttggtagcgcggggacatacggcctcacgagacacaccgtggccataaacatgtcttatgtgggtggaaagcggatctcctcatagtggtggcccgaggggggctcctcagggcctccgtgggcctcagaagtggatcctccgtggccatcaggttctccaagggcacaggggccaatgtgtgatacgctttgtgctccctgtgtgccatctcatgtgcgccaaataagagagggtccatatatcacctttttaaacgagaattggagcttcccaataaaatcggggataaatggtacgggtggggcgcaaagcgttgctgtcaaaaagcgctggagaaatagtgggggaaatgcgcgccctctgagaaagtgtgtggttaccgcagtggcgagtgtaacacccaggagaaacctaaaggaagctcagcaaataaaggcggtgaggcctggggggggtggtcgaacaaaaaagaaaaaaggcaagagcaaaaaacagaaagagacggg

SEQ ID NO: 696702 - DNA, 869 bp, Homo sapiens
acccgagctctttgctgaactctacggtttgctctgtgcaataatcattccactgccaggatacttgcattactgtccctatttagtataatcccactttgtgcacttctctcacaccagcaagtgtttgacagtgtgccttggaattaccaaacaatacatagatcttgaccacttctatgtaagtcgatagtctctatcgatgccactttgaaacaggaaactgccacctcggcagtcaatgcttatatccttattgaatgtacctattagtgtctattaattgtttgcatctacatgcagctctaaaactttaccatgacagtcataaacagctaaacaatgtttcgttatgtattcaacgcgggatatcagctgttactcaaagtcatgatccagggaccattctgggtcatgacgcctgtttcatacaacctgaatcacatcttaatagggtggtgctttgaggatgtctaatgtcagtacggcacctctaggagattcttatctcacccactgttgtgagaaccactaccatgctgagtcggaacctatactaggttgtttgtcctggggtacccttgaaagatgcagattcgaagacctaactaaggacttcgatgtgacctcgacatttaggaaaatatagcactgcctggctttaatacgatcccttttgccttccatggtgtcctctcttgagcaaacgcttgcacttgggtccctaacgggatagcattccgaataatccctttttgttccaggtttcggggttaggcttaaatcttatgaaacctctctgacataattcattgttatcccaggaatccattttaaggttggctgcaaaccatggaccactgaaggag

SEQ ID NO: 696703 - DNA, 1244 bp, Homo sapiens
  misc_feature (689)..(689): n is a, c, g, or t
  misc_feature (701)..(701): n is a, c, g, or t
  misc_feature (860)..(860): n is a, c, g, or t
  misc_feature (1201)..(1201): n is a, c, g, or t
  misc_feature (1240)..(1240): n is a, c, g, or t
agcggagatccagagaaagacaaatgaaatgggtgccaataaatcctcaaggctgcagagataaaagaaaagaatgaaaatccaggatgcaacaatctattctactatctaatctccctttttccactctttgttttcatttttttttaatgctgctctgagagatccaaaattagacatgaattttcttgaaggttaagtcttctttttgcatttgtttccaggacacacctgaccctcacatacaagaaacactgccttctgcagagaaaagattcaacaattccaagtccgtcatctaagatcctttactctcttttctctacaagataagaataaaattcaatcacggacctaagtaggtataatagacattaatataaatcttttaaatactaatactctttcctataaacatctattcaataaggctaaaagatgaaaataaaatcgaaaatttgctttttgtcattctggtaatgctgttcttcatcatagacaataacttggagataacttcaagccagagatggtagctttgctcatagttgctttggatggtaatcaaatgagactttcgtttatgtcacagatggaagcttgcaagtcaaaacattcaaaagaaatgaagatttctacatacccaagaactaatgagctagccagtgagtgagtcattatccatttangtcacagatggnagcttctaagtcaaaacattcagaagaaatgaagatttctacatacccaagaaccactcagctagccagtgagtgagtcatcatccctcacttggcctgctctttggctccatactggcttcttggctcctgttctttacctgctacagtttttgtccncatagtagccagaatgattctgttgaaatgaaacagactatgtcatttaagctcaaaaacctcgaacaacttttcatctcactcagaatactatgattgtgtggaacccatattatatgacctctggctaacttgattgaatttatacctcaccattctttccttctcaaagttcactccatcagccctgactttttggtggtgaaaccaagtatgcttccattcactgcctctgcacctacatagcttctgcttgtgaagctcttcctggagacatttacttggctcacactctccaatcaagtctttgttagaatgtcccttatttgcgtgttgctccnacctaatctttataaaatggcaccctttgcatcactaanaaaa

SEQ ID NO: 696704 - DNA, 150 bp, Homo sapiens
agcttcactgcacagtttctctgtcagctttgatgccttgagcttccaaagaacaattcttccagttctttcaggatatcatcttcatcaaagtcctgcttttttttctcttttttctttttcccttttgactttgggggctccagggga

SEQ ID NO: 696705 - DNA, 222 bp, Homo sapiens
tacctagaataccgtagactaaagacttgattgacaaagactgatctcataaaataatatgggaaccattgccaagtctagatactaaagcatacatggaggctctaaatgctggtgcagacatctccatgattgggcaatttggtgttggctattattcttgcctacttggtcggcagaaaaagtggttagtagatcacacagcacaaacgatgaatagaa

SEQ ID NO: 696706 - DNA, 825 bp, Homo sapiens
  misc_feature (18)..(18): n is a, c, g, or t
  misc_feature (31)..(31): n is a, c, g, or t
  misc_feature (103)..(103): n is a, c, g, or t
  misc_feature (117)..(117): n is a, c, g, or t
  misc_feature (119)..(119): n is a, c, g, or t
  misc_feature (121)..(121): n is a, c, g, or t
  misc_feature (125)..(125): n is a, c, g, or t
  misc_feature (139)..(139): n is a, c, g, or t
  misc_feature (148)..(148): n is a, c, g, or t
  misc_feature (158)..(158): n is a, c, g, or t
  misc_feature (167)..(167): n is a, c, g, or t
  misc_feature (180)..(180): n is a, c, g, or t
  misc_feature (205)..(205): n is a, c, g, or t
  misc_feature (217)..(217): n is a, c, g, or t
  misc_feature (221)..(222): n is a, c, g, or t
  misc_feature (228)..(229): n is a, c, g, or t
  misc_feature (252)..(252): n is a, c, g, or t
  misc_feature (256)..(256): n is a, c, g, or t
  misc_feature (280)..(280): n is a, c, g, or t
  misc_feature (290)..(290): n is a, c, g, or t
  misc_feature (292)..(292): n is a, c, g, or t
  misc_feature (301)..(301): n is a, c, g, or t
  misc_feature (307)..(307): n is a, c, g, or t
  misc_feature (310)..(310): n is a, c, g, or t
  misc_feature (319)..(319): n is a, c, g, or t
  misc_feature (445)..(445): n is a, c, g, or t
acaggtgtcgtgaaaacnacccctaaaaacnaaaatgggaaaagaaaaaactcatatcaacattgtcgtcattggacacgtaaattcgggcaaatccaccacnactggccatctgancnanaaanacggtggcatcaanaaaaaaacnattaaaaaanttaaaaaanaggctgctgaaangggaaaaggctccttcaaatatgcntgggtcttgganaaannaaaaannaaacgtaaacgtggtatcaccantaanatctccttgtggaaatttaaaacnaacaaatacnangtaactatnattaangcnccagaacanaaaaactttatcaaaaacatgattacaaggacatctcaggctgactgtgctgtcctgattgttgctgctggtgttggtgaatttaaaactggtatctccaaaaatgggcagacccaaaaacatgcncttctggcttacacactgggtgtgaaacaactaattgtcggtgttaacaaaatggattccactgagccaccctacagccagaagagatatgaggaaattgttaaggaagtcagcacttacattaagaaaattggctacaaccccgacacagtagcatttgtgccaatttctggttggaatggtgacaacatgctggagccaagtgctaacatgccttggttcaagggatggaaagtcacccgtaaggatggcaatgccagtggaaccacgctgcttgaggctctggactgcatcctaccaccaactcgtccaactgacaagcccttgcgcctgcctctccaggatgtctacaaaattggtggtattggtactgttcctgt

SEQ ID NO: 696707 - DNA, 138 bp, Homo sapiens
agttcggcacgggggcgagcgcgcagcaacaaactcgccgccgccgcccttcagcgactggggccgcctggacagtcacgtcaggcggctggaagaccttctggcagtcagtgagcaaggagagggtggcgcgtacga

SEQ ID NO: 696708 - DNA, 1010 bp, Homo sapiens
  misc_feature (455)..(455): n is a, c, g, or t
  misc_feature (467)..(467): n is a, c, g, or t
  misc_feature (626)..(626): n is a, c, g, or t
  misc_feature (967)..(967): n is a, c, g, or t
  misc_feature (1006)..(1006): n is a, c, g, or t
agcggagatccagagaaagacaaatgaaatgggtgccaataaatcctcaaggctgcagagataaaagaaaagaatgaaaatccaggatgcaacaatctattctactatctaatctccctttttccactctttgttttcatttttttttaatgctgctctgagagatccaaaattagacatgaattttcttgaaggttaagtcttctttttgcatttgtttccaggacacacctgaccctcacatacaagaaacactgccttctgcagagaaaagattcaacaattccaagtccgtcatctaagatcctttactctcttttctctacaagataagaataaaattcaatcacggacctaaatggaagcttgcaagtcaaaacattcaaaagaaatgaagatttctacatacccaagaactaatgagctagccagtgagtgagtcattatccatttangtcacagatggnagcttctaagtcaaaacattcagaagaaatgaagatttctacatacccaagaaccactcagctagccagtgagtgagtcatcatccctcacttggcctgctctttggctccatactggcttcttggctcctgttctttacctgctacagtttttgtccncatagtagccagaatgattctgttgaaatgaaacagactatgtcatttaagctcaaaaacctcgaacaacttttcatctcactcagaatactatgattgtgtggaacccatattatatgacctctggctaacttgattgaatttatacctcaccattctttccttctcaaagttcactccatcagccctgactttttggtggtgaaaccaagtatgcttccattcactgcctctgcacctacatagcttctgcttgtgaagctcttcctggagacatttacttggctcacactctccaatcaagtctttgttagaatgtcccttatttgcgtgttgctccnacctaatctttataaaatggcaccctttgcatcactaanaaaa

SEQ ID NO: 696709 - DNA, 450 bp, Homo sapiens
catagtatagactggggaagagggatattctgcatatgtgttctttggcagtatgcatggatatgtggcatttgctgggttgcagtgttattattgctttgccgtgcttgtgactgttgtaatggtggcattggatttcttcataactgttacaaaaagctgccttcggatcataaggtgaacttggactgccactttgttagatctcccagtgcaccgttgaatctgatgacactggttctatgttcttgggcttgaagtttaacaacctgctgtatttatctgacaaccactgctattctgattgctatggcgaggcaccatgtgaggcttaggcgagttagtagctctggcagggctcaaaggcctgacaggaaacggaccccaagtggattgagctggtggaaaagtacctccaaagtgggtcatgggcaaccttggtggacggat

SEQ ID NO: 696710 - DNA, 292 bp, Homo sapiens
tcgagccggtcctatgaatgagggtaggtgagggcacactggggcactatgatgaggctggtgagtgcacactcgggcactatgatgaggctaggtgagcgcacactgggacactatgaagaggctaggtgagcgcacactgggacactatgaagagggtaggtcagcgcacactgggacactatgatcaggctaggtgactgcacactgggacactatgatgaggccaggtgagcgcacactgggacactatgatgaggccgggtgagtgcatactgggatactatgatga

SEQ ID NO: 696711 - DNA, 387 bp, Homo sapiens
acaggggaggagggaagataacactgcatagtctagcccagaatctagagcacgctaacgaacaccactcatacactctaacacatgcttcataaacactaccaattagactcgacagccacgcatagcataatggctggataactgccgaagtaagcgccgctccatgaagtctgcttacttatttaaaaatcgtgtatcagttttaaatactgtacattgtgtgcagatataaggggactagggcattctgtagaattcatacatgtctagttagtaacgtgtgtcctgtgtactgcagatgtgtgtactctgggcttaatgtatctgtacagtagctttcacattaaaaaaattgtggacaaacttgtccgtggggtaggaggt

SEQ ID NO: 696712 - DNA, 461 bp, Homo sapiens
  misc_feature (80)..(80): n is a, c, g, or t
  misc_feature (85)..(85): n is a, c, g, or t
ccgagcatacaccgagcagatgcttaaggaaatcaaggactatgctcaaagtgacacagctaagcagctagagccaggtncacanccaggcctgatgctgtgcatgagcacttcaccaccgcactgtatgcacactctctgggttctccttctccagtttacaatcagtcagaattagtcacaactcaaaaacatcgtcattccctaaatttattctattcttaaaaaccagtgagggggtgaaaagatgagacaatagttgggttagctaaaaaaaattccattaggcaagtatttactcctgttttgaaaagtctgttttggccacacattgtgctaaacctgaggggtccaggcagggcagcaactcagattttagtgatggacatgttagcagtcactttcgctgaagtcccacatctgttttatgagcatgttctagaaaattaagtacattgtta

SEQ ID NO: 696713 - DNA, 316 bp, Homo sapiens
ctggctcgggtaaccgcagtcgtattctctatcttcatgagatccactttttatgctcccagcgagataagaacatgtgatatttgtctttctgtgcctggcttatctcacataacataatggcccccagttccatccatgtggctgcaaatgacaggggttttattttgttaagggcctaataatgttacactgtgtatatataccacattttctttatccattcatctgttgtggacacttaggttgattccatattttggctatggctattgtgaatagtgctgagataaacatgagagtgtagatatctatt

SEQ ID NO: 696714 - DNA, 244 bp, Homo sapiens
acctcgctatcatcggcaccagtgctatgatttctctctcttagcatgtgccgatgaataggaggtgccgatgaatagggcacctcgctattcatcggcacctcgctattcatcggcacctcgctattcatcggcacccttggcaaggttagggaggctagtcaagtgaagcagtgggagtggagaaggaacaaagaaatctgtaactggttgtgatcaattagttgtaggtgccgatgaatag

SEQ ID NO: 696715 - DNA, 254 bp, Homo sapiens
  misc_feature (21)..(21): n is a, c, g, or t
aattcctgccagcgtagagcnagttgttacggcaagcaccatctcggtatgtgctcttactagattatacagtgctggagagggatggcatctctagtgttttggtattccacctcacccccagcacatagcccagtctctggcacaaattaagtacttaaggtgtgtggagctaaatagaataaaggattattagcattagcatatgtggtgcctgggtggtatacgcgggaatggaatgggggtaccgagct

SEQ ID NO: 696716 - DNA, 873 bp, Homo sapiens
acagtttaaaaaaaaaaaaaaaaaaaaagccttcccctacccaacctccgcccatggttctcttccaaggggcaattaagtaggatctacttggtacatctcaagtaaaagttaattccctgatacagggaccagtttcttagtggtaacgacatacacatcctggctggtccacgctggttcctccaaaatctacttgggcttcagctccgggtcctggtaccagatgggaaaatggttttcgggtagatctgggctggctggcttaaacgccagttttccctaagaactccaaaggctaaacgtctacctagggcgcagacgtgtgaaggatacggatttctaatcagagaaaagtgggcctccaggagctttcatttatgtcttctccagaccaggtttctccggtatatcttccttataatccccttttcaaccaacacagggtgaagttcttccagcccacagaggtagtaatatcatcttttctatctcctcctctccttgggccatgtaattgaacgcaaaatattatttatttagcccaggcttgagagccactggttgtgtgggacagtcttcatctagaattccataccctgcctaggccgagcgaaaggctccaccaggctaatttgccaggatgggcagcccctataacccccaagtctgcagggtaggggaaataccctaaattaaggaggaggccaatggctttgggacatcctggcatgttcgcactaagggcgggcgcaacctttaaagccatccggggcaggaaccgcgcatggcttacgcacggccaagagaccttcatggcaaagcccaaacgcccgactggggcgacccccaaatcacccaaaacattgagaa

SEQ ID NO: 696717 - DNA, 418 bp, Homo sapiens
tgcagatatctctatgctgggccagttcggtgtgggattaatctagcaatttgtgtagctgagaaagtaactagtgatcaccaaacataacgatgatgagcagtacgcttgggagtcctcagcagggggatcattcatagtgaggacgcaacaggtgaacctcatgggtcgtggccccaacagttatcctacacctgaaagaagacaaactgcagtcaccttggcaggacacgacgaatcaaaggagattgtgaagaaaccattctcaggtttattggatcatcccattactcttttggtggagcaggccacgtgcatcaccagcaagtaagcgcatgcatcgcaggctgacgcacacggccgcccccagcacagcaagcaaaacgcaacacagcacgcagaaagatcggacagcacc

SEQ ID NO: 696718 - DNA, 549 bp, Homo sapiens
gcacgagcccaactcctcggcaacttgcttgatatgcttaggactctgagctcttgatatatcaatatctgaaggcactggactttctaagtgtaatggaagaggtttgataactggaagcttttcagattccacgaattgccttttagcagctaatagtacattggaaacaagcatagcgacagtcattggacccactccaccaggaacaggggtaatataagatgtcttttcctttacagaatcaaaatcaacatcaccaactaatttttgcccacttttcttactgatatcaggtacgtagttgatacctacatcaataaccacggcgccttctttaatccagtctgatttaacgtattgaggaataccgcaagctgcgataactatatcagcttgggagaccacttctgcaatgttccttgtatgactatgacagacagtaacagtggcattcgcatttttcaacaacgaagcaattggatttccgacgatacttgatctgcctaacacgacggcgttcttaccatctaacttaacatgagcttc

SEQ ID NO: 696719 - DNA, 689 bp, Homo sapiens
  misc_feature (508)..(508): n is a, c, g, or t
  misc_feature (527)..(527): n is a, c, g, or t
cggcacgagatttattcgtcttaacaatcttttcatcatccctcaacagaattacctatattcctcatctccccttccccctctgaaaaaagatatataagtatctgagtcccattgagatatttggagtgatcacgctgtggttttcctccatgtacattaaaaaatttttattctttctctcctaaaattaaaaaaatgtattcctctctcctgtcttcggtgaaccgatttttcagtgaaccatcagagaacaaaggagaagctttccattggtccctacgatactgaaaagtattttgcatatttttaaatatgtgcatacgtatatacacatatataggtttttgataagtatgtacaaatatacatgtactttttttagccttccatattttgatttttaaataattattggataagttttaggtgtttttacatttccaaatataaacttaaacatactaaaggtgctgataaccaaggtataatttcaactgggcctggngagtaataactggtggctntcatataaccctctattctcaacactttcacaaacttcatactgaggcaatctctgggaacaggtactacgcccaacttcaagctggatctggccctaacaactttcccaagggagcatttaggaattccacagaagttgcagagggcacatttgcatgctt

SEQ ID NO: 696720 - DNA, 136 bp, Homo sapiens
atggcgaatcgcacctctgtgttgatagcttcacgttgcgctgcaggtagcggtcgatcataataaccttgcttgcagccagggttggggcagggccgctcccggacctcctcgattgtgctccttgagtgtgctt

SEQ ID NO: 696721 - DNA, 355 bp, Homo sapiens
aatgttaatcaaaacaatctgctgagcattaaaaaccatctaaatatcaattctttgcaaccagcacagaggtaattttctgtcaaatccatacacaccaccaaggttaagtttttctgatgtaaaccaagagtcaatgtagggtgaaaaatttcctcagcgcaagagagctgagtagtgttttggatctttctctggctggtacaagcagtattagaaaatctttttggcaagggagaaaaataaatacaaatggaatgctacatttttaaattagcaaactgtctcaggaatgataaaactatcagtaaagtagcaaggggataactttaaaacattatttgtcctggtctca

SEQ ID NO: 696722 - DNA, 105 bp, Homo sapiens
tttgcaggcagcatgtgttgatgagtccttctccctttttttaacatttatttttttggagtctcgctctgtcgcccaggctggagtgcagtggtgtgatctcag

SEQ ID NO: 696723 - DNA, 436 bp, Homo sapiens
agatcgcgccactgcgctccaactgggcaaaagagaaagactctgtctgaagaaaaaaaaaagaaaggcataaacctcagtttcaagtgctaagaaatcatatccccatttaaacaaatgtcctttcaggtgccagattttacacatgaacttacttgtgtatttcataagcccagggtcagcttcagaaggggatatttacaaaggtctaaaacatgcgtgctcgagccagccttttacaaatgcaaatgaacatctggaattttgggctaatttataagagcaaatgaagatgttgaaaacgtgaggggtccagataggagggggaccttcttcagttctcaaattcaaggttgcaatgttacttggattagagggctagtcagagactcctgtagtagtttgtaccttttaaaaaccatcaaggagggcgggg

SEQ ID NO: 696724 - DNA, 622 bp, Homo sapiens
aaaccttgggaagcacctttagaaaacccgctgtcccaatgacatcctggaccccaacaagctttctactccggtccctacctacagtaaggattcaacacttcaccaattaggccccctaaatcaacacatctgattaggtgtcaattcactgccatccccgtacaaagtggtttttttcactcttcccatcattatccatagctctcgtgtccctagaacgcctcgtccctcccccatcaacacaccgctatgaaattgtcttccttatatagagaacaacttcttgtttcggcccccccaataaatagtactatttacctaacagtgagagttttataaggtcacactcgggagatttctcctccgttatcgttgtccttcaccaaggagatctgtgccaggtaacccttaaaatcttggtttacaggaaatgaatgcgacttattgatgaatcccactctccacgatgtgctgaagtcagctctcccccttctgtctcgccccggttagactccccggtctcttattcagaacccacggtggtccactttttgtgaaaaaaacttcaacccctgttttctccgggaaacaaccagaacccgaaccccccaacataaca

SEQ ID NO: 696725 - DNA, 284 bp, Homo sapiens
  misc_feature (245)..(245): n is a, c, g, or t
gtctgagcaagcgtggaaagggcaggatgccagaggcctcagcttcgggaaggttagagccacaagctgagcagggtgagggcgcccggggccgttccaccggtgtcactcacctgagctctggggaaccgggcctcgtgccctcctcgcccgcaggggctgatggtgggtgcctccttagtgtgccagctggagacaagcttaaggtgatctccaaagccacgatggagttggcatataggtgntccagaatttcggtttcaggtccaaaaatatgtcatcct

SEQ ID NO: 696726 - DNA, 331 bp, Homo sapiens
tctacgagctatcccggctctgggtatgacataatctttacaacaacccctgtgacacaagtttactacataacaaacctgcacatatacccccaaacttaaaataaacgttttttaaaaaagaaaatcctgcttcaaactaacagaatttaagaatgttggctgggcacagtggctcacgcctgtaatcccagcactttgggaggccgagatgggcagatcacttaaggtcaggagttcgagaccagcctgcccaacatggtgaaacactgtctctactaaagatacaaaaaattagccgagggtggtggcgtacgcctgtaatcccagc

SEQ ID NO: 696727 - DNA, 168 bp, Homo sapiens
gagctgggccgaattctaattacgcaatgttgtgctatacaccacagaggtattgcctgtgttctcctccaggagtttgctgatgtcatgttttatgtttaaatctgtaagccattttgagtttatttttgtgtatagtgtgcaggtgtgttctagtttaatttattt

SEQ ID NO: 696728 - DNA, 676 bp, Homo sapiens
gagacattcttctatctagtaggagtcatgcccctgtagtgcccaacctagccaggtagtcaccactgtgcccaggcaccaaataaaccctggttgggaagaaaaaaaaaaaaaaaaaaaaaaaaaaaaaaaaaaaaaaaaaaaaaaaaaaaaaataaaaaaaaaaacaaaaaacaaaaaaataaataaaaaataaaaaaaaaaaaaaaaaattaaaataaaaaaaatcaaggggtgaacatttaaaaacttttaaaagggaaaacccttgtattacccaaataaaaagccttgaaacaaaattcccttttgcaattggggaaaaaaccaaaaagtccttaacgatggtctattcaaaaaattttcaaatcttaaaggcaaatggaaaatttaaagctttaaatatttgttaaacatcccgttaaaattttgttaatacagttattttataaccataggccgtaaatgtgaaaaatctttaaaatcaataaaattaacccgaaaaaggttaatattttttcccaattggaaaaaagattccttattataaaaaatgggattttaagtgttaaagggtgcaaaaaccttttaataaggaaaaggccctaaatgtaaacccatacctataaaggtttttgggggtaaagtgccctacaattctacccttggggcctcc

SEQ ID NO: 696729 - DNA, 496 bp, Homo sapiens
gatgacgtgattgaatatctgatgaataatccatagtattaagcgcatatatttactataacacgtgtataagcaccagcagcaagaagctcaggatactcagtcattgtgccttcttcaaaatgacgtgcgcgtattcctccaaatatcgaagacagcagagagtgccagctgatgagtgaccgcccattcacaatggcttcacagggactaaaatacctaggaatctaacttacaagggatgtgcaggacctcttcaaggagaactacaaaccactgctcagtgaaataaaagaggataccaacaaatggaagaacattccatgctcatgggtaggaagaatcaatattgtgaaaatggccatactgcccaaggtaatttatagattcaatgccatccccatcaagctaccaatgactttcttcacagaactggaaaaaactactttaaagttcatatggaaccaaaatgagcccgcatttgcccgggcgaatt

SEQ ID NO: 696730 - DNA, 512 bp, Homo sapiens
  misc_feature (9)..(9): n is a, c, g, or t
  misc_feature (470)..(470): n is a, c, g, or t
  misc_feature (502)..(502): n is a, c, g, or t
cgttaagcnacctgcttcactcttcccagactcactggctcccttcttcttccccaaacaagctctttccatcttggggcctttgcactcttcaaccacatatctctccccaggttttcaggtggctgccttctctattcagatggcagcttctcagggacccttctctaacatcattaaagcatcaattccagttactctttagaatatcatttcatttcttaaaaataacttgtgcgtttgttcctgtgcatcccacggtaagtaaaagagtagacttgggagtaagtctaactgtgtgacattggatcccttaaacttgctaagcctcagttttcacatctataaaatgggggaaataacagcatgcatctcatagagtcatatgagaattaaatgagtcgatatacagaaagtacttagagtcttgcacccagtaagaagacccatgagtgttggctgttcgtcantgtctgcctttccttcttaggatgcgaggtantcttcatagg

SEQ ID NO: 696731 - DNA, 172 bp, Homo sapiens
agcaagactgaagtgtgtctagaggaactagaatacaagaaccaactccgaagcatgaagaaaagatatactaaaccagagcagaaatgaatgaaactgaaacccaaaaaaatccataccaaggatcaataaaaaaaggttggttatttgaaaggataaacaagatctataa

SEQ ID NO: 696732 - DNA, 646 bp, Homo sapiens
  misc_feature (44)..(44): n is a, c, g, or t
  misc_feature (75)..(75): n is a, c, g, or t
  misc_feature (86)..(86): n is a, c, g, or t
  misc_feature (95)..(95): n is a, c, g, or t
  misc_feature (130)..(130): n is a, c, g, or t
  misc_feature (144)..(144): n is a, c, g, or t
  misc_feature (224)..(224): n is a, c, g, or t
  misc_feature (228)..(228): n is a, c, g, or t
  misc_feature (231)..(231): n is a, c, g, or t
  misc_feature (250)..(250): n is a, c, g, or t
  misc_feature (293)..(293): n is a, c, g, or t
  misc_feature (308)..(308): n is a, c, g, or t
  misc_feature (316)..(316): n is a, c, g, or t
  misc_feature (319)..(319): n is a, c, g, or t
  misc_feature (322)..(322): n is a, c, g, or t
  misc_feature (325)..(325): n is a, c, g, or t
  misc_feature (329)..(329): n is a, c, g, or t
  misc_feature (349)..(349): n is a, c, g, or t
  misc_feature (354)..(355): n is a, c, g, or t
  misc_feature (358)..(358): n is a, c, g, or t
  misc_feature (363)..(363): n is a, c, g, or t
  misc_feature (368)..(368): n is a, c, g, or t
  misc_feature (370)..(370): n is a, c, g, or t
  misc_feature (377)..(377): n is a, c, g, or t
  misc_feature (382)..(382): n is a, c, g, or t
  misc_feature (385)..(385): n is a, c, g, or t
  misc_feature (391)..(393): n is a, c, g, or t
  misc_feature (395)..(395): n is a, c, g, or t
  misc_feature (399)..(399): n is a, c, g, or t
  misc_feature (408)..(409): n is a, c, g, or t
  misc_feature (411)..(414): n is a, c, g, or t
  misc_feature (418)..(421): n is a, c, g, or t
  misc_feature (423)..(424): n is a, c, g, or t
  misc_feature (428)..(428): n is a, c, g, or t
  misc_feature (431)..(431): n is a, c, g, or t
  misc_feature (435)..(437): n is a, c, g, or t
  misc_feature (440)..(440): n is a, c, g, or t
  misc_feature (442)..(442): n is a, c, g, or t
  misc_feature (444)..(447): n is a, c, g, or t
  misc_feature (455)..(456): n is a, c, g, or t
  misc_feature (458)..(458): n is a, c, g, or t
  misc_feature (462)..(462): n is a, c, g, or t
  misc_feature (466)..(466): n is a, c, g, or t
  misc_feature (473)..(473): n is a, c, g, or t
  misc_feature (477)..(477): n is a, c, g, or t
  misc_feature (480)..(480): n is a, c, g, or t
  misc_feature (483)..(483): n is a, c, g, or t
  misc_feature (494)..(494): n is a, c, g, or t
  misc_feature (542)..(542): n is a, c, g, or t
  misc_feature (584)..(585): n is a, c, g, or t
  misc_feature (643)..(643): n is a, c, g, or t
ttttttcttttccttagggtcaggggaagggaaaaaaatgtgtntttatggtgaacatgtgtcaagaggactccntcccataaacncggtgcccncaataagtatatttgtgtagtaattaatgtgagancagagacacaagtnttgccaaaaggccattgtcagtatggggtacattatttaggtcaagaatccagttttccaaatgtggtatacattgtgcncgcngtnattaagcgttttgtcatcnaacgacaaagcgagccagagttactcccagacggattataccnaaaacacagtttccnaatgtttnttnttntgnaatnttttaaggaaattctatgcngaagnnatnttaanacatntnttattanatctnttngacaannntnttantaatattanntnnnnaggnnnntnntttngtntctnnnagngncnnnntgtcattnnangtgncggntgtgacncgcnttntcnatcacgtgttnctgggtcatccttctttgtcattcactttcttgccgaggtctccagtnacacccttgccatgccaattctcctccaagacgtttaccgcnngccgtctgttatcccagcgcaccggggaggctgaggcaggagactcgcttgctcccgngag

SEQ ID NO: 696733 - DNA, 265 bp, Homo sapiens
  misc_feature (56)..(56): n is a, c, g, or t
  misc_feature (67)..(68): n is a, c, g, or t
  misc_feature (158)..(158): n is a, c, g, or t
agaatgaaacctgccgctactcattagatcgtgtcatatgccataagcatcgcatntgtaacacacnncgcgcgcacgctccaaagcaacttacttatattgctatacgtctcatcatgcatctgtgctgctagatagatattatggcgcgatacatngagtagtatcaaggactagcattatgagagcgacatttcctcgttttaccagaaccttgctagctagtctcagaatcgtagcatcatcaactgtcaagagattgctg

SEQ ID NO: 696734 - DNA, 144 bp, Homo sapiens
aaccgggacgcctttgcttctccagctccagaagtgtgcggatctctccaggtctgggggctgtccagcctgcatcagctgccatatgctgtggttctcatccagggtcatctctagcaggtccctctccatcatgagctcctc

SEQ ID NO: 696735 - DNA, 1195 bp, Homo sapiens
taatgacctccgtggtctgctccgctcctgcgagttatatctattgcccgcggggaggagtatcattttttacccgcgacaccgttgtggccgccctgcgcctttttggggccccacatggaggacacagtgtgtggcaccaaaaacagcgtgcgtggtgcccgtccccggatttccccgggatattatgctcggacccccacacggcgtcgcggtaccagacccgagggaggtacgcactgtggtcacggagttggccttaatactcgccttataaaggaggaatattaattattcctcccccccgcgtaattgcaaccaccctgactgccccacaaattattggtttgaaggttggccctcccccaaattatgcctccccaccatattgtaacgtgcactttctcctggccccccccaggctttcttcccaattaggttttggccatggagcaaagattctattgaaagccccacacatgggaggtgactggtgagtggaaacacacatagtggaaaacgcattggattggtccacaccccaggtgccgttccacccggcgtatattgggatacccgcgccccttgcccagagacttacccactggccaataaagatttttggtgccccctgaagggaagcctttggatggaaggccttgtctgtagtcccctccaccaagtacccacaccgagtttcccctgggttaatggattcttgagaaccccaaggagattttaaatcgccacgaagtaccactcggaagccaccacatcactgggccacagaaattttgccacagaattaacacatgcgcctaacttaaatggaagaaagatgaaagaatggcttacccagaaaccacgttcttctccaataccacttaagaaccacgcgtaaactccagaccactggaaggagaatgtatatatagaaagtcttcacatttctgtctaatatcgcaagagaaatccacgttctattgaaaaagagagccccacgaaaagaaagttttaaaagaagaggtggacaccgtccccaaatgtcccttgctccagaagaaggatcgggtagctccaaaagaaggccagcttcctccagagctccaggagcgggctgcttgagagctaaaccccacgccattttttatgattttttcagaaatagataataaacctctggaccagccactta

SEQ ID NO: 696736 - DNA, 909 bp, Homo sapiens
  misc_feature (13)..(13): n is a, c, g, or t
  misc_feature (77)..(78): n is a, c, g, or t
  misc_feature (101)..(101): n is a, c, g, or t
  misc_feature (168)..(169): n is a, c, g, or t
  misc_feature (171)..(171): n is a, c, g, or t
  misc_feature (182)..(182): n is a, c, g, or t
  misc_feature (202)..(202): n is a, c, g, or t
  misc_feature (206)..(210): n is a, c, g, or t
  misc_feature (213)..(214): n is a, c, g, or t
  misc_feature (218)..(218): n is a, c, g, or t
  misc_feature (222)..(222): n is a, c, g, or t
  misc_feature (225)..(225): n is a, c, g, or t
  misc_feature (229)..(229): n is a, c, g, or t
  misc_feature (242)..(242): n is a, c, g, or t
  misc_feature (245)..(245): n is a, c, g, or t
  misc_feature (252)..(252): n is a, c, g, or t
  misc_feature (368)..(368): n is a, c, g, or t
  misc_feature (406)..(406): n is a, c, g, or t
  misc_feature (412)..(412): n is a, c, g, or t
  misc_feature (500)..(500): n is a, c, g, or t
  misc_feature (511)..(511): n is a, c, g, or t
  misc_feature (534)..(534): n is a, c, g, or t
  misc_feature (537)..(537): n is a, c, g, or t
  misc_feature (594)..(594): n is a, c, g, or t
  misc_feature (625)..(627): n is a, c, g, or t
  misc_feature (644)..(644): n is a, c, g, or t
  misc_feature (695)..(695): n is a, c, g, or t
  misc_feature (736)..(736): n is a, c, g, or t
  misc_feature (774)..(774): n is a, c, g, or t
  misc_feature (802)..(802): n is a, c, g, or t
  misc_feature (847)..(847): n is a, c, g, or t
  misc_feature (854)..(854): n is a, c, g, or t
aaaggaactgttnaaaaaaagaaaacaatttaaaaaagaaaaaaataaaaaaaaaaaaaagaaaaaaaaaaaaaaannaaaaaaaaataaaaaaaaaaaanaggaggaaaaaagaaaaaaagaagggaagaaattaagcaacaaatacattccttctagacagcggtnngngatctcttgtnggtttctctccatcacttcngggnnnnnggnnagcngacnggntaangggaaagggggangcngggggantctaagaggcctctacccccaaagcaaaaactattctccaagttctccccttcctctcgcctccaaagagccaatttggaagttgttgtcacatccacctcccctactttccattntgttttgcttttgccatcagatttttataatgtttgtntctcanaaaaatactctagtgacatgttaaccttaggtagccagaagccaaacacttgggtgccatcttggggtagtccagattgtcaattgtnacatgcaaganagaggtcaagggcatggaagggnagngtctccagggggccacagtttgccctagacagggcgtattccaaaaagtcatttgtntctttaattgttcaagaaccatgttgccacnnnggggcaggtctggaaanaagggagggtaaaagacaggagtctcccagtattacctaccctggacagancagagcactggcccgaaaactgagagcctgagcatggagcntccttgattgggaggcagaagagatgcccaaaggaggnagcgagaacttggaattgtatctcccanggccctggattcttaggaaaatcatggcttcccaactggatgggnagcaggncttggggtgaagtaaatggtagactacccagggccgagtgacacagaacaagaac

SEQ ID NO: 696737 - DNA, 1052 bp, Homo sapiens
gggaccggggggggtccagtcccgggcgggccgtcgcgggagagaaataacatctgctttgtgccgagctcaagaggagaccccagacccctcccgcagcagagggctggagcctgctcagaggtgcttgtgaagatgctgtgagcgcccgcctctggttgtcgggcacctgtggttggctcggcgctctgttgctgcttggtggtgctgcctgctggctttctgagcggccttgggggctggggcgccttggtccccttaattccgggttgggaaccgagtttccattcctttggcggcccaattcccacaaaacttggcttcctttgggtggaccacccaagggagggcaaggccgcattccttgtgaaacagagtttgttggacaaccgaatgtggggagcggcccgggggaaacggcacatagaagtgtgtgcgttggggatggcgcaatttgagaccacgtataactggggtagagccagcaacgggcagtgttgggccccataggacgttggtgggggcccgacaagcagacggggcaaaagctctgaggacccgctgctggttcaggaggaggcaccacgccttccggggtgcttagcaggacacgcgggagcgcccatacttggtggcaaacatcaagatggtgcgctgtgcccaccggcttggctgtacacacccagggtgcgccaggcactgatccaccattgggagattcaacccgggatgttggtggccgccatacccacaggggaggcgtgggaatccggcagcgttagagggacaaggtcccctaggtggtgagaacagtcccatagaaaattatcccccaggtggaggaacgaaggtttgctgttggcgcatcggaggtgtctctcctcacccatggtaggcccggcaccgccgaccgctctccgtgagacattggccctgctgacacggaaacagcaaggcacgacagtagtgcaagggcagccaattacaaacggtccggaccttgtgtgtgcacacaacacctgacgaacagggaggcgcgctacaacacatcg

SEQ ID NO: 696738 - DNA, 321 bp, Homo sapiens
  misc_feature (299)..(299): n is a, c, g, or t
tggaaagggaatttggcttttggaaataggatctggctccgatacccaggcgggagggcaggggcacaatcagggctcacggcaacctcgaactccgaagctcaagcaatcctcccacctcagcctcccaagtagcggggactacgggcttgtgccaccacgtccagttaatttttaaaatttttttctagagacagagcttggcggtggttcccgggttgggtctcaaaccctgggcctcaagtgatcctcccacttgggccttccaaagtgcggggattacgggtgtgagccatggnacccagttgaggaccatcgtgg

SEQ ID NO: 696739 - DNA, 329 bp, Homo sapiens
attacttatcattcatgtgttcactggagtcacacttttaatttccttcaagaacttttcctttgttttcactgcttggctaactgtcaggtataagagacctagctttcagtctgtctctgcttctgtcctatcttagctttcaacatgccttcctcaataagctcaatcatttctatcttttgatttaaaatgaggggcatgtgactcttcctatcagttgaatagttagagcccactgtagggtctattaattgggcctaatttcaatattcttctgtttcagggaactaggggagggcctgagtaggaaataggagagatggagg

SEQ ID NO: 696740 - DNA, 160 bp, Homo sapiens
ccgttgtagctggtgaaagtggttaggtttacgactgtccggtgaattgcatcttgctttttaagcctaatgtgcggacagctcactgcagtgcctagacgtcttgtgatgtacttattatacgaatgggggcttcaatcgtggagtactactcgcattg

SEQ ID NO: 696741 - DNA, 1170 bp, Homo sapiens
  misc_feature (340)..(340): n is a, c, g, or t
  misc_feature (366)..(366): n is a, c, g, or t
agcgggggagcgcgccagcaagatccactcctgagagcccgtaggacccctgcagcacgcgcctgacatgtcccctgactggtcctctcggcgccgcggcgatcgccgcatgcgccaggacgtactggcccgccgacccgtgtggctcgccgagcaccgacgcgcctcagggcacgctaccccgacgctagcttcacgctggtgtacgaggtggcccagcggctcagcgatgcgtaggagctggtggctagtgatcgtaccgtccgggtgtgcgaacgatcaagcagagttcacccgccggaccatccgagggggctccccggtgtcttccagcccggtnagcgcctgggcagtggatgccgcggngtcccctttgtggtgcttccaccatctagcgacgggccttgatgcacatgagaggttatgagttgacactgcctcttcctggaatttgagacgataactgttccttcagacgaggctaggtccctatgccttgtgaaggcaccactcaacatgaactgccaaagaatgcttgaacgagaattgacgttcccaggagtaggccttgtcggtggctccactagctgggaaagtcggaattggcgagtcctcatggatagggtccctaactccattgttcctttgctttccctgtccttgtagccttgcctgcagcaatgcttgcctgactcgggatcgagttgcgagccctgggacttctatccccttttcgtggtcctttaaggggaccgttccttgtttttgcccctttcctgcccgtccttgttgccgaggtagctgtgcctgccagattgcccatggtttccacggggcccaagaggctttggtctgtggggcgttagccatgtccatggacctattgtggggtggcacccccttgctcaagtggtccttactacggcgaacccttcaggagaagattgggatagccctattcgttgcattaccacttccatgtgatagcagatggaattcaggggcagaacccctttgacacaggcggcggggcgccccccaccgctcccacagtttagaggttgggagaacccatctaattgacataccttttcgcaagggcgaggcccacttgggcctcaaatgccccccaaaacgttggcgtttccccggcgaatatggaactcccag

SEQ ID NO: 696742 - DNA, 485 bp, Homo sapiens
  misc_feature (172)..(172): n is a, c, g, or t
tataaaattattagtataaaaggggaaataggtaggattaccgtggtaagggcaataagtgtggggagaaaatggggtgggtttggtatgtccaaacgtggtaccttaatctttacccgtggtatacacatcttgggagcgatcgtgatagcttaagcggtgagcgatcacntatcggcgatcggatcaaccgatcacggtataccgagcgggatacctggtggcatcatactggtgggagctactaccggcatctggctcccggtaacctcttcgaataagtggcccattgtgggccacacaacagcccgggtatacagcggggggacaaggcccctccctaagggagccacggcacgggctgcacacttggcactcacaaggggtgctaaagctacagtcgtcacccctgtgtcacccaggggtgcaaaccactacgctcacacaacgggtccgtggagtgcacggaagatactacacgttga

SEQ ID NO: 696743 - DNA, 84 bp, Homo sapiens
  misc_feature (14)..(14): n is a, c, g, or t
ggaacccaggggcnttatttaaaatgcagatttccagtgctggaaataggattgcctaaaaaaaatttaaaattgcaggttaaa

SEQ ID NO: 696744 - DNA, 146 bp, Homo sapiens
tgtggtgttacgtccggtggtagcatggctgcatatccccttctcttagggcctgtgcctatttcaaactctcttctcaacagaacaaagggtgggggaaaacaatgtaacttcgtaactgtatacatagtaaggataacctgacc

SEQ ID NO: 696745 - DNA, 902 bp, Homo sapiens
tcgtgggcggggaatccttccgcacattctctaggaggggctgcatagcagcggggagagtgaactgacagactcagtcactgacagagggaaaaggagtgagaacgacaaagccgtcaaagccccaacagcttggtatttctccagcccggcgcataccccggagctccgaggcactccctccatctttggaacacgccagtaattgattgataacagcgaagctatgagggaccctgtgagtagccagtacagttcctattctatttctggaggatgcccatcccagcaactggatctgtcggacctggaaggctgggtctgtcagattacagccaactacaaggtcaaagacagcagcatgtcgggcaacaatgatccgggcaatgcaacttgcagcaagaccagtgagaacaaaccctgacaggtgaatggcctccttgagtacaagcaccttcaacttctggagagctcccattgccagcatccacttccttcgaactggactcgctctaagagcaagaattctatctacgcataacctttgccctcactggtgttccttcacaaggcactttcttcacatacatttccatttaaatctggctcttcccaacgggttgtgtgctgctgcactgcagagctgaggtcacggcaaaataacaatctggcatccagttttcaagccctagtcaagcatatgcacccaggactgggcaggaccctttcccaaatatctgaacagtgtggactgcgcttcgtcagggagagactcatagcgacaccatcgccgcaacatttgggctgtttttagtttattatgatgtacatataccagcacgtaaccgatcgagccctaacatcagcgtcgaccccgcgcttcacacgtatgatatcgagag

SEQ ID NO: 696746 - DNA, 822 bp, Homo sapiens
ggtcgttcttctacaagcgggagaaggctgtcggggacaaggtgtattggacctgccgggaccacgcgctgcacggctgccgtgagccgggccatcacccaggacagcgggtgactgtgatgctgtgggcactgccaccagccctgatatggagggcctggaagccctggctggcagcatgtgagaagtgcctgtggagacgctgcatggctgggcatggacggccctgtggagccaagtggacacgcttgctccgaggctgtggatagttttgctctacctgcatgggggtcctgggtcccctgactctcaccaggcctcggcccagaaatgcgagcaaaggtcgaagaccaggaagctgccaacccaggccctgaggccccagacgagcaccaggacatggacgcagacccgggaggcctgagttcctgaagacgcccctggggggcagcttcctggtgtacgagtccttcctctacctgtccggcgacaagtgcggctggcgtgacgaaggtgtacttggacctgccgggcaccagtgccccgcattcgtgcctgccgccatcgccgtgcccagtctacccagggtccgatcgggttgactgtcatgcgtggtcactgtcagcctgccggactggggaggcctgcgggccctgaggccgtcgggagacacttccccaaatagcggcgcatccgggggaggcccaggaggccccgagctcttgaagatgccccctgtcgtgcctccatcctgctgtccgagtccttcctctacgcctggagacggggccggggacaaggtgcatggccctgcgggaccat

SEQ ID NO: 696747 - DNA, 949 bp, Homo sapiens
ctattgcatacacttattatcatctattgataaagctaattcattgtacttgttaatgcatgaatgttccatgcaggtaggagaataaagcagtagagttcggcttgttcaaatcttaaatcttaggctatattagctaaaacatgttaggatatgccgttcaccacttgtaaggacagttattgatagccattatgcttacctatggtatagcataatggtatctaaaggtacaacaaaccgcagattattatctatctagctagcaactgcacatcatgttacaagaaacactgtaaattaagctcctgacagaaccattctgtcctgcatcttagagtccaggtcatttaacatactgcgtgtagtgtaatattgcgtcgtcttagatgcaagcattacttaaagtattcccgtatatgcttccttggtcgtatcacagaggagacgtctccatgtcaatgggtccttcccacatagaaatgtatactggtacagcgctgcataaccatggatagcaatgtgaaaaggtatgcctacagagagcagaaaccggctgagcttacccccacccatcggatcctctgcttatactccacatgcaattggattaactggttagcacagattctgaggttatagaactgttgtttctatcaaaactcctggtagatgaccctggaaataatggagcaaagtaaaatgtttgagaagtcatgatacttcatcttgttttacaactatggggtccctcaggttacagcactgattggaagcagcttatgcaaagctataggaactgacttacaggggcgcaatgaaaaaagaaccagagctgggagatcaggcacgtcagagaaggaccagggaaagtaagccaaaaacaggaaggaacgaagcacaagaaaacaaaagagaaaagaaaggacaaggacgcacaaagacgagg

SEQ ID NO: 696748 - DNA, 197 bp, Homo sapiens
caagattttacttcaagaatagtcagttaaatagtacaaatttggattcatgatgaatgttaaaaagaattcaactaaaaaacccactttttcctgtgacccataatcccgcattttacagtgcatgggataaggggattagggggcattcaaaacaagtctcttccaaaaagaaatgatgtttatttcacatctcc

SEQ ID NO: 696749 - DNA, 296 bp, Homo sapiens
  misc_feature (30)..(30): n is a, c, g, or t
  misc_feature (32)..(32): n is a, c, g, or t
  misc_feature (206)..(206): n is a, c, g, or t
  misc_feature (266)..(266): n is a, c, g, or t
  misc_feature (274)..(274): n is a, c, g, or t
aggcccaaaacaaaaaatccttcccagggnanctttttggccttaaaagtttcccccattaaccattcccaaccaaaaaattttccttaaaaaccagggaagtcctttaatggtccccctgggaaagccaaaactaatggtttgggtaactaatgggttccctaaaatcctccatctctaccaaaaacttttccaggggttgtatncttttttccttttttcctccggtaaagaaggttgttttctttcaattaccttggaatttnaataagtnacagtcttatgattgctggcac

SEQ ID NO: 696750 - DNA, 360 bp, Homo sapiens
gtttgagattattataattatctgtacacacttgataaaagtaaatgcattacacagtttttgagtaattatacaaaagtaaacattttttgaaacatgagatctcagtaggatgtcaccccccacccccatctggatggataatactgtcagaataagacaagttcagtaccacttctactttttgtttttatgtacatgaattctgagaaactgtgttctcttaaatagtagttggagatggggttatttttaaaattttaaatttctattatagatgggatcttactatgttgcccagtcttatcttgagtcaaggagttcaaaaccagcccaggcagcatagtaagaccccatctc

SEQ ID NO: 696751 - DNA, 108 bp, Homo sapiens
gtgctctagaggtccctgagacgacttacctttaatagcggctgagcatcgggatgtctgatccacatcgaggtcgtaaaccctattgttgatatggactctagaata

SEQ ID NO: 696752 - DNA, 690 bp, Homo sapiens
  misc_feature (470)..(470): n is a, c, g, or t
caagggaaaagctttttggaaattccaaaaggaaaaatgtcaaaatttggtatgggggagccctttcaatttcaaaattttttaagcaataaagttgggtttgaggctcaaaaaccccaattagtttgggtgaaacattttttaaacagtcaaaaaggatttggtaaaaggattaagttgggaatgaacttatttcccaagagtccaccaaggacacgggatttaatcctcctattgcctgtgggaactaagggttttattaaaccaaaaagactttaaggtctgtccggggtttacgccaaaatgagccccatgtggtctagtccaagcactggcaagggttattgcttaaggcgttgaaaaaattgggtcgtggggcggtgcccctctgttaagcaagcccctgggtatacgctctcgtagaagtcatggaacagagtgtgatcggttaagcatcagatgtgtactcncaaagtccacgcagacaggttctgaccagcacgcccatatctatgtgtgtcccatgttacaccccttgttcacgtcagaacagtctgtcgctgacgcatagtaattctccctctgtacgatttgtccatcagccccccaatgatgtgtaggacgagagggaatacaatgggctcgtggtttgggtatataaatatagcacaaccccaataaaaaaaaaaa

SEQ ID NO: 696753 - DNA, 118 bp, Homo sapiens
tgctgtatagtcatgatatctagagtgcagcttacaaaccatcttttataaatgtcatcctcctgcattgttgatacactaacaaatgcttggtacagccatttaggtagggaccgag

SEQ ID NO: 696754 - DNA, 1308 bp, Homo sapiens
tggggaacatagcagaggaggttaaataggataagtcagctacatttgttaatggtgtatcaactgttatcattaatggtggtgatacatttagcggccctacgtggaaagggaagtaccagtcttggggcaaaacttaagagattcctggaggaacctacggcctgaaccttaaaaaaaaaatctctaagagaaccttacgaggtgcgtggcgtggctttaccattttcattttataatttatcaacagcggggaggtggcaagtggggctaagtgtgtggtcaagcgtggtattttataggaagttcttaccagagtggtggccacatcgagaaactcgggagtgtgaccattcgaggtggacctataagagagatgtgtagagcattgtgtggtggaaattactttatagtctccaaaagagcctttataaacaaaactattatagaaccatatattatttcatatatattgtttataaacagtgtgagatgtatagtggcatttaaaaaagtgtcgtggtggcacacaatataacaaaccagtggatgtggggcggataaacatgtttcttcacagagaaaaagaaaagaagaagagaaaacaacacaacaacaaaaaagagaggggcgaggcgcgcgcgcactactaagagagatagtatcacacgcaaggagggaggggcgccaacaagaagtataacaagcgcgagatcccccagagcgcattagtctgggtgacaaacagggggggcgccccccataataaaggcgagagagcgagagaaaatattatacaaacgaccgatgtgaagcacctacaggtaggacgccagagcgagttatataaacaaacaaacagagcagctcgcagagaacatcgcggcgggagaaacaacaccgacggccacaccaacggaggagcaaaacctactactagtgaggagaaaaaggagcgaacaccccattaatcaccacccacggcggggggggcaggtaacaacacaataatcagtgtgcgggccaaaaaaaaaattactacctccaaagcaagaaagataaaattatttataaggcagagccagccctaaatagagagggtgaaacaactatcattacaacaatttttataaagacggagcgtgtttataaagcaggtggtgtggtataaacacacaaaactaaagcaggagaaacatatatagtacgatgattaactggtaattataaaaaaaaattattgagggaacaacacatggaagagaattaatgtcatgatcgataagagaaaaaatatatgtatagcca

SEQ ID NO: 696755 - DNA, 217 bp, Homo sapiens
agctccaaaacaggcacgaggtagcttagaaagccccaggcactgtggccaggctcacattggccaagttatcatgtccattccgcaccaagctgcagaacaaggagcatgtgattgaggccctgcgctgggccaatgtacaagtttcctggccgccaaaagatccacatctcaaagaagtggggcttcaccaatgttcaagtgctgagtgaatttg

SEQ ID NO: 696756 - DNA, 269 bp, Homo sapiens
caccgtgctacgagacgccacactatcggacatcaaagctcctattcgcaagcacgaggcctttgagagcgacctggctgcgcaccaggaccgcgtggagcagatcgccgccattgcccaggagctcaacgagctggattactacgactcccacgatgtcaacacccggtgccagaagatctgtgaccagtgggacgccctcggctctctgacacatagtcgcagtgtagccctggagaaaacagagaagcagctggaggccatcgacc

SEQ ID NO: 696757 - DNA, 882 bp, Homo sapiens
  misc_feature (385)..(385): n is a, c, g, or t
  misc_feature (845)..(845): n is a, c, g, or t
ctcagaatacggaatctgccaatattgagcagttcttgcaagaaaggatcaaagtgaacggaaaagctgggataccttggtggaggggtggtgacaatcgaaaggagcaagagcaagatcaccgtgacatccgaggtgcctttctgcaaaaggtatgtgatatatctaaccacaaaatatttgaagaagaataatctacgtgactggatgcgcgtagttgctaacagcaaatatgagtactaagtagcttactttcagattaaccaggacgaataagaggaggaagacgaggattaaatttcatttatctgctaaattttgtatgagttcttgaataaaacttgggaaccaaagtggtggtttatccttgtatctctgtcgctgnggattggacagaaaattgggaaatcataggcaaagggctttcctttggttcgccactcatttattttgtaacttgaacttgtttatttttcttgcttaaaaatttcaattcttcgggtaataccacagcagaaagggaagggtgacgttacccgactggacatccatttgaggaggcatattgcgggtatgggaagtggaggcttgaaggtcttgacctgtatgatgttaacaattgcactgccatttgatccttctggtctcccactgatgctgggatacgcgtgttcttttttctcaaaaccaagaaatgcgacactcttttattattttttgtggaaacatatgtcattattggccagcctctgtgcattaaaaaacaaaagccacctagcgtaagagttggagtcgacgaacctccttctaggggggtattgatgatcctggacactgtaactcgncttcgtttttgaacgtttccgctccccccacagcgat

SEQ ID NO: 696758 - DNA, 336 bp, Homo sapiens
ttgaaagccaaaaatcttgtgtaaaataatagtatctccaaatggaaactggaagtcagcgtcatattcccatgttaaagacgaggaacgaagactgagaaaagttaaacgacttgtcaaagtttactcatgtagtgagtgaccgagccagaacttggtctctaggatttcaaactcaaagtctaatgttaactccatcactgttcctctcagttttctaatgccagtacatttccactccggagtccttcaagaccttctcatgccacatagctttgtttatttcagacatttttcaccccaaattctgagaacgtcattgaagcatatgagaaa

SEQ ID NO: 696759 - DNA, 2656 bp, Homo sapiens
agcatcgagtcggccttgttgcggaacggaaccactgggccgcagcgaccacaggggagttcttcgccggccgcaggttcaaagcgatctgcaatgagcgcctttaggaattcattcgaaggcgcaaaagaaaaagaaattaaggcaggaactgagcgaggaaggaagggagggaaagaaaggaagaaagagaaaaagagaaagaaacagaaagaacaggcaaaagctgaaagggtcatgggaggaggctgctggttccagtgaatggcgctgaccccactgagatcaacaccttgctggaggcctcaaacactgaaagaaagacatgcaaaggaaataattcaggaccaactggtgggctccaaaaatctcttctatgaggaaggtgaatgcaggctctgctacgtcctgcctgtgaaagaatcccttcaggaaaccagagcttccctcgtttaccttttctcctacaaagggaagcagcctggaagaaagagtccagtacttgacccatgcctcaacaaactctgctatcaatatggtgcagcttaccaaaggtcctagaactttgtcaacgcacttggagtaatttttatgaaatattgtgtgtgataagcaaactgtggaaatttatataagatgttggtggcatagagttatacgattgtgtattaagggtagttttaggatgtcatttttttttcagttcatcatgacagaagtccttttcatgagagaagtcacatgagaaaaaactttcttatattgtaagctccttctatagtggtatgtgcatttaatgacatccaactaaagatggtgtaataccacggtggtttgacttagagttttttaactttatatctggtttatctgggtattacatgcgttttaaatgtggatcttttcaacttacgatgagattatcaagacatagccccatgctaagtcatgagcatgtggacttataatggttcaatttagatttttcggctttaagataggattattggggcttacccccatcttaagtagagaaacatctgtattgtgtaatactatatgatgtacatttttctgttttcctattttcgtgcatgttgatgtaagcatggaaaaattttaggaaatgtatttattaggctgtttacatgggctgcctggtgcaaatcagcagtcaaaaatgactacatacacaactagcaatgggaggagaaatcctccctctgtgggaggcactgactacattccagttctccctcctacgcccagagactggaccagggtttgatgactggcaacttctcaaggggccggtctgtcttagttgatgattttagaggtatatagaggtatttatttacaaataaacaaatatttatttataagtagatgtttacatatgcccaggattttgaagagcctggtatctttgggaagccatgtgtctggtctgtcctgctgggacagtcatgggactgcatcttcgtccttgtccacagcagatgaggacagtgagaattaggttagatctgggactacaaatagcttctctttcaagtgccattacagctgaacattagtgaatcttgggccttctttgggctcagggcagagcaggtgtttatctgccccggcatctgctatggcatcaagagggaagagtggacggtgcctgggaatggtgtgaaatgattgctgactcaggagtggatgggcccctctcgcttctggtggtctgtgaccctgagcccctgagctgcattttacggtaaagattcctgagctgcagcatctgactcatctcagaaatatcaattcttaaacactgtgacaacaggacctagaatggctgacacattaaggctttgtccttgtgtcacgctctattattttatttaaaaacttcagtaatcattttagcctctttccagcaaactcttctccatagcagtccagtagtggtaggataaattatggatgtagtcgttcaagggattttggtcttttccatctcaagccatgtgttttgtcttgttccgggactggtttggctgggacaaagttagaattgcctgaagatttaggcacattcagtgttgtgtccatggagttttaggagggggtagcctttctggtctttgcacttccatcctctcccacttccatctggcgtcccatgcgttgtcccctgcacatctggaagacacaaggtgctgctgccacctggtctttgcttttgcagggccttctgtgcaggacacttggcctcaaagcccagagggagccagtccagccccagctcccttgtgccttccgtagaggccttccttgaagatgcatctagagtgtcagccttatcagtgtttgttaagcttattcttttaaagtaagcttcctgacaacatgaaattgttggggttttctggagttgtttggtttgtatgggatttgctttatccccaagccaaacagcacatgacacacgacagccacttaagacagtgtgtcactcgtggttagagtcctttgatgtttctgccctatggaccctatttgaagactatgttgtaatatcaaacaatacaaggaagcacgttatacagaaaatgctcatatgtttatgaattttgaccaaaataaatagaaatcttatatt

SEQ ID NO: 696760 - DNA, 724 bp, Homo sapiens
agcgggagttctcctcttctcttgttctatatccttgggagatgaccttttaaccacatggcagtactttctcttggtctctgctgtcacaatggctgctcaggttcagggttcaattcctggcttaggaaatgagtcctttctggtttgatatcagtgtgacatttgccattttttaattctcttcccctctaggaaccatctttggagtaatccttgcaaccggaatttggctcaaaacaggtttttcttagagcactaatcgacactttaacaaaaaattgtaaaggttataaaaattgtaagggttaaaaaaggtttatgagtatctcaccttatggtcaaacattaaatttgggtagacatgtcaatgagttttattaagaattggttttaacattaatagtacactaatgtaaaggtgaaatttggcttatttggtacaaaaatcatacaggaagcactgtcacatgtgaaatagtgtttggctttctttgggctatatttgtttaaatatgttgttggtatgtgttccaaaattacgtaaaactcctctaattctaataggacttagtgtatgttattcatacattgttacataaaatcatatgccagaaaggtaaccaaattttctttgtcaatcgtgtttttaactgtggctgccctaaaaagattttgtccattcacagaaaattgtcatgttggttgatcctcttcaaagatg

SEQ ID NO: 696761 - DNA, 579 bp, Homo sapiens
agcggggagggagcgactagacggacagtccggtgagggcggcgagaggaagcccgctacgagtgccctagctccccgccgctctcgatgaaccggacggaataagccgcgcctccagcaggggctgcgcctccatgaatccctagttgtttttttttttttctttctcttccccttcttccttcacccgcgcacgcgccgaggccccggtcgccgcctttctccgcttcgcgcaagaggcggccgcgtccagggtcgcggagtcgcataccgggagcgcaagggcggtccaaccccgaaacgggggagagattctggctcagcggaactggcaggcgggattcccgaaagtcttccgttgttctgagcaatgtgagtgctgttcaaacatttcagactttgcagatacaattggtgcagcagaaatgggatgatatcaaggatcgaattaagagagaaatagggaaagacctgaaaatcaaagaaggagctgaaaatctgaggaaagtcacgaacagataaaaaaagttgggcttatgtagacaacatttggaaaaaatcaattaaaaaattagaaga

SEQ ID NO: 696762 - DNA, 252 bp, Homo sapiens
gtgagactagatatctgtctctatgaggaggcccgcgccctttgttggctcagaggaagttctgaggccgtctcatccagtccaccatgttgggaggactttgttcaggaagaaatcccttctccacttaaatacaataattagccaggcttggtggcaggctcctgtaatcccagctattcgggaggctgaggctggagaatcacttgaaccccgtggggtggaggttgcagtgagttctccagcccagct

SEQ ID NO: 696763 - DNA, 142 bp, Homo sapiens
agtcatagaagtcggcgtaagagtgtttagattcaccccttcccaataaagctaaaactcactgtagttgtgaaaaactcccgttgacacaaaatagactacgaaagtgggtttaacattatcttgaacacacaatagctaa

SEQ ID NO: 696764 - DNA, 340 bp, Homo sapiens
acagcgttgctgtgtcatgggtctagcaaaatgcttgtaatggattatcttaatttagctttagtttgtgactttattattgttattgttattattattattattattagctatagggcattgttctgttgcccaggctggagtgcagtggcatgataatagctcactgtagccttaatctccagtgctcaaatggtcctcccactgcagcctcctgggtagctaggactaaaggcatgtaccaccatgcccagctaatttttaaaattttttgtagagatggggtatcactatattgcctaggttgatttcgaacccctggcctctagtgatcctcccg

SEQ ID NO: 696765 - DNA, 291 bp, Homo sapiens
ttctgcggctctccaagtggatagcatctctagatgatggcatggacttttcctgctattgcttcagaagaaatgtaaaaggggtccctctttccaaacatacactaaacattcagagttaagacagctgagaattgaaagggatatcttaatattggtgaaggtgaaggaatcgggattcttttgttaacaatcaacattgcagctatactaaaagatttcactatgacagacaaacacatgtagggcggatctcaagcattagaaacaaatggatgggggagagtggtt

SEQ ID NO: 696766 - DNA, 114 bp, Homo sapiens
gactttatccaaggaggaaaagaccaaaaaataaaacctccccctttgtttggacaaactggcctttgtgattacatagatcagccctttaaataaaacaagccttaatttgca

SEQ ID NO: 696767 - DNA, 130 bp, Homo sapiens
cgcgtgctcttaagaggcacacctgagctggtcacaggacttggagtgggagctgccacggtactgagctcagtgctgggggcctggcggtcgctccagcgcttgacaatggctgtgttcttcttggtcc

SEQ ID NO: 696768 - DNA, 696 bp, Homo sapiens
ggcggaactgttgctccgtgcgtgctgggacggcgtctgatggcggcctggacagtgccgagataggcggctgagctgggcatggagcaccagtgaggtggtgggcgcctgtgaagagccttcaggcgctgggcgatgtcatctgaggctgaacttcgggtaccaccaagcactggtgagcttactgcgagaggtgcgagggacatagccctgggaggcgcagacatagagcgccgtagtgtctcgacacatccccccagagggactggcccacagcgagcttattgcgactgcccaagtggacaacagtgtggcttcagcaaggccatgtcaacaagtggattcgtggtggacaagagtgcaggtgacgggccccgggattgttccgagtggtgcgacaagcatggacgatgaggtgcgcgcggccgtgcctccaggcctggtcctggggcccggacaggcctgcagacagctgcggccgcacaaggaccacggaaccgcacccttcagcgacaggacggcagcctgctgggctccaagtgactcctgccaccaccctcactgtccgcacaaccggccagctgccctttcgctccccaggcaatctcccgcagccacgcagacccgagcctgatcccacagatgatataccactggcctctgggcgcgcacccgtccttaagccctaacgcttct

SEQ ID NO: 696769 - DNA, 294 bp, Homo sapiens
tccccttaaacccacgatcactaaacatactactactcactctcactgcccatagtaactatcaaactcccgagccaacaacttaatagtgactagcttacacatagcttttactgtagatgataccttctttactggactccactttatgactccctcagatgcccatgtcgtaagcccccatcgcatgggtcaatagatacttagccgcaattaatctataaaactacggcagctaatagataataatacgcctaattttacaccactccacgataatcgtggggtatgtaa

SEQ ID NO: 696770 - DNA, 631 bp, Homo sapiens
acataaggctaagtacgaggctcggtgttaatcggacgaggccaagagcgtggtgcaacagtaccttggacgttgaagggataccctgtatcatgcctgccatactggtgtgcctgggcttccacctgtgccgctggtgtgctactcctccaccgcatatcaccctgccaggtggtggagaacatgaccagtggcccacttccccctgtgactgtccaatggaacgacctggactacatggactccctgtgagaggacttcacgttcaacaaggatggcttcctgtggacttccctgtgccatggtgcagtgagctgcaccagtggctgtgccaggcgctacatgatgatctgtggatcctgccatcagcagctctgtgtgccctgccgggatgctactatgtgccctacgactgatgtgtgtctgcgtgattgtgtgtgtgtttatcatcaccaaacgagaccggccagcctgcatgattgtggaagtgtatttgccctgggtccaactgcacttccccgacttcaccaacacccacagcccctggacctgagtgaggagtgacatggtggcttgagtatccatgaccatggtgcccattcagacagagcatgtggatagacatgaacga

SEQ ID NO: 696771 - DNA, 136 bp, Homo sapiens
tggcagcataggcttcttacgccgcacaatccagaagaaccgtccatcccacctattcctgtcacaatatgacagctgtcgtgtgatcacttgacaagatcacccgcaagtcatgtgccacgctgtgcctgcttca

SEQ ID NO: 696772 - DNA, 947 bp, Homo sapiens
tacggagttttgcccccaacacctggggccaccccttgtgtgccccccgggggtgtttcccccaccggggatttttggctcccgttgggtggccgttttttcgacgcagcctcgtggtggtggcggacacccgtgctcccttaagagcgggcaagacaggtttcttgcacatgtcgctgccgccaagccccttccccgtgagggtggggccccctgtccccgtctggcaaggtgtgtcgggccccctcccgcggtgggctgggccctttctgcgccgccccccggtcgggggatcattcttccacccgctaacccttgggtagtggtggcccgcccacattttttggctgccctcaccattcccgccgggggtgcaggccctgccctgcctcgtgtttcggtgctttgatcgaaagcgtgcggctatacacgagcttctttctctgttagaccccctcggcccggcccagcgcccccgcctcgagcgtggggtgaggcgcaccctggcaccccctctcgggaggaattggtggactccgctccctcctccccccctattgcacgtgacaggcacggtcttgccgccctcctcgcctcgcctcggggtggtctattttcttttcccggcatcccggatggagagacagtcgccaccacactttttgcatggtgtcccatcgtcccgcaaccttgcgtgtggcccgctcgctcctggtcccgctccacgcgtcggggatgtggcgatggtatctattttggaccctgttgcagctgtgcaccacccaggcccccctggtccgcacctacctttcgcgccgtataagaccccactatggcgcaccccccatcaaaagctctacgagcatactacaacgactttcccgctcaataaggatggcacccggtcccaaagataacaaaaagtattcacccccgcccacaaaaca

SEQ ID NO: 696773 - DNA, 120 bp, Homo sapiens
ctaatgagctcgtaccgtctgagcagctgggaacacaagtggggtttgtacaagtccagacgcatgttttggaaaccagtgggttcaaagcgtttctgaagtgttgtggtggatccttgg

SEQ ID NO: 696774 - DNA, 331 bp, Homo sapiens
ggagacaaagtctcgacccatcccccaagctggagtgcagtggcacgatctcggctcactgcaacctccacctcctgggttcaagcgattctcctgcctcagcctcccaagtagctgggattacaggcacccgccaccacgcccggctaattttgtatttttagtagagacggggtctcaccacgttagccaggctggtttcgaactcctgacctcgggtgatccacctacctcggcctcccaaagtgctgggattacaggcgtgaaccaccgcacccggcctgttatggactactatgacaaaattttttaaattgaggacacactgcca

SEQ ID NO: 696775 - DNA, 493 bp, Homo sapiens
  misc_feature (42)..(42): n is a, c, g, or t
  misc_feature (53)..(53): n is a, c, g, or t
  misc_feature (88)..(88): n is a, c, g, or t
  misc_feature (94)..(94): n is a, c, g, or t
  misc_feature (108)..(108): n is a, c, g, or t
  misc_feature (132)..(132): n is a, c, g, or t
  misc_feature (174)..(174): n is a, c, g, or t
  misc_feature (209)..(209): n is a, c, g, or t
  misc_feature (217)..(217): n is a, c, g, or t
ggtaccttcctgtgtagaggagtggttccccaaaagttgacncaggagtggangctggcagccccagaccagaagctattgaatttanccaagnggaatttaaatagncaaatcccagtttcagagatgagncatattgggatcccagataaattctgaagttggagaccaatnggatttcccactggattagctatttttgccgtaanaggaaagncaagttaaaatgatccccaatatcccaatatattaatatctagctttaccaatgagagaggtgaaattactattaaatgatatgtggaaatggaatagcaagtttggggtcaggagtggaaatcagtattgattttggacatgttaatttttatatgagtattaaatatcatatgggctggacacttaaatctgaataagagcatcagttcagctacaaagaggaacagagagatgggctatagctggagggagaaataaggtcaagagaaaattt

SEQ ID NO: 696776 - DNA, 81 bp, Homo sapiens
gtagccaatagcctaaaatgaaattttaattttgcttgttcacataattttgggttttttttccccttctgtcgtcttctc

SEQ ID NO: 696777 - DNA, 495 bp, Homo sapiens
gaagcgaggtgacgacaagccctgtggagcgtccctggcagaggactccggccagcggagtgacgcaatccaaagagcgctcccgggtaggaaagggccccgggggaatgccttgccagagcagcgcatagcaggctcccgagaaggattaacactggctgaacaccgggaaggaactggcacttgaagtccagacatctgaagcttgtcaagactagtcttgggaacttgccccactccatgtgagtggaagcatggcctgatcacccacggtgtgcctgtatggacatcttggttctggtttggactgggcttgactgggtaagactagtcttgggaacttgccccactccacgtgagtggaagcgtggcctgatcacccacggtgtgcctgtatgggcactttggttcgggttaggactgggctcgacttggtaagactagtcttcggaacttgccccagtccatctgagtggaaacgtggcctgatcacca

SEQ ID NO: 696778 - DNA, 724 bp, Homo sapiens
  misc_feature (85)..(85): n is a, c, g, or t
  misc_feature (87)..(87): n is a, c, g, or t
  misc_feature (91)..(91): n is a, c, g, or t
  misc_feature (107)..(107): n is a, c, g, or t
  misc_feature (109)..(109): n is a, c, g, or t
  misc_feature (114)..(114): n is a, c, g, or t
  misc_feature (118)..(118): n is a, c, g, or t
ggcagtgagttcgacacaccatgccgactgtcagcgtgaagcgtgatctgctcttccaagccctgggccgcacctacactgacgnangaantttgatgaactatgtntntgaantttnggtctggagcttgatgaaacttaccactctgagaacggaaactaataaagtacaacgacaccaggtaatgtaaacggcagcaggagcctctgatgttgtatctttaccaacacattgaccgtcccgtgccaatacgatattgatctccttgtggtcttggacagggaatctgggtctcagacgggactttccaagcgttcctttccaacagaccgaacacagggaattaatacggcatcccagtttgttacttaaacacagggggtaaaatggccctggattgggacacaaaattcccaaggcacaaatcttcgacctctcacttcccacgagaaaacaaggtaagctcacccagcccttcataggactttaccggtaccccttctttggggccggggctacgaaccaggtccacggttccgtcgcggttaaaataattaagacaggcttttttaacccgttcacaaatatggggaaatttccagggaacttactttggccacccatgggcctttttccaaattttttgcaacaccccctttccaagtcggcagtcaacacattttaaccctttccaaggaacaagtaacttttggccagggacaa

SEQ ID NO: 696779 - DNA, 635 bp, Homo sapiens
  misc_feature (85)..(85): n is a, c, g, or t
  misc_feature (87)..(87): n is a, c, g, or t
  misc_feature (91)..(91): n is a, c, g, or t
  misc_feature (107)..(107): n is a, c, g, or t
  misc_feature (109)..(109): n is a, c, g, or t
  misc_feature (114)..(114): n is a, c, g, or t
  misc_feature (118)..(118): n is a, c, g, or t
ggcagtgagttcgacacaccatgccgactgtcagcgtgaagcgtgatctgctcttccaagccctgggccgcacctacactgacgnangaantttgatgaactatgtntntgaantttnggtctggagcttgatgaaattaaagacctagagcttttatgtccaaggtgcagttcgtccactgatcaccagcatcgctgatgtttggcccactaaagcaaggctgcctcctatcacggaaaaaactggatgcaatacaatgcaccgtggaaggagagagtgcgaactacattgacaaacgtcataactatacaaaccagacaaatcactggaactggcagaaacaagacatctgagcaaggaactagctaagtaccagaacaaggctaacgtacacaggcagcaggagcctctgatgttgtaacttgtacaaacattgaccgtcctctgccgcaatagactactgactctcctgtgctctggaacggattggcttcgaggacttcaggtcttcaacagataggatcccaggctccagtgtataaacgggtaatgcctgatgggaacaatccagaaattgattatcacagaagagacagctaagatacgtcctttcgcggtagcagcagatctccgg

SEQ ID NO: 696780 - DNA, 402 bp, Homo sapiens
agacattcacattaaacccacatttgactctaacgctagatacaaggcagaaagttcaacatacactcaatgactcaagtccacaaatcaaatactacaatgttaaggcagcacagctaccagtgatagcaacgctaaccaaaaggtaatgaacatttagtcacttgccagacctttagtaacaacagtgtagtacatttccactaagacaataagctacacggataatttactgctgtgacaaggctacctctgtggcaaaaaacaccacaaatattccagtgtgacagtcagtccatggtgatataaatctatatctgcatacttacacaatttacactgcacacatcgtatacaggggacaattcaactgagagggttaatttaaatgaccatacaaaa

SEQ ID NO: 696781 - DNA, 450 bp, Homo sapiens
aagagttgtaccagtaaggctggatcttcagagaaagactatgaaatgcttttcaaatctatgaatggaatgctttccctggaggaagtgttgcctcagacgctcagattatgctaaagtggcaaaatattttataacttgtccatacagagttttgatgatggagactattttcctgtgtgggggcacatgccttggatttgaagagctttcactgctgattagtggaagagtgcttattaactgccacagatctggtgacgggcaatgcccgctgaacttcactggaggtcaattgcacagagaatgtccagaatttcctactgagtggtgctggcattaagcagaaaacctttactgccaatttccataagtgagcctctccgtgaagaattttcaatgatgaaaagttaaagaagtttttcaatgtctaactaccaatacagatgg

SEQ ID NO: 696782 - DNA, 114 bp, Homo sapiens
ttcattgagtcctgacccccatctccctaggggcctgtgaaaggagagggaagggtttgttttgctcagctccatgtcccccattttcctccccaataaactggggctgggcta

SEQ ID NO: 696783 - DNA, 170 bp, Homo sapiens
tagagcggctgcgattgtcactattatcaagcctagttggcttgaagttgagaaggctacgatttttttgatatcattttgtgtgattgcacatagtgctgtaaattaaggtggtgatagctccataggcattagtgttatatgtttgaacatagttgtgttagtttctc

SEQ ID NO: 696784 - DNA, 1677 bp, Homo sapiens
  misc_feature (1275)..(1275): n is a, c, g, or t
  misc_feature (1287)..(1287): n is a, c, g, or t
  misc_feature (1319)..(1319): n is a, c, g, or t
  misc_feature (1322)..(1322): n is a, c, g, or t
  misc_feature (1342)..(1342): n is a, c, g, or t
  misc_feature (1355)..(1355): n is a, c, g, or t
  misc_feature (1364)..(1364): n is a, c, g, or t
  misc_feature (1367)..(1367): n is a, c, g, or t
  misc_feature (1372)..(1372): n is a, c, g, or t
  misc_feature (1382)..(1382): n is a, c, g, or t
  misc_feature (1384)..(1386): n is a, c, g, or t
  misc_feature (1604)..(1604): n is a, c, g, or t
  misc_feature (1632)..(1632): n is a, c, g, or t
cagtagttgtggtgtgggtgtatagtggtcgtatgcctgaggacacccgcctctttgtgtgagcccctctcatttgcccgtgggcatttttgcgacgaacgatgtgtggtgtgctgcccactgctggggtgttgggggtgttcactgccccctatggtggtccgacccccccccccgaccggggggccctttgtttgaggtccccaaatggttatggtgggcccaccatccgtctccgccccatcggagtgttataattttccccggtgtggtacttctaagggagagaagttggtccctaaatttaatattgatgccccaacgcgccccagcgtgggggccccgaacacgaaaaaaaagaagggcttggtggaaggaggggtgaacaccacttgcccggaagggaggtttttaatccttttaaccacccaggagagaatgtgggtggcccccttctataaacttgggggccacaatttagagaagaaatttccttcggggtgtaaccacgaagaagtggttttgtgttgggagaaggaaaacggagatcgccgccgccccctgtgtggggtgggttttgtgttgggtggggcggcacacaccaccaacagaagaggtggggtattaatattaacaagggggatcctccgggagaaaaaggtggaaagagcgccgcagaaagtcccccacgtctggtgttcttttcccccctccgcgcgataggagaggagattttctcgtcccaacggtgtgagacttaagaccggagccaccttgtgtggcttgcgccccaccacaaagaggtatatatacttgatcacacacaccgtcgtgttgtaggaagaaagcccgccccttctttcccctctcttggggggctcttgttctatagggagaagcgctctcactctggggagagacaccccctgatagactcgtgggagagatatgtggtttttgccacacatcggcctcgggctctcttctgccccgcgcacacacacgcagaagtgtgtgttctcactcggagaccccacgcgctcttgggggcacagcgcacacacacgtattatgagcggcgccccgagctctttatagagagagttttgtcgctcacaagagcacacactgcgctctctctcccgggagatagagaggagatgagatgagcccctgttgtgagagagaatgagaagcgcttggagggccccacacgcgcgctccaagagaagttctctataggtgttatatatatgcgccacgcgctgtgtctcnctggtgagatgntctcacacgcgggtcgccacgcgcggtgtgtntgnccccaccctccaattatatntatatctctagcnctatacgcnggncacanaatgtggcgntnnnaatcttgtgtgggagatgctctgtaagaggagaatggagatgggcttctgggagatgaatagtggccagagtttaaacaaataaacattccattggtttggcgaccctgccataatttagactgttttgggacacacccagagttggattcccttggagatttctcaaataataagactgctgccagtccacatccaccataattccgtggtgaaatnttgtttgttactgtccattccccttccntttcgtttagaatccagaataaagttgtatttccaaaaaatcgta

SEQ ID NO: 696785 - DNA, 368 bp, Homo sapiens
aagctagtagtcttatgttttttaatgacacagagtctcgactctgtcacccaggctgaaatgcagtggcacaatctccacagtcttggtcactgcaacctctgcctcctgggttcgagcggttctcctgcctcagcctcccgtgtagctggaaattcaggcgcctgccaccatgcccagctcatttttgtatttttaatagaggcagggtttcactatattggccaggctggtctcgaactcctgacctcatgatccgcctgcctctgcctcccaaagtgtagggattacaggcatgagccaccgaacccagcccaaagttaagcattttttaaccacaaggtgagaggtggaagtatctcgttgag

SEQ ID NO: 696786 - DNA, 407 bp, Homo sapiens
agcatgatgcgcgaaaacatccagcgacccaagatcgcgtggtcaatcacaggtgaacgatactgtgcagatgattaagggacaggcaagataatccactttatcaaatatgatacaggcaatttgtgtatggtgattggtggagccaacctcggtcgtgttggtgtgatcaccaacagggaaagacatcctggttcttttgatgtggtgcatgtgaaggatgccaatggcaacagctttgccacgaggctttccaacatttttgtcattggcaatggcaataaaccttggatttccctgcccaggtgaaagggcattcgacttactgttgctgaagagcgagataagaggctggccaccaaacagagcagtggctaaattgcagtagcagcatatcttttatactt

SEQ ID NO: 696787 - DNA, 508 bp, Homo sapiens
  misc_feature (240)..(240): n is a, c, g, or t
  misc_feature (506)..(506): n is a, c, g, or t
  misc_feature (508)..(508): n is a, c, g, or t
ccaacatggtgaaatcccatctctactaaatatacaaaaaaaattagctggacgtggtggcacaggcctctaatcccagctactggggaggcccaggcaggaggatcacttgaacctgggaggtggaggctgcagcgagccaagattgcaccactgcactctggcctgggcaacagagtgagagtccatctgaaaaaaaagaagcactccagtctggtcaacagagcgagactccatctnagaaaaaaaaaaaaaaaaaaaaaagaccaggttggccgacatggtgaaaccccgtctctactaaatacacaaaaaaaattagctgggcatggtggcacacgcctgtaatcccagctactcgagaggcccaggcaggaggatcgcttgaacctgggaggtggaggctgcagcgagccaagactgcaccactgcactccggcctgtgcaacaaagtgagactccatctgaaagaagcactccagcctgggcaatatagcggactcctntn

SEQ ID NO: 696788 - DNA, 1195 bp, Homo sapiens
  misc_feature (692)..(692): n is a, c, g, or t
acatcaaaacccacctcaggtattgcatcatcagggaagactgcttctcttaagaatccttaacccctacatatacataagatgtattataatcaagttagcttgtctttcactcccactagactgtgactccttgaggacaaaattggattccttttcagccatatatctctagaatctagcattgtgtttgccccataatagactttagtaaatatttattgaatgaacgaatgacatcatctattctaattcactcatttactgataaaggaatttgcggagttgcctttggaagtccaaaaggaaagaatattttcagaggaaaaaatgaaatggttcagtcactcttttttttcatttaagttaactttattaagtataatttatgtacaataaagttatatgtatattttatgtaaaataaaatgcattttaagtgtacagttctataagtcttaacaaatgtatatacccatgtcaccaccaccacatcaagatatagaacatttccatctcccaaaatagttccttttgtgcccctccccatccaatcccccatacacgcattcactccaaccactcatctgcttctgtccctaaagattagattcatcttttctagagtttcacgtaaatggaatcatccatatgtacttttttgtgtctggcttcttttgcttagcatgttntgagattcatccatattatgtgatagtagttcattcctttttactactgctaggatttcatgtatgagtatttcacaatttttttatttaccattgttaatgtacattcatgttgttttcagtttgggtgtattatggatacagctactataaacatttgtgcacaagccttcatgtggacatatatctttaattgatctggggtacataccttaggaagtaggattccgggtaatggtgtaagcaacgtgtaaaacttagaaggaaggactccaaactcttctgaaggttggttcataacgttaaggttgccacaacaaagatatgagttccagggtttcccactcttataacaaactggggttgaccataagcatccaaataggggaaacatggtattcccaaaaggatggcaattttcaacaaatgcacaaataaaagtgcggaaagataggcacaatggccataacaaaaatgtaaaaagcaggagaggacaacggtaa

SEQ ID NO: 696789 - DNA, 361 bp, Homo sapiens
tgtgctacacgagcagagcggtctcaaacaccacagatataagaacaaagcaaacagaaaataatttccagaggccgaggtagggcggatcacctagaggtcaggagtacaaaaccagcctggccaacatggcgaaaccccgtgtctactaaatatacaaaaattagctgggcatggtggtgtgcacctagtaatcccagctactcaggaggactagaggaaggagaatcgcttgaacctggtagtcagcggctgcagtgagctgagaacatgccactgcattccagccttggcaccaaaatgagtgaacatccatttcaaaaaataaaaaatgtacctgagaacattactaaactcccag

SEQ ID NO: 696790 - DNA, 94 bp, Homo sapiens
ttcttgaaaaatttttgtttaaaaaattgaaggttcttttcaaatgggaaactgggggctataaacaatggaaaaaaagcccccgtttttttta

SEQ ID NO: 696791 - DNA, 190 bp, Homo sapiens
cgccgcccgcccgttgttaccggtattgtaagaacaagcgtaccaaagtctcgcttctgccgaggtgtcctgatgcaagattcgcattttgacctgggcggaaaaggcaaagtggatgagtttcgctttgtggccacatggtgtcagatgaatttgagcagctttctttgagcctggagcttcccgattt

SEQ ID NO: 696792 - DNA, 126 bp, Homo sapiens
ctcatagctagtccaaagcatcattttgtgtctgacgtgaatgatgccaaaatcctcaatgacgtccaggcactggtttgaagttaatgtggcagaccttccagaggaaatcgacatctccagtcg

SEQ ID NO: 696793 - DNA, 856 bp, Homo sapiens
  misc_feature (39)..(39): n is a, c, g, or t
  misc_feature (85)..(86): n is a, c, g, or t
  misc_feature (93)..(96): n is a, c, g, or t
  misc_feature (120)..(121): n is a, c, g, or t
  misc_feature (131)..(134): n is a, c, g, or t
  misc_feature (153)..(153): n is a, c, g, or t
  misc_feature (160)..(161): n is a, c, g, or t
  misc_feature (167)..(168): n is a, c, g, or t
  misc_feature (170)..(170): n is a, c, g, or t
  misc_feature (175)..(175): n is a, c, g, or t
  misc_feature (177)..(177): n is a, c, g, or t
  misc_feature (184)..(184): n is a, c, g, or t
  misc_feature (186)..(186): n is a, c, g, or t
  misc_feature (188)..(188): n is a, c, g, or t
  misc_feature (195)..(195): n is a, c, g, or t
  misc_feature (198)..(198): n is a, c, g, or t
  misc_feature (201)..(203): n is a, c, g, or t
  misc_feature (209)..(209): n is a, c, g, or t
  misc_feature (244)..(244): n is a, c, g, or t
  misc_feature (248)..(248): n is a, c, g, or t
  misc_feature (259)..(259): n is a, c, g, or t
  misc_feature (264)..(264): n is a, c, g, or t
  misc_feature (267)..(267): n is a, c, g, or t
  misc_feature (274)..(274): n is a, c, g, or t
  misc_feature (277)..(277): n is a, c, g, or t
  misc_feature (288)..(288): n is a, c, g, or t
  misc_feature (303)..(305): n is a, c, g, or t
  misc_feature (309)..(311): n is a, c, g, or t
  misc_feature (313)..(314): n is a, c, g, or t
  misc_feature (316)..(316): n is a, c, g, or t
  misc_feature (325)..(325): n is a, c, g, or t
  misc_feature (327)..(327): n is a, c, g, or t
  misc_feature (333)..(333): n is a, c, g, or t
  misc_feature (335)..(335): n is a, c, g, or t
  misc_feature (374)..(374): n is a, c, g, or t
  misc_feature (377)..(377): n is a, c, g, or t
  misc_feature (381)..(381): n is a, c, g, or t
  misc_feature (386)..(386): n is a, c, g, or t
  misc_feature (391)..(391): n is a, c, g, or t
  misc_feature (399)..(399): n is a, c, g, or t
  misc_feature (409)..(410): n is a, c, g, or t
  misc_feature (419)..(419): n is a, c, g, or t
  misc_feature (433)..(433): n is a, c, g, or t
  misc_feature (441)..(441): n is a, c, g, or t
  misc_feature (449)..(449): n is a, c, g, or t
  misc_feature (456)..(456): n is a, c, g, or t
  misc_feature (514)..(514): n is a, c, g, or t
  misc_feature (580)..(580): n is a, c, g, or t
  misc_feature (592)..(592): n is a, c, g, or t
  misc_feature (610)..(610): n is a, c, g, or t
  misc_feature (620)..(620): n is a, c, g, or t
  misc_feature (640)..(640): n is a, c, g, or t
  misc_feature (643)..(643): n is a, c, g, or t
  misc_feature (652)..(653): n is a, c, g, or t
  misc_feature (667)..(667): n is a, c, g, or t
  misc_feature (672)..(672): n is a, c, g, or t
  misc_feature (704)..(705): n is a, c, g, or t
  misc_feature (713)..(713): n is a, c, g, or t
  misc_feature (720)..(721): n is a, c, g, or t
  misc_feature (727)..(727): n is a, c, g, or t
  misc_feature (731)..(731): n is a, c, g, or t
  misc_feature (739)..(739): n is a, c, g, or t
  misc_feature (760)..(760): n is a, c, g, or t
  misc_feature (847)..(847): n is a, c, g, or t
aacatgacaaggccaaacaaaggatgcccatttgcaatngaggatgatgaccactgcaaggaggaatgctgctgaaagcgatgcnngcacatnnnngccatgcttctgaaaacaaggcanngacaaacttnnnnctgacaaaaaccagacagngaataannaggcgnngnaggcntnaccatcncnanggcaacnacncannncaaagnagcgacagataatatataaacagatgagtatagcnagtnccaataaagcnttatntgngaatgcnganaattttcacgncatgaaatattaggnnntgannncnntncccaaccantnaaaaangnggaaaccattctgagcggacaggggagagaaaaacaggnagnaggnggganttggnccacatgngggagattgnnaacccatgngacaaaatataccntaaaagcntgtgaccncaaaagntcaaagcactgcgtcccaaagacttaaagtgagttagtcaaagcttcctcagtaacgncgttgttagatcagcggggttccagtttggactctggtctttatcaagtaaaacagcgctaacgcnttcatgaaagtnatgaccgctcagacaagngtgagttagncgatactccatagtgaggangtngtgcaaggnngttgaagatccctncatgngttgccttagtgtgattttttgagatggtggnnatattttnttttttnncttcanttgntctagggnaaaagatgaaccatcttgctnttagttttcaataatttcttccacagttttggctgaaaaacaactgtttattttgttcatgtgttcctcaagtataaaagacttgtntcgatcaat

SEQ ID NO: 696794 - DNA, 816 bp, Homo sapiens
ggccgaatgggcagatcacttgaggtcaggagttgagaccagcctcgccaacatggtgagaccctgtctctactaaaacgataaaaaaaaaaaaaaatttagccaggctggtggtgggcccaccgccttggttaatcccaagctaactcaagatgggctggaggcaggagaactcacttggaacctggggaggtcaaagctggcagtcaagccgaagatcttggccattggttactccaagcctgaagagcgagaactctggtctccaatcaatcatcaatcaatcagttacttatttcaattggcacactatgaatgtgggaacgccattttctggtgtcactctctttagggggctaaatctttaatatttggggtttctctcccctgtgcgtttcatatttaagcttatggatctaaatatatattgggatatataatatttagggaatagcttaattaaagaactcacagacttggacaaatggggtaacctaagactttttaattactagattcttcaaattgaggcttaagtgcgtgtagcagtgccaattccaattcccatgattggtgtttttatacactagtggaaatacaaccgtggtaggtataagtggtcctggagggggtgatctacttagtgtaacttgtgtccaatttttaaggttcaagtgaaaccactgtttagggtacgtgaaggggtaattagtaccaataggtgaattatttcgggtcttgcctaaggtaaatttaatatatcttcaatattagaataggggtaaattatttcattcaaggttaatgtgtgattta

SEQ ID NO: 696795 - DNA, 362 bp, Homo sapiens
  misc_feature (12)..(12): n is a, c, g, or t
  misc_feature (219)..(219): n is a, c, g, or t
  misc_feature (259)..(259): n is a, c, g, or t
  misc_feature (279)..(279): n is a, c, g, or t
  misc_feature (338)..(338): n is a, c, g, or t
  misc_feature (348)..(348): n is a, c, g, or t
ctcacacctgtnagcccagcactttgggaggctgaagcaggaggattacttgaggctaggagtttgagacaacaatctagcaagaccccatccctacaaaaaatataaaaaattagcctggcatggtggcacaagcctgtagtcctaggtggttgggaggctgaggtgggaggattgcttgagctgaggaattcaaagttacagtgagctatgattgtnccactgccctccaccctgggtgacagagtgaggccctttntccattaaaaaaaaaaaagntactagaggtaatatctttcgcttaatccatacattatttgagtatcttactggttgtnaagaattttntgatacaacttttt

SEQ ID NO: 696796 - DNA, 511 bp, Homo sapiens
  misc_feature (2)..(2): n is a, c, g, or t
  misc_feature (511)..(511): n is a, c, g, or t
anagcccacccgggcaacatagtgagacccccatctctaaaaaatttaaaaattagcccaagtgtggtggcatgcacctgtagttcccagccacccagctgaggtgggaggatcacttgaaccccagaagttgggaggatacagtgagctttgatccaattggtgccactgcattccagcttggacaatagagcaagactctgtctctaaacaaattaattaaatttaaaaattaaaaaaataagagctagcctgcactgctccttcaaagcagaagctttacacatgaatttctggaattagcatatagcatagattcagtctatacttaaggaattgtagaatattattgattacatttaaatgaccttaaatttgtatttgattgaaaacagaaatcaaaacaggtgtggcagctcatgcctgtaatcccaacactgtggaaagccaaggcgagaggatcacttaagcccaggagttccaagaccagccttggcaacatagggagacn

SEQ ID NO: 696797 - DNA, 941 bp, Homo sapiens
agcgggcagtcaccgcggacgccaatcttgtgcatggagtcgccatttggctcctagagaggccgacagaatgacccggcgctttcttccttctgcagctgagtgctgcggcggggccgaggctggggtcggggccaggaggaattgtgttgtcagagaataacaacggaggttgtccataattgacctttaagcagcaatcagtaaaacattgagctcttcagctccgccttatcttgctctggaaaagtttggaaaagaccaacgaaggtctctgatgtatccgtagtgacgccacctgaattagaaaccaagatgaaccataaccagaaggtggtctggtgtcgtactcagcacaactcgaatccatcatgtatggacgctatcaaacgaaaattgcatgagcgagtaggggtggcgatgggccacagtgccaggttgtaccaggaacctaacagagaaacgcagagtacaaattcaagagtctgtgaggggacacaccgcatgtccatcatccaagatgttcgaaggacgtgaacaaccacatcatggagctacctgatccatgggtgtatgcattgtaaagacctctatgtgccaagaagcatcattggcgtgatagcctaattgccttacagcaagcagtgcacaaatgagcacaccaagaggctccaatggtctctaaactgcttggtaccagtgattgtgccacagctgcgactaaatcactcgttaatataccacattgggactttaccacccgcaacgggacaatctccaggggcgttccgtccacgacattccctggtcgaccacagttaacagacgccacatctaccatagcttattagccaggcaccattccccagccacacgctcccagaaattagcgcgaaaaggcggtaatccagtgagccaggtcgccgccctcgaggcatcag

SEQ ID NO: 696798 - DNA, 1460 bp, Homo sapiens
  misc_feature (909)..(909): n is a, c, g, or t
ctctagtacctgtgctagggaccagtcgtcgtgccgtaagtataagaaccctgtgtgtgcacgtgggggtatacacacagtagtgtccgaaatagaccaaccagggggatggggcccggctgggatcgtcttaataaggggtgacctatatcaccacgtctcctggtgtaatgcacccctcttgtcgcgccaggaaatatttgctcggcgaaactacttctttggtgtggtgagacaccgctttaaaaatggtgtgtgatcgtacttactttggggacagagaaagtcctgtcggccacgcgcaaatattattttactatggatcggatctctttccggcgacgttaatggggtgcccacactctaaaatgttccgcggcccccattgggggagaaaaccacagcgatttttttgcggaatgaataatcgccacaattggggctctgttgccccacagtctatcgtgtttttggccttttctttaaagaacgggattaattttgtgtttttgggcttttatagagtggcgtctcccccatgggagtatagcggtatagtttgtgtaaagtgccgctgctatattcctccggagcgcccagaaaatggcccacaaaagggtatgtttttcgtgcacccctggggaattttggggttgcctacgaattgggagctcacaagactcttgcccacggtgttaaatatttctccggctccacttcgctggttctcccgccgctctgtttctacactttccgcgcactcggggcgctcgtgaaaagaggatattggataataaaagggagaaaatataatgaattgggagaaactcgcggttccgagacatgtgtttctcttcttaaagaacattcctctgggtctcgctgaaatgagcacacgagggttatatntaggtggaatttcactgggaggaaatagaatagccacaggaattgtccctcttggcctcggagtgagaaaatgttgttctccctctttctcacaaatttcttctgcccgcagttttgggagaaaagtgcacaaactctgagctcgttaacccccgagggagaattggtgagaaaaattaactctttaacgcccttggcacagcctcgtggagaacttcggttcttaacacgcctctctcgcttctttctggcccacaacacgggcccacacgcacgttttggagtctcacacgagaattgcacacaaaatcggagaaaaaattatatgaaaaaggcacatctgagtaaaatgtggagcggcgtcccacaatcactgtccctttatgagaaatcttttctattgtagaaaaggaggagactaaaattgtataatgtgagattcaccacaatgtacacacaataatataaaaataagtttttaaataattatataacaagtaagatactcctgctgctttactattgtataatatagtagtttttaagttcca

SEQ ID NO: 696799 - DNA, 571 bp, Homo sapiens
  misc_feature (571)..(571): n is a, c, g, or t
tgagctcggtaccctactggcttggagcatcactgcttttgtgggatgcactgactgcagtctgactgttctcctagtggaaaggggagcaatagcttctgtctgcatgtgcatgaaacagatggaaatttagaagagattctagtgcagacaacttcatcccacccccgctgcccacagagctagccatgtgcacggtgtgtttgaacaatgttatgttgctgctgtgcacagagatccccagtctcataaaacatactggatggaaggctgtcgagagatcatcaggccccagtgcataagttcttcctaagcatccttaacaggtgatcacctcgcctattgagaaccctcaggaggcagcccacttacggaagcactgattgttacaaaagccctgaactaaatctgcttgtctctaaagccagccctgcagatgtctgcagtgtaactactttctcttctctcaagcagttcagcccttcaaatcattgacaacagctctacaaagccctctaaatagcccgttctcctggctaaagtgtgttggtttcctcagcatatgatgaan

SEQ ID NO: 696800 - DNA, 145 bp, Homo sapiens
  misc_feature (14)..(14): n is a, c, g, or t
agggccttttgttngcccccctcccacccctacttggaggggcccaggtttggggattttaagctgtgttaaggagaacaagggcaaggagccctccctttgggctccctcactccctaataaacatgagtttgatgttttccca

SEQ ID NO: 696801 - DNA, 1407 bp, Homo sapiens
ggggcggccggatcggcggcggcggcgacgcacgtacgtgggatgcctggatgtccctgccctggctgtggcatggtcgggcccaatggctcctcttcctcactggccttgaccctgtgatgctcttggagaagggcttggtggtgttcccgagcacggccgctcctggatgtccggggtgactagctgatcgggccgtggtcagccatgggacgaacgaatggcaaaagcgtgatgtccgttggtgtggtgctctttgcatgaggcatggaatgcagcgtggcattgtgtacaacccttgtgcatcatcgcttcctcatcgcttgcgtgttcccatcaactggtatgtgtgactcgagcggtgcgtctgtcccggtttggctttgtcgattaccactcgtatgcacggactgtgtggaccacagtgactcgccgccttcaagacatgtctgtggtgtcgctgtgcgctctgacacggcgagcttggctcacgtctttcgcgcacatggggaggagaactcctgggggagtcgaatggatagtatgacatagcagtcatgcctgacccagaagacctggggccttacaacgatgcagacgaccagcaccttgagtggtgaagggagcaagagtcctggcagtaaggcaaggaaaaattagggctagtgtgcgcatgttggggatcactcatgcttggcagtccatgacacattcactggagcgttgagacaaacgatggtatccatggaccaagcaaaggacgtgacgagaggacccaaagtacatcagcccaccacgaaaacaaacgaacagcccaaataggccagaggatgcacagaccaagaagagaccaacacgggaagagacacaccagccatagagaccccaacacacagagaataggaacgcaaaccacagagaccaccacggcgcaccacgaaagagacaagaaaaacaaaccaaaaagaacaaccagagaacaaacaacacaaacatagaatggtagacaagacagaccaacagaacaaacaatacaaaccaccaagataacaccaacgaacacgacgaaacccagccccgagacaaaaaacagggcataaaacacaaacaacagcacaggcaaccaccaggagaaaacgaagaatggcacgaacctaaccaaagaaacgaaagaacatcaaacaaagaacaggagagggcaaagaatgcgacagacggaccaacgctccacacgtatggatcaacatcatacgacaacgccaccacagaaacgaccgaccataaaaacaagcgctgaagatgcaagaccgacacacacgtatatatccgtaaagaatcaagacacagaacaaaagagaaaaaagaacaaaacacaaaaaaacgaaggaaagcaaggcaagaacaacg

SEQ ID NO: 696802 - DNA, 191 bp, Homo sapiens
tcatattggtgatttaaatgcacagtctctgacaggttctattagcgacggttgcataacattatctagtcataggctgtttcctatgctgtaaaaaattctaaagcttcatgactttttaaaacatcacttcttggctgggtgcggtggctcacgcttgtaatcccagcactttgggaggccgaggcggg

SEQ ID NO: 696803 - DNA, 651 bp, Homo sapiens
cctccaaattaaccaatgtcccaataagaagaggactccatactggtgctgtctcctctttgaaggaatctctacaggacttctgatgctgacggacttgggcattcagatggaccgcaacattgccacggaggtgtatggggactctatcacggggggcatggtgcggcaccatgggaatatcatgtacgtcagggacatccgcaacgtcacacagaatcatatccaggactggggcccattcgatctggtgattgggggcagtccctgcaatgacctctccatcgtcaaccctgctcgcaagggcctctacgagggcactggccggctcttctaagagttctaccgactcctgcatgatgcgcggcccaaggagggagatgatcgccccttcttctggctctttgagaatgtggtggccatgggcgttagtgacaagagggacatctcgcgatttctcgagtccaaccctgtgatgattgatgccaaaaaagtgtcagctgcacacagggccgctacttctggggtaacttcccggtatgaacaggccgttgacaccactgtgaatatagctggagctgcagagttttgagcatgcaggatgccagttcgcaagtgagacattatagggtcaattctctcaaggtccgg

SEQ ID NO: 696804 - DNA, 853 bp, Homo sapiens
  misc_feature (28)..(28): n is a, c, g, or t
  misc_feature (83)..(83): n is a, c, g, or t
  misc_feature (97)..(97): n is a, c, g, or t
  misc_feature (133)..(133): n is a, c, g, or t
  misc_feature (139)..(139): n is a, c, g, or t
  misc_feature (149)..(149): n is a, c, g, or t
  misc_feature (166)..(166): n is a, c, g, or t
  misc_feature (206)..(206): n is a, c, g, or t
  misc_feature (240)..(240): n is a, c, g, or t
  misc_feature (257)..(257): n is a, c, g, or t
  misc_feature (357)..(357): n is a, c, g, or t
  misc_feature (428)..(428): n is a, c, g, or t
  misc_feature (433)..(434): n is a, c, g, or t
  misc_feature (440)..(440): n is a, c, g, or t
  misc_feature (442)..(445): n is a, c, g, or t
  misc_feature (479)..(479): n is a, c, g, or t
  misc_feature (501)..(501): n is a, c, g, or t
  misc_feature (514)..(514): n is a, c, g, or t
  misc_feature (557)..(557): n is a, c, g, or t
  misc_feature (611)..(611): n is a, c, g, or t
  misc_feature (673)..(673): n is a, c, g, or t
  misc_feature (693)..(693): n is a, c, g, or t
  misc_feature (739)..(739): n is a, c, g, or t
  misc_feature (832)..(832): n is a, c, g, or t
ttaatactgacctatcatcccgacaggnatctttaacataaagccttgaccctgagaagcatgggtgcatcttgtcgtgagcnggttcatggctgtnctccatcctcagcccgctgatttttggtcttttgtncttggntccagcagtncccacgtggatgttgtnctgcttctgtccttgatgttgatgccgtgggcagttaggncccggcgcagggtgtcgcatgcttccagcagggnctgcctttctaggagcngctgccgccgggcgtcccccgtggcctcgggcatggccagcgcaaactgccggaccttctgccggaaccgcaccagcccgtccaccacaccatgcaaggnagcctcgctgccgtctcctgaaacgtactgttgatttgccagagaaattccaacagtttcaaaaaactgtncaaannaagacncnnnngcaccaaacacagcaggactcctcggccctccangttccttcagggacgccctganttttttttttccnttgttttctaggacattttggcatcaaccaccctgggtgtgtnaaagtcatctgccaaggccgccttcacggccctcttggtgctggagagcctctnccacagcatcgcttccctgacggagccgcagcagaccgccccttcatgtaggcacgtgcgtnctccaggaaagagcacagcnccaggagcagctgctgagcttggagcatggcgctgtcactgtagtngatggctgagcggtaccgctccgcagacagaagaaccggaagacatcgggcggacaaggtcttcagaaagtccttaatagtcatgtagtgctntaatgatttggacattttttc

SEQ ID NO: 696805 - DNA, 1809 bp, Homo sapiens
gctatatacagagactgaactgtaagatctgcattagaatttcagaggataatctgcctgggattacaggtgtgagccacacatgacaccggatcagcattttttatattgaggtgacgttttacaaatttgtatcttgtttcattataaattgagacacctgttcaccacagcagctggaagtgaagatggatgtgcatcatgtgctcccatgacaacacatcaagactccatgaggctacgggtgaatccatccgtgcacatcagacatacccaagaatagcataggcgaacacaacaagaatgctggcaccccaacaatgccgtgtgacaacattctctcaaaacttctgctacctctacttacctcctcgtcagcagcacacgaggatcatacaccataactgatctgcttcacgagcatggatcatgtgcaacctatcatatgagaggctatcaaggaggaggaccacccatacaccatgaatatatcagagaccgcatcactcatcatacaacactgctacggaccgcatcacggcagcaccatacaacacggtcatatacatatgcactaagtctacctacatgtcagacgacacgttcacacagaacacaagagagcagaatagcaccatatatgagtagagcataccaaccgatacaagcagattcagtactcccagccgacacaaccagtcgcaaacggatagcataacaatcacatatcactcgatcataaagaggacacagtctagaagccccactgaacctcttcgcaagaacaacatacacacacagacagcaatatcacttccacggcgcaaccatagcaaaagacacaaagagcacaccacgaccataacaactacgcagccacaacaagtactaacacaggacgcaacacgcgacattgggacacactaagcatcaaggcagagcaagacacagacaccacatactcacactcacaacggcacaatgagaagacagcgacgaaacaagcagacactagtaccaaatactaatcgacagccacaagctcaatcggcacgtcaagtagagcgtaatatacacagtcggagatagaaacaaagagcaaacaaagcggataatcaacaatcacagaaatggaagacctaaaaagcgagacaacacgaagtcagaagacagaaaacaatacagcacatagtaacacaacaagaggcagacaaaaactaacaccaaacaacacaacgggaagagatgaacacgagagagaacagcagcggccaaacgagagacacagcgcaacaccacacagaaacacgagaaacaaacgaaaacgacaggatcaagcaacaacaagaagaaaaaggagaacaacaaacgagacacacacacagagagagaaacgagaaagagacaaatgagcagaacaaagcgaacggaagacagagagagaatcagaggagcagacgaacgcagacgagacagccagaaacagaactaggcactgacaaaaggagacgaccacaagaaggaaacaaggaggacagacgagcaagacaggacacgaacggacgaaccacagaagaggagcagagaacaagaatagaaagacgaacggcgaagagaacagtcaacgaacaaagaacaaacagtgacggaacgtcaaccacgacacagagcgcatacagaaagcacgcagcagtcaaacgtagactgagaaaaggaacagaccacggaacaaagacacaccaagacagagagcgcgtaaacaaagaaaatagaagagaggagaagcagaaaatgaagagaacacagagg

SEQ ID NO: 696806 - DNA, 197 bp, Homo sapiens
  misc_feature (42)..(42): n is a, c, g, or t
  misc_feature (56)..(56): n is a, c, g, or t
  misc_feature (126)..(126): n is a, c, g, or t
ccctgtcagaggcgttagcccttgatcagcaggtcaggcggnttccgaaaaaggtnttcgaggcgcgatcttgtgcagctcctcgacatctcctggcaccccctgtggttggacctttgaccaccnttctctttttccaggcggtcgaacaggcggtagcgcttgtggggggggttccaaaggggcaatgcgggaac

SEQ ID NO: 696807 - DNA, 161 bp, Homo sapiens
gggccctttttttccccccccccctattttttaaggcccttgggggggggggggttggggccatgcctggggggggtttatggcccctggggctttgtccggtatttggtttaaggtttttggcctaatcttccaccaataaaattggggggtttttccta

SEQ ID NO: 696808 - DNA, 116 bp, Homo sapiens
ggcaccagtcagatatgcagctccagcagtcagcagcagcagcagatctctcagcaaccttacccccgcagccgccgcatccattttcacagcaacagcagcaggagcagcaagcc

SEQ ID NO: 696809 - DNA, 172 bp, Homo sapiens
gtactcaggaagcgcgtcaagaagcaattttccctgaaaatgaggtctgtgaccgccggcgacacgggtgtatatttctgtgcgagaggcttaccccggggcaaatattgattttttagagtggcccctattgactcctggtggccagtggaacccactgtcacctgtctcc

SEQ ID NO: 696810 - DNA, 230 bp, Homo sapiens
gcgtccgtcgactgatactctcccaggcgagcttgcagtgagccgatgagctagatcacgccactgtactccagcctgggagacagactccgtatcaaaaaaaaaaaaaaaaaaaaaagatgtgtttgggacaattatttttaatagatttggtcaagtttatatttttatgttttcaattccttttaagcccgaaaattttcggtgtaaaattggtcactttttgggtg

SEQ ID NO: 696811 - DNA, 175 bp, Homo sapiens
  misc_feature (166)..(166): n is a, c, g, or t
cttttgcccatataaatgctgatatttactggaaacctatccagcttcacgattatgactaaagtaccagaattataatgccagaatataatgtgtcaggccactcgttggagtgtctctgcactaagttttgtctctatcaaataactatactttgtatcattanagaacattt

SEQ ID NO: 696812 - DNA, 565 bp, Homo sapiens
cacgaggcgtttaaaccctgcttcacttggtgtgtatgtgaaggtgctttgaaatcaagtgctctgcaaactggagagaattactgcttgtattccgtgaaactacaagctcccaattccactcatttaatccctctcttgctctgttgcccaggctggaatgcagtggcatgatctcaactcactgcaacctctgcctccctggtttcaagcaattctcctgcctcagcctcccgagtggctgggactataagtgtgcgccactatgcctggctaatttttttgtatttttggtagagatggggtttcaccgtggtggccaggctggtctcgaactcctaacctcaagtgatctgcccgcctcggccttccaaagtgctgggattacaggcatgagccaccatgccaagcccttcccccctatctttaatgaaggtctaccatgtgcctgacacaggggatacccacccccacttctatgggattcaggcctggtttccagcttggccttcaggcttttcccaccacacccaaattgctgtccctgggcttgttggaggtgggg

SEQ ID NO: 696813 - DNA, 247 bp, Homo sapiens
tgggctataagtgtggcatatagaggtggccaggctggtctcgaatctatgcgcaaagtgctgggattacaggcatgagccaccatgccaagcccttcccccctatctttaatgaaggtctaccatgtgcctgacacaggggatacccacccccacttctatgggattcaggcctggtttccagcttggccttcaggcttttcccaccacacccaaattgctgtccctgggcttgttggaggtgggg

SEQ ID NO: 696814 - DNA, 348 bp, Homo sapiens
cagagtccaaacagtgcctgggagcttttaacataaggctaagcaaaagaaaatacacagccaggcacggtggctcatgcctgtaatctcagcactttgggaggccaaggcaggtggatcacttgaggtcaggagttcgagaccagcctggccaacacggtgaaaactcgtctctactaaaaacataaaattagccaggtgtggtggtgggcacctgtaatcccagctacctgggaggctgaggcaggaaaactgcttgcatcctggaggtggaggttacagtgagtcgaaatcatgccattgcactccagcctgggtgacaaagcgagactctgtctcaaataaata

SEQ ID NO: 696815 - DNA, 414 bp, Homo sapiens
ccgctaatatgtgaagcctggcaatcagaaaccgcagacttgaacccccctgaccgctaccgataggttctgtgagtcaacgacctacacatgggtcaaatagagcttctatttgcacactcgagatctatatatgtgtgatgcaaagacatctctcaactgttccccatgtgagcattctcattattgcataagcgggtctgcctcttcggccacagcccattcatatggcaccgacattgaaggctagaatgaccggtctgcgccactccgaacattctgccagtagtccatcagccctatgttctaacgcagggtctggtgggaatgaccactcctctatctcacctcccagagtttctctaaaggtgcccgtatgggtcagctttaagaaaacctcccgtatgaggttct

SEQ ID NO: 696816 - DNA, 328 bp, Homo sapiens
gcagacagggcagcagcgccgagtgaagagggagagacagggattgttgtttaatgctggatccaagcatagaggaagtcaatatggctcttctcccaagaataagtaggtatgatctgtccagaagggacctagagtagccaatgacccaacagacattgcttcccctcttcacccgtcccaccccgaaagaagtccccaagaattcaacaggggatcttggaagaggagagcaattttctgtgagtgtgaaactggagagaagcaagggtgttcaagtgtaaatcccctggccgggcgcggtggctcacgccgtcccaaagcacag

SEQ ID NO: 696817 - DNA, 481 bp, Homo sapiens
  misc_feature (6)..(6): n is a, c, g, or t
  misc_feature (9)..(9): n is a, c, g, or t
atgttngantgtgttttccccccacggacagcgcgctttggttttgccctggtgccccctgggaacccccagttgaggaaaaaggtgttttaaaaggacttcggccccataaacccggagggcccctgccccccgtgccaaaagcccaaccgcgccttcctgcccgcctttttgcccagtgacaacacggccgcgttgcccccccccccggtccccaacattgcctaccagttgcagttcattagccccgtccgccccagcattgtggagaagcgcttccccggcctttgggggggatttcatggggcccatgtacgggggtccccccctctgtcccccctgggcccctgcccctttggcccctgtgggaatccccctggggtgccccggccttgggaaagggaggggggaaggaagggagggggggggtggaaaaaactgaaggattccttttttaaaggtttttttttttgttccttta

SEQ ID NO: 696818 - DNA, 162 bp, Homo sapiens
aaatatttttcatagtggtaaaatttacaatacttggctgggcgtggtgctcacgctggtaatccctgcaatttggcagatcgacgcacgcgcactgcttgagatcaggacttcgcgaccagcctgggtaacaccgcaagacctcatcttcaaccaccacaa

SEQ ID NO: 696819 - DNA, 108 bp, Homo sapiens
gtaaggatctggcgttgccatgagctgtggtgtaggtcgcagacatggctcggatcccgcgttgctgtggctctggtgtaggctggcagctacagccgcttttgtgtt

SEQ ID NO: 696820 - DNA, 873 bp, Homo sapiens
  misc_feature (329)..(329): n is a, c, g, or t
agcggagtctctgacagccgcggcgccgcggagcttctcctctcctcacgaccgacgagcagtcattatggcgaaccttggctgcatgtgatgctgcgttcgtctttgtggaccaacataggatgtgacctgggcctcgtgcaatgaagcgcccgaagcctggagagatgggaacactgtggcggcagccagaatacccggggcacgggcacgccctggaggacaaccgataaccaacctcagggcggtggttggcctggagggcacgcctcatgaggtggtggcatgtgagggcagcactcattggatggatggactggcgggcagancccattgggtggtggcctgggagacagccgtcatgtgtggatgaggctagggtgtcaagcgagagtgagtactgcagagatcacgttggaagcggaagcctgatgtaagccgaataaaccgaactatgaatgcaatcatggtcatggtagctgcagtcgagcttggggctattggtgtggggggccattgagcgtgctacggtgctgggaagtgcccatgagcaggcccttcatacattctcggcagtgactatgaggaccgtgactatcggtgaaagacatgcaccgtgtacacccaagcaagtagttctacaggccctagtggtatgagatacagctaaccaggaacagacctgttgtgcacgaattggcgtcaattatcacaagtgcagaggcagccacacggtgcaccataaagcaaccagggggggaagacctttcacccgagaaccgagcgttccagcatgattggagccgcgttggttggagccagattgtgtatcacccaagtaccgagcaggggaatctccaggcgtattgaaca

SEQ ID NO: 696821 - DNA, 172 bp, Homo sapiens
  misc_feature (156)..(156): n is a, c, g, or t
agcactctagacgatcgcgttaagacacaggtgagggcatggccgagatggagttcaccgaggctgagagcaacatgaacgacctcgcttctgagtatcagcagtaccaggatgccaccgaaaaagaggaggaggatttcggtgaggaggccgaangaggaggcctaaggca

SEQ ID NO: 696822 - DNA, 340 bp, Homo sapiens
  misc_feature (3)..(3): n is a, c, g, or t
  misc_feature (26)..(26): n is a, c, g, or t
  misc_feature (43)..(43): n is a, c, g, or t
  misc_feature (183)..(183): n is a, c, g, or t
  misc_feature (249)..(249): n is a, c, g, or t
  misc_feature (251)..(251): n is a, c, g, or t
  misc_feature (286)..(286): n is a, c, g, or t
  misc_feature (292)..(292): n is a, c, g, or t
  misc_feature (315)..(315): n is a, c, g, or t
ganttcggcacgagccaccctctccntgcccccaaggaccgangtcctcctcgaaatcttgcaccgggagtttgcactcctgacccactcatcttacctccagcttgtccccacctccccgtcccagctttcccggccccacagccgactctaagcgggcatgccccggtttttttgctcgtnactcgaggggccccaggtttgccccggtaccaggaccctattaggctttcagggttcccgtgtctntnttcttcagtccctggccctgcgcgcctgtaatgtnagccanttggactagacatccgttccagngtggttctgctgttggcaaaacttc

SEQ ID NO: 696823 - DNA, 786 bp, Homo sapiens
atatcggtatgagtaaaaaaagtcaaacttggagaaacttggatttcaataagtaatgacaatgcttaggttagtatattgtaatttgaatcatttacatctaatgagaatgttagttgagaatgtttatctttaaagttggtatatcctataaataacggaatgaaaaaaaaggtctgtacaatgtgaaacaacaaatgatgcaagaattcctatttacgttttatatgtaccataaaagtaagttgttagtgcttacctaataaatctggaatggttatttaatgaacattattgagatgggtgatgtgtttcaaaaagatacttgctattttgttgaagaaataaggatttccagtcattaaacaaaaacttaaacaatcttattagatgggtgactgtgttttcaaaggatacttgctatttgtttgaagaaataaggaatttccagttcagttaaacaataactaaagcaatcaagatgttctatattaggaatctcaagatatgggtttgtttaaaaaacctttttaacagtctgtgatgtccaacggagttatgacgtatcggcttttacagaatgtgtttgttgtcatatattctggggcgtttaagaaattttaactcatcaaagtgaagattagaataaatttcagaaaatgtagaataggtatggattcttgtcctgtattagaatctcagtggagtttttggaaaactaatatggattctctgattataattcttaaatttagatttcattgggtacattttattatggtccaa

SEQ ID NO: 696824 - DNA, 140 bp, Homo sapiens
attagtggactgtcatgtggttaatcttttaagaccaattcattaactgtgtactgatactgatgctatagaaccttctaaaactaggatgctgcctggggggtttttagactaggtgctattgaaacttctaaaactag

SEQ ID NO: 696825 - DNA, 256 bp, Homo sapiens
taatctgtactcattgcgggagtacaggaagaaacagagaccccttaagatccgtatgctgtatgggactgtgaagacgatcatagtgtatgactctaatactgtcactgacatgctcatgaccatctgtgcccgttttggcatcaccaatcatgatgaatattcattggttcgagagctgatcgaccagaaaaaggaggatataacagggaccttaagaccggacaagaccttgctgcgcaatgagtacagatta

SEQ ID NO: 696826 - DNA, 141 bp, Homo sapiens
tgtctaggtctaccttgttctcagaataaagaaggaaaaggaagaggcggctaaaaaacggcaagaagaacaagagagaaagttaaaggaacaatgggaagaacagcagacaaggtagagccgagacaaggtagagccgag

SEQ ID NO: 696827 - DNA, 107 bp, Homo sapiens
cccccccccccccccccccccccaatttcccggttttcccccgcccccggggccttttttggccccctggtgggtttttttaaaaaaaatttggtggtttgttccca

SEQ ID NO: 696828 - DNA, 187 bp, Homo sapiens
attcgcggccgtgtcgacagttttgtggttaatagcaaattcttcctgaatttaaatcctggctctgccacttatctatgtgatcttgggcttgatatttactcactttatacctaagttcctcgtatatgaatcataggtgataataattagttcctacttcataggattgttgagaggattacat

SEQ ID NO: 696829 - DNA, 244 bp, Homo sapiens
gtgtggtgagccaacgattgtgtcattgcattccagcctggacaacaagagcaaaactccatctcaaaaaaaaaaaattctatattggatttcaagcctcaaataacttcggtaataatgactacccatctgcaagagtccttgcttggtgatcactgttacactctgtggtatggagaatgctctaagtcatatgttcaccaacatgctgtggccctttagcttttcccagcttgctccagag

SEQ ID NO: 696830 - DNA, 835 bp, Homo sapiens
  misc_feature (41)..(41): n is a, c, g, or t
  misc_feature (70)..(70): n is a, c, g, or t
  misc_feature (423)..(423): n is a, c, g, or t
  misc_feature (461)..(461): n is a, c, g, or t
ggacattttaaaatgagcctagtgaacatgatgaaataaanttatctgtataatgaaaacaatatggganatatcagcgcttgacattttcctctctggtgggaaacatccagatgactgcccagatctagtgattgtgccctggaggtggatcaggaagtgtgtgtcttagtgataagtctcaggtcttagtagtcaactgtccaaattcaggtcactcttggctactttctacaagtagctttctgcctactcttccaggagaccatgccttcagttaggtgatctgacagaggagcctagatagctatagcctacacattcgggcctaaacgtcggttctagacattcaagagcatggattccctctgactcacttgtgtaaaggctcatgcctctgctgctgctgaggtgcactttgantttggagctatttgacgacatccccaaatccctactcnaaaatgcaaaatagcattaatatactgtaaaagattaacttatgtgtaaattaggagttaatgaaaatgctttctcttcattttgagttcttttcaaggagcccaaatgaatcttgcttttggaatagcgtgtctgttacaagtgttgatttcccaagtgggtgtgattaaaacagtgaatgatgataggaagtatttacagaactttatagttagtaactgactggttaaatttttcaaactgatttttactcaactgaattagaaaaggactagaaagaaagtaaagatcgcaacgattgagggaacaagtggacaccaaggacttgtctaaatgtttttattagactaatggggttctagttcttagaggg

SEQ ID NO: 696831 - DNA, 108 bp, Homo sapiens
agaaaataaaaaatcgctacttccctgcctttgaaaaagtcttaaagagccatgggacaaggactaccttgttggtcaacaagctgagccgggtctgtacattcatcg

SEQ ID NO: 696832 - DNA, 984 bp, Homo sapiens
tccaaactatcttccctcctcccccacctccctgctgtcacctgtacatgcaggtcttcttcagggaacaccagcgattcagttccttgtcatcagctgaaaggatctgcatgaggaggaagatacctactgtgtggtcctggggctgcctctgagcctcagtgactcagcaggggtggcaagagggcgggggacaactgagttggtgttttgatattgaggcagggttgtttgaatgtctacctgtagctcaggctatcttggaattcccagcagtcccctcctacctcagcctctagtgctggcctccattaacagtttcagctgttagtgacagagacagcaccgaactccagatctccctgtctgacctcttcacagagggtgttcacctcctccagtcccttgcccctccctcaattttccctgccggcctggtcccaacctcctctgtgctgagcccgaagtcgcagggcaccacagtgcggtacttgaaacgacagggcaggtcgtcgataatgtcctcgtagtccagacggtagtactcatctaggtactcctcaaaggtcttgtcccctgcacaggagatgcacagcgggtagtatgtgttcaaagccccatgaggcacactgcccatcatgccatgcacctcaccagggtaccacacatgggctttcgtcctgcccaatgaggtggtcaatgggagactggtggcttctcctgcctgagggtggggggctccccggaagctatcttcacgtggttggctgggggccaatcgcttgcgtccaacactcagaagagccaggtcagaaccaagcccggtctaaagctttggagatccagaccacacagggagcgtgtcacaggcataacacatggtggctaatggcctgggccaggcttgaatttccgaaacttgttgaggcattaacacacaaggtcagtaaaggtccaagcctggccgcctttggtcccgtcatg

SEQ ID NO: 696833 - DNA, 165 bp, Homo sapiens
atgatctcgaggatccccagattattagtactgttgatacgtagaatgatggctagggtgaattatatgagattgtttgggctactgctcgcgggtgcgccgatcagagtcgtagatttgaagtttgatgctcagccctgatcagaggattgagtaaacggctag

SEQ ID NO: 696834 - DNA, 263 bp, Homo sapiens
accgaatctactctcactttactcctaaatccacattctacccttaactttcataaccggggtcagagggttgtggaatacaaaatataccccatttcttcccacctcatgggctacaccttgacctaccgtctttacgtgggtacttgcgcttactttgtaaccttcatcagggtttgctgaagatggcggtctataggctgaccaacaggtggtgaggttgatccgggtttatcgattacagaacaggctcctatacaggg

SEQ ID NO: 696835 - DNA, 362 bp, Homo sapiens
cagtcggacgctctccctatggtctcctagtctacgcttacagatatgcagttgattttttaaaacgcttaactaggaatctttctgaatacttgtcctattttgaaactacctgtctggtgggggtttggtttagttttcttttttttaatgtcagaggaatctatccatgtgaatcgaaaggcacaggaatctaggaactctgaggaatttattgtgaaggcattttgttcagggggttgcacagcagcaagcaacagtgtcaagtttggacagcaaggcatgtgcggtggtggcgcagtgctgcgggctatggcacaggtgcacttggcttttcagttaggatcacagtcagggcagca

SEQ ID NO: 696836 - DNA, 129 bp, Homo sapiens
acgcaggacttcgtgcgtcacttatgaactagttactccccactttagtccaaaatagtgagctttcaacgcttagtgccagcgtacttacagcaactacgctcaacagctacttgtactaggcacttt

SEQ ID NO: 696837 - DNA, 923 bp, Homo sapiens
taatacttctgcgagactcccagggtccacttccgaatcgtgcagatggagtggccaatgttgagcagcattctgaaaattgcgatcatctaactgatagagtggtatgagctttgtaaaataagtacatggttctcttatgtatattgttttaggtaccaggatgcaaatcagtctagaagatacgtccacatcatctatttttcaaccaggaaggattcttatagaggcaaaatctagttctccatgatagacctctcgtcctgtgggtgctatatgaactgttcatccgtggcaatcttggcttgagagacttatctatactatatccttactgctcgaccgtgtgcccttctgttctatactgtacgtaatcttgcagatatggtgaatgcattgagctggaagctccttttctccacactctctcaacaccactcctcaccgttatctggtaaccccaattgtagagaataaaagatcttatacgccagaatttgagcattaactcccttatttgccccggagtgagattgagtgcgctcagtgggattaccgcagcttttgaaggcaggctctcacacggggaacaatgctgtggcaattctaaataagttttgatcacttgggggaattgagttcgcatgattagaagtatggccaatcagcagagcggggtactaagccgatcggaatcaccggttcctggaagtagcgttaggaagggatggtggctgaggcaaaatcttacggtggaacgaatcccgttctgctgcaacccgggttgtccaacggtgcgcgttccaactcttttggcggttttacatgtagcgcccgcaaaaaaagaatggccccaaaattaacttgcggcccgacaaagttggcgagggtcaacaaggcccaatgtagtagaccccccatct

SEQ ID NO: 696838 - DNA, 1082 bp, Homo sapiens
  misc_feature (559)..(559): n is a, c, g, or t
gaagttacaagtgaatcgcataagactgctctgaaaggctctcttgggatctgctagatctattcggacgcatggaacggcattacgtgcacatatcagcaccgaagatgaaaaggattgcgcgctattgagcatcacgtaaccaggaagacattcatgactcgtctagtctcttgcatgggtactactgtggttgagatgctatgtctagccatttgtgtcatcctaatttcctgtctcgcttgaatagtggctgagaattgctcgcgagaattcgtgcgactggctaacctcgggaggagatcccaattatctttacgtgctctctaggcacgggtggtagctcaccctaaaataagctttgctaggtggtcgactaggcgccataggggtagtcgtgtgcatcgttaggaaggctagtagtgcgctccatttgcgccatcgttaccccggattccgatgcaaacgaaccagtaatgtatgggggtacccagacattcgaagaaccgggttaacacacatcccacgaggtatacactaaactattgtcataggtagntgtcctttgaattttcgagtactattacgaggggcctccgaaaattgttgggatggagagagagggctttaacaaaaaagttcgcgaaggagaacaccattaacaggggtaggttggtcaaacttaggttcgctaaacatataggattaaattttaatttcaacaaaaaattcttttaaaaattggttttttatgccaaaggggtgacatgattcgttggcactggaacatggcgtgcatttttggacatgaggacaatggggaacgaaggtgtacagcgttgggttgtcacgatagttgtacatggggcctctacggctggagggaactaaaaaaccgtgctttcctcttatgtcgcgtgttaacccaatgaaggcacggttttggaaaaacgggcttgtgcaaagtgacttattaccttgcaagacttatacgctggcgctttcgctccctttagtccctaacagggtacgaagtccacgaaggtcgtaagtttcctgaggccacttccgggcaacgggac

SEQ ID NO: 696839 - DNA, 830 bp, Homo sapiens
ggtcagaatgaatactgatgctcatgcaaattctagactgtcgatgttccagaatatgtcgatgttattctgaagggtggccacagatcctcgtagaagtggccccacgtaggcaatccctgcgtgaggtgatcttcaatcatcaatctagtgtataatcatcaagcacattcgttgtgacaacgtagaaaacacaacacgcatgagcatcccgaggatatgaacgaataatgagtgagagagtaagcaagaagaggaatcatggactactcgttcaggaacataatttggttatatcaatgtacaagaaccagttgagtcattggggtgctacatctcgtgggcttccagttgcaagagcaatgaagtgtctggtaggtactagacgttaactataccactcgatctaagcgtttcgattgagtccctggcgaagaaatttgggcgctcgtcatatggtatttgagacatctcggcacaaagttgtcatatgcgagtgcataggacatattaacagtctcgtgaggaggttgtcagtgcactgaagcaacccaagggtgctttgcctttgttgcaacgatatctcctatgaggccccattgacaatggatctcgaaaggttataggtcctatctgacaagcgtatagagtgagctaatttggacgtctttgggtttccccaatagtttgcgagccgagggcttttatgaatttcgaggcgaatagcctcaaaaacccacgcgtttaaatgcgaccggtgcgaattattcaggcgacaccttgttcaagcggattgggtaattctaattgtccatcctggaccatgaacg

SEQ ID NO: 696840 - DNA, 311 bp, Homo sapiens
agatttctccttcacatgcagggaccccttcacttcgtgtaccatgagtggaagcagcctgaggcactcaccagatgcccagtcctccagccagcagagtcatgagccaaataaacttttttttttttttttttttttttttttttttttttttttttttttttttaaaacccccccctaaagggggggggccctcaaaaatttgggccccccctttttaaaagggcctttttgggggggggtttttcaacccaaggggggggaggaaaatttttggccccccccccaaatttaaaaaacggggttttttt

SEQ ID NO: 696841 - DNA, 273 bp, Homo sapiens
attcctagaggtacccccttagactctaaatattcgcgatagtgtgctgagttattggtatggaatcattttcttagatgactgaaattttcgcgcagtgtgtgctgagttatttgtatggaatcattttcttagatcatgaaattttcggagtgtgtgctgagttattagtatggaatcatttacttagatcatgaaattttcggagtgtgtgctgagttatctgtatggcatcattttcttagatcatcaaattttcggagtgtgtgctgc

SEQ ID NO: 696842 - DNA, 870 bp, Homo sapiens
tggtgactgccatttggtcccctgatatagctgacctggctttttgaggtatcagtggagcgaagacgctcacccattccctaatgtcagacaaacataatttgctgacatgtctcttcaactcttttgctgcatggctcttttctgtcattcaggtggaatgtttgtgagtctctttcccatccatcttgtcggtcagctggttagtctcctgcattatgtcccttctctactcactgtactgctttgaatatcgttggttcaactacaactggacattgaaatgcaccagcggcttgtctaacatagcaaacggaacttggccttactactttcgggttctggttttgccccttggcttttcctcaacagcaaatgcagctcctcaatatattatcagctggcctgcctttattctcttatccttcttatcccttctattccatctatcaagctgcccaacttgaagcaaaagacccccttggccaaaatggcgtaatcatcgttcccatgctatgccgccctcgtttcttcccttgaggctgggtcctttccttaacgccaaccaatgagcttctttcccatcaaatggaccatgatcttaacccgttgtcgatgctctgtgcccctcttgcacgcaagtgccttccttcccttctccttgccaagcacggaaaggttatccccctatttccaaccccttgcaaattccccgcttccggcccttttgctccaaagactctttgaaacacttgccttaacccttgccaacgggttccaacgctctgaccggttctcgcccccttttacccatttcccccaaaaccggcgcggacttgttgaccgctgcaaattctgggacaacgcacg

SEQ ID NO: 696843 - DNA, 228 bp, Homo sapiens
ggagagggggtctcaaaatcggtgagaaagtttagggtcaaggtggtttccatgagaaaagtactggatttaaaaaactaataagctataaaacggccacacgcaaaaaaatgaaaaccaaaggggtccacaaaagatgctccttgccttctgaaggtttgacgatggcatggtgatcattaaccagtcttttgactacataaacttagaagggcgcaagttgaaaca

SEQ ID NO: 696844 - DNA, 148 bp, Homo sapiens
tagcgagccaatgaggtgtgcagcaaacaaaagctgtcactaaaaacaagtcaacaggccattatgagtatgagcccagcacgaaagcaccagcacggattcccttagcaccagcacgaattcccttagcaccagcacgaattccctt

SEQ ID NO: 696845 - DNA, 113 bp, Homo sapiens
ccggtacatctccgcttctcagcgaagtgaagtgttgtgatgatgcaatctaccgcggtagacggaaagacccatgaactttactgtagctttgattggactttgaatcgatc

SEQ ID NO: 696846 - DNA, 706 bp, Homo sapiens
gcaaagagtgcaaatgcacctccggcaacaaaagtaagtgggatcctctctttcctctaccccgttccctgtgctccaggctgtcccctctccaccacatcctcaggggaagtcaaagcaggctggggatgccccatgtgcgcggaaatagtcgcctcctcagatgatcctttatcagggagagccaggaatccgttaattccgctggtgtcgctaagtcaccgtcatactctggccggcatccatgtactagcccaccaggcttgctgctctctgctgccccgtgggggcttgtgccaaagctgtgcaccaagggctgcatctgccgaaaggggcagtctggacaaggtgcagttgtgctgctgccatgatgctggcgacagtcccggtcccagactgtagaagaatcgcgacgttcgcacaaaagccttggattgtgcataattgtacaagcccgtgagacggtgaccggttggcgtactattgcgcttatatccttagtggagattacatggtggaaggtgagtaagttaaccacgaaggcgttggaccttggacaagacagcgaaagggcacacccatgaaaagcaccaaagaaagcgggggccgcccgcgcatcgacgagagagcatccccggcagaggggcgccccacagtcacaggggtgaccccggattagggtcacgcagagggcggcgcacacagc

SEQ ID NO: 696847 - DNA, 345 bp, Homo sapiens
aactacatccatccttccacctgacccccaaccatgaacaggtctatgaaaaatgtcagtctatttccaaaggaggagaaacagccagaatgacacgcctccaaaatgcttgttgtataccggagaacaatgagattttacacgtttgttcttccctgatgcttgggctgcttcagaattaactgggattgaaaatcagactttgcaatagcaccataggggctccgagtattcgacatgtgtggtgtgaccggctggcgtgatgtgaagtgctgtgtacaacagtgctgcagcagctatgtcattactgattccaaagctgtacacgcaatacagtcagggttc

SEQ ID NO: 696848 - DNA, 1824 bp, Homo sapiens
  misc_feature (1237)..(1237): n is a, c, g, or t
  misc_feature (1303)..(1303): n is a, c, g, or t
  misc_feature (1753)..(1753): n is a, c, g, or t
cgcatgagagcattgagccagtaatgcctgtaatccggcgcatagcttccgtattctaaacgccatagttcgtctccccttcctctcatactcagtcgcaagctagagttcacacctcgagcaaacactccctagggctacaacgtaacacacatccttacataacgtcacttcgtcaactgccccaatgacacttattctaaatcatactcgtgactccaatcaagatcatataactcctagtaccatagacttctgagcagcgaatttaggcgtctaatcattgaagcttaagatgtactcaccccttacatatataatccggggatctgtcccaccctgtaatagtagcgtcgctctttacacacgcgcgcaatttgatacgaaaagactcacacgccatttccgtcgtagcgtgcttctaactcatgctcaccttctgcctccggctaagcttacccttcgtctaacgaacacttacgtggccgaagtatgaatgggaatgacgtacacgtgaacggcacgtgcagacacacgtgcaattgtacatcaagagtcctccaccctgacagcacacataataacaagcaattgaggacacttatacacttcatctaccgttgtgtgttgaacgtacttttccccgtatatggacgcgcttcaaataacacatgtaacttatcactccaagtcttaatcaccaaaccatcatattggcccccagtgacttgaatcatataccaactcagtaacctccttataaagaggtccgggctaatcttcaattatggtagaatcttaaactttcacttattcaaaaagatcctatagactccaaacaatattattggcacacagatcgcgcttcacgtgtacaccccaatgagacccaccctaacgttcagaccttcaccaaaaagcccccccccctctttttaaaccgggcgttttcggactcccggcgggctgccccaatgatacctactatccattagccaatttgataacttctgagacctcaccttgtggcaatcaatttccttccattccccccttaccgatttccatcatgaacttttgcctttggagctttaaggccaaatataattaaccataaaactttaaacggaaagaacggcgggcatacccaccatggatccggaccttccaattatattcccctgattcaccccagggggaggttgcgaaagagatgtcttaacactacgtcaacttntaattcaagcatattcttagagattaggaccggtattttaagaccgagagggcactccgcgtgtanaaaccgtttcaggccactgattagaccacgaccccagtgattagtataggagcccctacgatgggagggagagaaaaaaccctcccaccttggtaggggtcagaggtgtaaacccaccggtttcgctggcgagggaacacgaagagcacacagaattcgagcccacaataatgaacgcgagaagggcagaacagcgataatatagtgattacacaaggccggtgaattaattccaccggcttacgacatatttttgtgtgcagcacagcacaccaagtgtggtgttgacgtatatagcgcaccacactcatattaagtcacacgtaagaagacgtctcattgacagggagaagaacaccgcacgattgttgaacatacaaataagcacgcaaagtctcagatgaagcagaacccgaacatagaaagggagggtcactgcttgacagaacnagagaagcgccgccagaacacgacagcgagaagcaagaaccacgtgtgacgaaggaaggcagacgaagagg

SEQ ID NO: 696849 - DNA, 356 bp, Homo sapiens
aactacatccatccttccacctgacccccaaccatgaacaggtctatgaaaaatgtcagtctatttccaaaggaggagaaacagccagaatgacacgcctccaaaatgcttgttgtataccggagaacaatgagattttacacgtttgttcttccctgatgcttgggctgcttcagaattaactgggattgaaaatcagactttgcaatagcaccatgattgcccagagaattccactgtgggtgtgccctgctgaaatgaggtggctgctgtatccaacatgcacagcaccactgcccttcctgcttccaaactgttcaagcactttatctgcacctccctctctcctactcctg

SEQ ID NO: 696850 - DNA, 134 bp, Homo sapiens
cctcaaggattgttgcgaactcaagctcgaaggtacgccgcagatacgccggagtgaaaatcatcctcgacgtgacatcaacaaggacagccgggcggagaccacgcttgcgggattcgggatcaacaccaagc

SEQ ID NO: 696851 - DNA, 1089 bp, Homo sapiens
  misc_feature (673)..(673): n is a, c, g, or t
gccgagctcgggcagcagcgcagcgggccgggccacctgctggtgccctggaggctgctgacgccccggacggctgcctcgggcccatcgcggaacgacgggggcgagatgctgagccactcctctggctgctcgctgcgtggttctccttgttccatggaaggaagcggttggagttggatgacgacttagataccgagcggtcgccgtccgagaaagggagctcggcagtgggcccctagtgccagactgctccgcccttgcctgttgccccgtgagctcgcaccgtagctgcttccagatcggtgctaatctgcttgtggccatctgcacgtcccagtcattgtggcccttatgtctctccatggaagcgccgaggagggcgggcgggcctaccaaggcccatgcaacttgcccgtacaggctactgcaggtatacgctgctgaaggtgtaccgcctgtccgaggaagcccgtggcacgtgcgaggagccgctacgtcgcggatgcgccccggcacaagacatgtgtgctcggcccacttgaggtcctgggctggtacccagtctcctctacgcctttttcactcgggacccatggggacatgcacagactggtgcgaagccgtcacgtatccctgaacctgaggctgccgtgctcttccgacagatggncaccggccctggcgcactggtcacatgcacggtctgggtcctgcgtggatctcaagcctggtgttgctttgtcttcgctgaacgtgagaggaagaagctggtgctggagaaccgggggggaacctgggtgtgaccttggggcccgaatgaatttccctggggggcacacgccacgcgttgccccaggccaaacgtgtgagcccggggagaatcacgggccggcggggcgccataattcgcgcacaggggagcccaagtttggtgagccggggagggaggggccgcttacccaggagtgacgggcgacacacacgttacagagacatgaagactgaactggattgcgagatcacccggggggcatcacgcttagtgaggcctcggcaccaccaggatgatagtggcaccactcgagc

SEQ ID NO: 696852 - DNA, 428 bp, Homo sapiens
tcaaactaagaagcaaacgggttaatttataatacggggggccaggccgggggctcgtgccagggtgacatagggcatgtgggaccatgaggggagagaggctcagctctcgaggccaagatacagtgaagagggagggagcagcggggcctcaccgcgggtccatagatccgtggagggcccccgagggtataagtggcgtgacgaggtctcgcgggtgggggaagtgcgcgtgagggtgtggagggccacacaacagagcggctccttattgcgggggaaaagagaggccagcgagaggattaacggaggaaccacaatctcgcgtggcgtgggaaaataagagccttcgaggccaacccgaggtgaagtggaaagagaggggtggggtccggtgctcgtggggagggcctccacattgggggcgc

SEQ ID NO: 696853 - DNA, 864 bp, Homo sapiens
taacgggtgtgggttggtttgtttgcaaaatggccaaaaaaaaaaaaaccggtttccccgagcagctgccctgaaagtaggggtggcggcggaggcgctgagttttatacatttagttcagaacctactgggtggcattaaactgtttgaatgcaaactcgatttcagattgaacttcgtaagggagttaacgagggctgagtccagcaaattgctaaagtgttaatttcaaattatgcaaatttgggtactgcagttggttatgcaatattatattcaccaacccagtatcacaaaaactcatagaagatatcatgtaggcccgtgggcttggggggggtcccaaacttggtatgcagaaatgtgacgggttacagggtcagtacaacctcagtccttagaaccccttccacatttcagctctgaacccacttttcctgtcatttattatataggactgtagttatattaagttcgaaagccttccgaagctaaattatatctttcttggtaccttctttctaaaattaccaaagattttacacaagggtaaatcatgtcctcgtgttaatgcttatctgatgaagccaaatatcctctaaatggtggatcaaaggaggcaaaagaaatttagaggccattgacaaggcgataggtatggcaacctggagcaaaggagaacactggctcctttcctctggtaaactttacaaaagaccagagttagacttcatggaaccaaagtttggtaccttatacttaagtaggtttttgacccattatactatatggggttacccctctacgaagaaccaaagatctattctcttgaagaggataaagggggccaatggacaattacat

SEQ ID NO: 696854 - DNA, 126 bp, Homo sapiens
ctctacaggatcctttcccgactagcccgacagccagaacgtcgttagctcaagcgatcctcccacctcagcctggccaacatggcgaaaccctgtctttactaaaaatacaacaattagtcgggg

SEQ ID NO: 696855 - DNA, 780 bp, Homo sapiens
  misc_feature (70)..(70): n is a, c, g, or t
  misc_feature (77)..(77): n is a, c, g, or t
  misc_feature (105)..(105): n is a, c, g, or t
  misc_feature (168)..(168): n is a, c, g, or t
  misc_feature (284)..(284): n is a, c, g, or t
  misc_feature (780)..(780): n is a, c, g, or t
cgcagcacacgggacacaactcgtcgtgatccgcccgtagaatgcccctttatctggttggagctttccnttccttnccggatttgcaaagaaatgtctttttgngtgacttgtgttgtacctgtagaaattaggattttactttatggtttaaaaaaggcaggagancccttgtcgcttttcttacctaatcacgagtttgtgtagtgatttaaaagaaaaaaaattgttataagtttggagcaagggagtatgtgtttcaaaggaatctccttccttttttngtgtgtttttcctttgtcccaatggggaacctaaatctgttttaatgcacagacacatggacaaaaagtcatttgtatctgccaagtgtggtaccttccttgtttattgctattaaactgtttgagaggaaaaaaaaaaaaaaaaaaaaaaaaaaaaaacttgtggggggtttgggcctggaaaaagtttccaaaacacccattgcgtgttgggggcgcggcgggcgccccagggagtggtacgtggaccaccgttgggcaataagcggtgggccccaaagaagagacgactcggggggcagggggcacaacgtgcgtggggtttctttcccccaatataaaaaaaagccgcgcggggggcaacaaccgagaggcgtctcctgagacacaaactccaaagaagggagcgtctgagggggcacataccggggtctcaccaaacaggaggcgccaggcgaaggcgggattatcaaattaacgcccgagccgtgggagn

SEQ ID NO: 696856 - DNA, 523 bp, Homo sapiens
  misc_feature (1)..(1): n is a, c, g, or t
ngtttgttcattcattcaacaaatatgccaggcactaaataggcatagagtcatgatgggcaacatatagtccttgccctcattgagcttatagcctggttagggaaaaaaatatcacacacacacacacacacacacacacacacacacacacacactctattggaatatatgtatatatattcaattttttatgttatcaggaaaacagtagagtgctgtgaaatagcattagaagagaattagggagctatgtttacacgtatcactagaataatcacatttaaaaaaaacggaatgcgtgcatggtggtttgggagtccaggtctaacaatctaagagatgaggcagcatgggagaaacagagaaaatgtcctacctggttaggagaccaggatcctcatcctagctccatcaaaaactgcagaggttttcctcatcagcaaagaggtaataggtgtctttcattatttctccagggttataatgaaaatcaaatgatcacatacacctggattcacat

SEQ ID NO: 696857 - DNA, 104 bp, Homo sapiens
tatatagtgttaactaaaaacacaaaaaattaatggagtagtggaagtgctagaatacagccactcgggaggctgaggcaggagaaccgcttgaagccgggagg

SEQ ID NO: 696858 - DNA, 457 bp, Homo sapiens
gagcggtttagcatgtcactcataggttacgggtccttatggtgcacattttttttaatctgtgtcattccagtagaagagataccatttgacattttacagatggctgtatgcaaactcttaaaacatttgagtaagtacagtgcaccagggagactcttatgactatggggataacaccaagaattgggtatatgctccttactcagggtccccataaatcaaaccacctaaaatcaaatagattaaagaatgaattagataaagagtttactggcttaactaagtgggttttttggttaattccctacaaccaaatctttataatacccgatgttttctccatatgccatgttagcagctgcacagatacttaagataagagtctcatgatagtagagaagtcttgatctgtgatcttaggaaaagctgttcacattaaggatgccatcttctt

SEQ ID NO: 696859 - DNA, 283 bp, Homo sapiens
  misc_feature (188)..(188): n is a, c, g, or t
actctagcggatccttagctcagtgatctcaagtagaaagtagaagggaggaaataaccaacagagtaattcaagaaaactttccagaacagagaataggaattggcaggctgaaagagcccctgtacagcacgaactcactgaaagagcatctgtacagcaatgttccaatttcttgggcaccaatntcttgtataagtccattttcccacttaagtataaaagaactacctggagactggggtaattttatgaacgaaagagaggtttggactggaactca

SEQ ID NO: 696860 - DNA, 436 bp, Homo sapiens
  misc_feature (364)..(365): n is a, c, g, or t
tgtcaagactgtggaatcaatggtagtttctcaacatgtgctttggagaagaagggaagacaacttatctgaggttctctatattccaggaggcctgaacctctgggattggatccccaggtgagcagctgactcagttctcacacctgctgccctgccctcattctggagtgactgtcagaaggggattaagcctcagccacctggcctagggctagtcctcctctccaacaacccagatcctggagttgtgtgcctagttttggactctcctttccatcaaatgactttccctctagaaagtcctttcgtctctcctgcaggcagcatctgttggattcaccctagtccaggattaatctanngccagagggccacatccggaccactacctgttttggtaaataaaattttatcagaacgtaaaaaaaaaaaa

SEQ ID NO: 696861 - DNA, 117 bp, Homo sapiens
agcgtgcagtggacattcgcccttcacaaacgtttaaatgtgtttaatggaaaatgaagctaggcaacaagcttatcaggagcgacaagtaataaaaaatcattgattctaattatg

SEQ ID NO: 696862 - DNA, 955 bp, Homo sapiens
taatcacggggcctagtcaaactatcccgtggaatgcctccgctggaaatggtgccagagaacataaaagtggtagaacggggtaaaatatgaggatgtgaaagtcatggcgaaatcgtgcgttcccggcacacgtcagtggtaagctctgtgcccctccgttcttaggtccacactgcatgaagctcccaacatgacacaatcctgagcccctgggatttgaatgatagacagcacagtgcacggaggagcccctgtgaggttatcaaaagcagccatgtccagaggctcacccatgatgaacagaacttctgatgttacatatttcttctaacaagtctaccaatcatgaaaggaaatcgagactgacccctacccagagggagagtatcccatcgaagtctccagtgcctggggtggaccctgtactgtgagactcatcagtcctgtttgatctcaccatctacatgaggcaggcactggcaggcgaggttaatcgggagccaactgtcccacgcacttggatccagccatggccttttcacagggccttgggatactgtcagtcggactgacttacctgtttcagagacagctttcaccaactccaaggttacccaagtcagtatcaggctttactgcaaggttgagaacacaagactagacatagcttgaaatgattacattacctcacaacagatgccaagtgaacgttgcgtcccaagatgtggggctgaggactctcccaggagaggcagccactgggtctccatagccagcaaacaggaaggaacaattgcctggaccaaatggctccacaattaggctcgtccaggggaaaagcccccccagggagaaaaccgctttctggtgacagtaattctccagcgaaaacttatctcgttcggggccacacttgggctgggtgtgagacgagaccgaaaaggcgcatttt

SEQ ID NO: 696863 - DNA, 232 bp, Homo sapiens
tctctgctccctcttcatagaaatagattatttttataatacaaaaaaagaccaagaacaaaaaaaaaaacataaagcacaaggccgtagggaacatctttaagcgattactcagggccggctggacagttacacggtgggttggcgttcagtcccgtggtaccacacggcgttcaagccatgtttaaacccggattgcatcaacttcgaaaccgggcccgccgccggcgcc

SEQ ID NO: 696864 - DNA, 192 bp, Homo sapiens
agggttggctctagaaggatccccacaagctacaggatgttcagacgccaagcaatgcaatcaccataaaccacgtgaagagtgaagttcctgagagtccggctttcctcccattcttgtgtcctccatgctttgtctctctccgggccccggggctgctgctgccgcactcgtgctaccgctgccggagcc

SEQ ID NO: 696865 - DNA, 591 bp, Homo sapiens
  misc_feature (21)..(21): n is a, c, g, or t
  misc_feature (55)..(55): n is a, c, g, or t
  misc_feature (81)..(81): n is a, c, g, or t
  misc_feature (91)..(91): n is a, c, g, or t
  misc_feature (116)..(116): n is a, c, g, or t
  misc_feature (176)..(176): n is a, c, g, or t
  misc_feature (187)..(187): n is a, c, g, or t
  misc_feature (282)..(282): n is a, c, g, or t
  misc_feature (336)..(336): n is a, c, g, or t
  misc_feature (339)..(339): n is a, c, g, or t
  misc_feature (348)..(348): n is a, c, g, or t
  misc_feature (518)..(518): n is a, c, g, or t
  misc_feature (576)..(576): n is a, c, g, or t
  misc_feature (588)..(588): n is a, c, g, or t
cccggaattaactaatccctntttaagccaccttgaaaaagtctaattagcaaanatctctcaaaagtatccacaggcttntttcaaatcngactctattgttagtagctggtcantctccattggagtaatccatcgtatgtgcttattattcatatataattccggtactgcantcaaatatatnaaagctgctgaggcccaaaacttcaaaaacgaactgctccacagtggcagcctccatgtgtgcttcaccaggccctggtattcaaaggtgtctancaggagcttggcggcaccctcggaggtaacttctgccgcttctggaacgtctcnccnagctcccgntgctcgcccaggtccaggttggacgccgaggacgtcggggtcgcgggagtcggcggcggcggcggcggtggcgggagcaacgccagctcaggcggcggcggctccccggccctcctcctgggccctgcggacgaggcctcaccgcggcttctccgacgcggcttctccancgcctggctcttgctcccggcctggctacggagcgccgtgtgcgggtggcgctgggtncaaggcagcggncgc

SEQ ID NO: 696866 - DNA, 212 bp, Homo sapiens
caaacagccctatttacagttctatgtaccaagcttaagtttatcatagaagagagtataatggaataattcaacaaaagctaagtttaacatcatgaagttatacatgaataacctaacagtaaataacagtagcccaataccttcctaatatgaaatcaactgcaaactcaaataaaatattagtatgcattaaagtgtgagataatata

SEQ ID NO: 696867 - DNA, 499 bp, Homo sapiens
cccgttacttaccctgttgggaggctaggaacgtagtgcacaccacacggaaagcttggcaagaacagtgcccggggggtccatgaggctgtgcacttggaggagtcagtgagcaggcaggtaggatgtggcccagcaggaccagtgtcacttgctgcatgtccaggcagaagatggagtagagcagctccactgcccgcagtgtgtgctccttccgcgtctccttcagcagctccttaatcaggttgttgcagaaccagtagacgccgtccatgtgcagcagtctgtcaaagatgtggatggggcggctgtccacccagcccttctccagcaccttggcaaaaatgtcctgtcagcacctctttgatgggccgcttggggggcaagcaggttcccagtagggcattgtgtccaccccggtggagggaaacttgacctgcgttggttgtcttgcttgagcacgtcggcaacatgcgctccatgatcgagtcatgatcac

SEQ ID NO: 696868 - DNA, 106 bp, Homo sapiens
caagcagttatacagactcattgtctgtgttgatgtggtagcaacacgctgtgtttgcaattgactcgtggacacttgtgaagaagctggtctcatagtactaaat

SEQ ID NO: 696869 - DNA, 169 bp, Homo sapiens
ttatcgaatcgagctcggtaccgaacgggtgatgcggttggatggaagtctctcagacctgagcctgacaggggaggagccgttccctggaggcatgcccagggggctcaggctcagccctgagtgcccagtccactgagtgccctgtgaggggctacagtgggcgggg

SEQ ID NO: 696870 - DNA, 416 bp, Homo sapiens
cactcatatttgcaatagtactcagccaataggagccatgtctacatataggtgctgaaaaaggataatcttggtcacatggattcgcgttggtcgctcatgggctgatcattgtccaatacattcagcattatgacttcgaccctatagactctaggctcttccgtatgacattcgacaactgttccagcagcacggcacaatgcgttaccaatgctgtgtgacactgatgtcagtagcccaggccctatcttcctcctcactattcaagtcatacaacctttggtgctcctcaggctatgtctacttcgcaagtactttcttagtccgtaggtgtctgcacagagtgtgttacagtagtagcagttgccgttagagtcaacaatgctcggaactccttctcacgtagctctgag

SEQ ID NO: 696871 - DNA, 272 bp, Homo sapiens
  misc_feature (21)..(21): n is a, c, g, or t
gagtgtggatcactaggactnataaggcgggagcctgggcctgctatttagcctctttgattctcactttcttcattagaaaatagttttgagaattaagagagagagagaatgtttgtaaagggtatagcacagtgtcaggcacggggaatgcttctgtgctttaactgtcattaccaccaccaccatcaacatcactaccaccaccagtgtcatcactgccaccatcatcgtcaccatcagtaccaccatcagcatcactgtgtctatag

SEQ ID NO: 696872 - DNA, 478 bp, Homo sapiens
gtcgacctttcaggatttatttgcctttgattcatatttcattgttctgtttctacagcaacctgggacagagcctcaccctattcatacacttaaactttcacttacccttaaaccttatctctacctctatccctaccactaaccctacgccaaatctaacctcaagataaaacccaagaccaacccctacctctacttctattcctacccctatccctgatcttaccactaccacaaccccaattttaacccctacatcaacacctagccctatctctatgcctaaccataccactaaccccattactaccactaccccaatatcactaacctgactcctgtacctaccactgcccttagcattacacttacccaccatactctgacccatacccttacagttaccgctaccactaatcctaaatttacccttacctactcttacccaaaccttacattgtcgacgcggccgcga

SEQ ID NO: 696873 - DNA, 216 bp, Homo sapiens
cccctttccccaccacatacccacaaccgcacaggttaaaacagaaatcttgtcattttataattgtaatccacgccgggtgcagtagctcacacctgtaatcccagcactttgggaggctgaggcggttggatcacgaggtcaggagttcaagaccagcctggccaagatggtgaaaccccgtctttactaaaaatacaaaacggtctcacgaat

SEQ ID NO: 696874 - DNA, 140 bp, Homo sapiens
gctggctggcctcgttgcccgccgaggccatggggcctgccgccggactctgttcactgggtcttctgtctttcttggccgactttccagcgtcccttcttcttcttgtcgtccttaggcggtggccgctggctcggcgg

SEQ ID NO: 696875 - DNA, 585 bp, Homo sapiens
  misc_feature (115)..(115): n is a, c, g, or t
  misc_feature (127)..(127): n is a, c, g, or t
cagagaataaaaaaatataatttagtattaacacgtaatattagtttcaataataaatggaagtttccttggctggaagtcctagcccagccaatcggacaagagaaagaaatanagcacatcgganttggtaaagaggaagtcacactgtcactgtttgctgatgacatgatcgtatgcctagaaaacactaaagactcatccaaaaagctcctagaactagtgaatgaattcagcaaagtttcaggatacaaaattaatgtacacaaatcagtagccctgctgtataccaaacagtgaccaagctgagaatcaaatcacaaactcaaccccttttataaaagctgcaaataaataaataaataatacttaggaatgtacttaaccaaggaggtgaaagtcctctgcaaggaaaactacaaaatactgctgaaagaaatcatagatgacacagacaaatggaaacacatcccatgctcatggatgggtagaatcaatattattaaaatgaccatgctgccaaaagtaatctacaaattcaatacaattctcctcagaatacaccattattcttcacagaactag

SEQ ID NO: 696876 - DNA, 364 bp, Homo sapiens
ggtcccaaataccattgggggttggggcaaccatttttttgggcccggccccttttttttttttggaggagggcccttaattgcccccaaaagggtagggggaaaggggttgttttcccccccccctttttttttggggccccaaaaagggaggggttttcccctaaggggggaaacccccaaaccctggggtacccccccaaaaggggggggggggagaacaaaaccgggggctggccatggggcgggcccccgaattagggcccccccttttttttctgggaagggggggggggccttaattttaacgggccgttttttttttcttttcccccttgaaaaaaaggttttgtttcttccctta

SEQ ID NO: 696877 - DNA, 866 bp, Homo sapiens
atcctaacctatggttgcgtgatcgtgacgacaatctgctgcagttctcgcgtgctccaatctgcgacgcaccggtatctatcgtaaacgaactatcccacgtgcttatacttcgcacacgaaaccagagcaggaagacacaggagacatataccaggccggccgcggtgggctgtttgttggagcgtccactggacgcgtgctgaagtccccgggccgactgtctcgggcgcaggtgcgccgcatgggacgggggcacagccgtaacaactagagcgctgcaggagcacggtgtacggtagaaacacaaagccgtgaaggtcaggcccgatcgcggtggaagaagcacacgctctgatccttcgccttaaaaacaagtcaacgacacagactcgaacgcacgtagggacggtcgcacctggcagcacaccgaccagggttatccggtcacccggttttccccagccccattgatccatcccgcaggttgaatacccagcgatagtaggggcgattgaccgcgttaggccattatttccttgttgcgcccataacacaagggtcacgcgctgatccggaaaagtgcccgcgcagcaccggggcgataacccgttcaactcggccttccaattcgtcccccgaggttcgtacgccaacaacctacttctcctactgccttagccatttctgcgccaacaacgactaaccccaaaagaacacaaccaacgggcggcgaaccttcgcgctcatccacacaagcactagcgccttcaacccacccagcgttcaacctcctcacgacaagcaacaacaacgcaccctcccccccaacaagcaaccaccatcacacacccaaccttcttcca

SEQ ID NO: 696878 - DNA, 1489 bp, Homo sapiens
  misc_feature (475)..(475): n is a, c, g, or t
  misc_feature (692)..(692): n is a, c, g, or t
taattacttttatttaaatggctgaatttactccccgtgccataagttttggtttcttcagtttctctctgtgggatatattcttttttcttctctgtgggcaacctctcctctctttctgtggttttaaggaacaatctcgtgttctccttttctccgataaggattcattcctcaagtggtggcagggaagagcctcagtgttatgtgggtttaactccggaccatgtaagccctcgtgtgtaggtctccgggcgggcgcatctcttatagaggtgctgtgtgtgtctcaccttgtgcgatttgtgtcctcacatgtgaccgagaaaaagaactctatatcagtctataacacccccttataagttctcagagacattatatctctctctctgtgcggtgtatttaaagagacagtgtgtgtgtcagagacacacaataattctcacagacacctctctcttgtgtgtgtggncacacgccagagctcttgtgtgtgtctcccaggcccccacatagtgtgcctgtgtggcccctgtgtcggacacaccaccctgtgcacacaatctctcacaccacactgtgtgacgtaacccgtcctcgagggctctctgtgaacccacgagcacccacaatgtgggccgggtgtgtgcgacaaagaaacaaggcgcgccctttacagaaaagggggnggcgaaaaacgaggggagccccacagaaacaacacgagtgtggtgtgtgaactcccatattttcccctacagacaaacacgtcatgtgggggctcctgtgacgtgtcgtggaaaaagcccaccgtgtgctatagtgttttctcaaatatattatacgagaaaacctatgtgggggaacagagaccggcctccgtgttaacacccgaggggaaacctcccagagggggaaacccaaatagatgtgtggccatctctgtagaaaggggcgctcctccaagaggggggctcccggagagaagtgatttcgcaggacagctgtggaacgcctcccttgtgcccgtgaaatttgtgcggcgacacactacgtggctcgttgacaaccggtttgtgcgtcctcttttctcaagccaaaaaacatctttttccacagaggcggccgtgtggaattttcacagcgtcgtgaaacgagaatattcggttcccccacacggggcgtctctaacaaacaacaaaccgttggcgtcctctaggagcaataaaaaaatctttttcccccaattcggggcgcgaacgttgtgaggagatcctttttaaaccaccccgcggggtgtgagaccacaacaactttcgtggtggtgtttccccccacggatggggcgtccccaaacaaaaccaaaatgtttctgtgcgggacgcaacacacaccattgggtgttgttggaaaaagcgtccacaacagggttggatgaatatgtcttccacacacacactaccacccggccgaggggatgcacctg

SEQ ID NO: 696879 - DNA, 255 bp, Homo sapiens
ttatgcggtgcctttccttctgacatacatcagctcaggctcgacatctcccgtctgggatagccatgtccctttctccagttctggtgcttcatatatgacacatatatactatattttttgccttttaagcttaaacgctaatataatttggattggccaaataattaagaaattcagctggtctctgtaaagggttaataaaaatgtaaattgtgatataatggagaattaattgaaacactccaaagcaga

SEQ ID NO: 696880 - DNA, 231 bp, Homo sapiens
gactttgttaatcatcacaaacaataccaacaaccacggttagaaatgctgaatacctattacacgggtcagaacgtgtcaatcttaacacctgataaccgccgaactggggatggtagtgacgtgcgacttactcacccatttggtcgtgaaattgcagacttccaagctgggtttagtgttggtcaaccaatcagtattgacgtagatgacagcggtgcaaggcaatca

SEQ ID NO: 696881 - DNA, 311 bp, Homo sapiens
agcacaaataggaagggtccccaggttggggagagccaagtagagaacaataatgaacaattactgtatgaacaactgttagagacagctaatcacaaacaaccgcgggcacaatgacctcattccacacgtagcacccttcagcaggaccctataaaactttcctccagcccctgcctctttgcaggtagccccttctctgctgagctgcccactgcaacatattttcataatttctctaataaatctgcccttctttacctacaactatcttggtaaatggctttaccacctgcaaaactgaccctagg

SEQ ID NO: 696882 - DNA, 147 bp, Homo sapiens
agctcatacgcaggttgtgctgtcggaggttgtgctggtcgagttgtgctggtcgcaggttgtgcaggtcgccaagttgtgctggtgccaggttgtgctggtgccaggttgtgctggtgccaggttgtgctgggcccaggttgtgct

SEQ ID NO: 696883 - DNA, 290 bp, Homo sapiens
tgcttcaagtcgatctacgagtatccccgtcagacgctgtaactatgtgcctacatcgccagtacaaccgcttcgagtaagcgcctcatgaacatgtctgtacaccaacttcccctgctttagagcacgtccagattggtgacatcctcacagtgggccagtgccggcctctgagcaagacagtgcgcttcaacgtgctcaaggtcaccaaggctgccggtcaccaagaagcagttccagaagttctgaggctggacattggcccgctccccacatagttcagcgtctga

SEQ ID NO: 696884 - DNA, 336 bp, Homo sapiens
ttaagggacaaaccacagtgcttccattattcatgttgtgaatgtccctgtggggatgagcacagaagtccaggcaatctgtgaccccagagaagggacgatttttcgtgctgcgtttttgacattctcgggcaacattttcatattttatttgattttggtaagctactggagcatactgcttataaattggagctaatcgtgtagccaaactctgtaagttatcttcaaggattttttcatgtaagggagagcttggatcaattctaaatcttctggagcttgggcttttaccaaacttacagtcattaaagtacatactccatgaacagtcta

SEQ ID NO: 696885 - DNA, 236 bp, Homo sapiens
  misc_feature (34)..(34): n is a, c, g, or t
agcaggatctagttactggcatttcgcacacatncatatggatgtggatccacctgcatccctcagcccgccccaccgcatcaaaaccaggtctttcagaggctgcctgctcgccagaagaaactaatgactaagctctacaaaggagcccaaggaattggtccaggcgagagtttcacaatatgaaaagctaagactgaaagagctagagactcctctgccaccattacccctaa

SEQ ID NO: 696886 - DNA, 431 bp, Homo sapiens
aattttgaaaaaaaagtagtggtcttactaaagagatttacttgcatttggataatttataactgcacataatttataactgcattcaaactctcaaaaaataattcttgtaattatcaaaaagaaactgtaattgccgggctgggcacggtggctaacacctgtaatcccagcactttgggaggctaaggcgggtggatcacctgaggtcaggagttcaagaccagcctgaccaacatggtgaaaccccgcctctactaggaatagaaaaattagctgggcctggtggcagctgcctgtagtcccagctactcgggaggctgaggcaggagaatcgcttgaatccgggaggcagaggttgcagtgagctgaggtcacgccattgcactccggcctggggaacagagcaagactatgtcccaaaaaaaaaa

SEQ ID NO: 696887 - DNA, 279 bp, Homo sapiens
  misc_feature (151)..(151): n is a, c, g, or t
gactaagtcgtctcccatggtgctgtaaggaatgctgagactgagtaatttataaagaaaaggggttggctgggcacggtagctcacacctgtaatcccagcactttaggaggcagagacgggtggatcacttgaggccaggagtctgagnacagcctagccaacaggtgaaatcccgtctctgctaaaaatacaaaaattacccgggcatggtggcgtgcacctgtaaacccagctactcgggaggctgaggcacgagaattactcggacccaggaga

SEQ ID NO: 696888 - DNA, 447 bp, Homo sapiens
tgctagccggagaggaggtgcagtgagcgagatctggagtggcttcacctgggggtgaggagactctgtctccacaatacaatgaataaatacataaaatagattgtgatgacggatgcagaactctgtgaacatactaagaaccattgaattggatgctgtcaaagggtgagttgtgtggtatgataattctatctcaataaagcagttacaaagagaggaagagatggcataagaactggaagcacagtggcaatgggacagaattttaaggaatggtttgagactgagtggcaggcagactggggggtaaagctaagagaaccctaaaggaaaggggaccagcttgccccgtaagtggtgtggggctaggttaatagattggctaatgcccaggagatgtcagtgtgcccatgcgctggtccctgccatgtaggaacacgtagg

SEQ ID NO: 696889 - DNA, 175 bp, Homo sapiens
gaatttgacaggctgaaagctattttaaaagttttctttctgcttattcaaactcttagcccagcgtaccatgtcttgggcaatctgctgggctgtcttgctcttggatttctccttcttctcttacccctctttggcaggaggcaggcccgactgctgatgggagaagactgcg

SEQ ID NO: 696890 - DNA, 469 bp, Homo sapiens
agcggcggatctctcatcgctttgctcatcatcgccattatgccttttgccggttgtcgccccactcaggcagcccgtgtcaccaccaccacaccacgcgcctgctacaaggattgtgcaccagatgaatgcagcgtgaaaatgggtatttatttttctccttttttgttcaatcttcttcgaatcgaagagaagcaaagcgcacgctgcgcacagttttgagcctgtttttcgcctccccctcgctcaacacttggaagttgtggaagcttccggggatacgtttagaacggatacatttagattaacgcaggacagtggcaggcgtgggccagggcacataagacattaaacttaggcaacaacaagacccttggtaaacaggaacgaatagaaacgaatgtgaaaacaatattgtgttcggataaaacaacaacaaataaaccgttgaaaaaaagagtatactaca

SEQ ID NO: 696891 - DNA, 598 bp, Homo sapiens
  misc_feature (335)..(335): n is a, c, g, or t
tacttgcgcgggatatagtaccgtaaggcgaaatgattgacaattatcacctaagcataattatatccataggactaacccctataccttctgcatatgaattgacctagaaataactttgcaaggtagagctgcagcaatgatcccgataccacacgagctacttatgaacagctataatagcacacccttctatgttacgcataataatttccgcaagatcttatatgctgaggcgagcaaccctaccgagcctgtcttattcctatcttcttttcctgtaatgatattagttcaactttaaatttgcccacagaaccctctaaatcccctgntaaatttaactgttagtccaaagaggaacagctctttggacactaggaaaaaaccttgtagagagagtaaaaaatttaacacccatagtaggcctaaaagcagccaccaattaagaaagcgttcaagctcaacacccactacctaaaaaatcccaaacatataactgaactcctcacacccaattggaccaatctatcaccctatagaagaactaatgttagtataagtaacatgaaaacattctcctccgcataagcctgcg

SEQ ID NO: 696892 - DNA, 118 bp, Homo sapiens
gagctgaggagggtagtgaccagcacgatgttcccgatggtgctgatggcacgaacatgcactcggcacgtgtttcaaccccttggtctgttgatggctctgagtggtcggagcaccc

SEQ ID NO: 696893 - DNA, 652 bp, Homo sapiens
  misc_feature (43)..(43): n is a, c, g, or t
  misc_feature (132)..(132): n is a, c, g, or t
  misc_feature (151)..(151): n is a, c, g, or t
  misc_feature (154)..(154): n is a, c, g, or t
  misc_feature (176)..(176): n is a, c, g, or t
  misc_feature (190)..(190): n is a, c, g, or t
  misc_feature (200)..(200): n is a, c, g, or t
  misc_feature (205)..(205): n is a, c, g, or t
  misc_feature (240)..(240): n is a, c, g, or t
  misc_feature (242)..(242): n is a, c, g, or t
  misc_feature (289)..(289): n is a, c, g, or t
  misc_feature (325)..(325): n is a, c, g, or t
  misc_feature (351)..(351): n is a, c, g, or t
  misc_feature (374)..(374): n is a, c, g, or t
  misc_feature (377)..(377): n is a, c, g, or t
  misc_feature (379)..(379): n is a, c, g, or t
  misc_feature (386)..(386): n is a, c, g, or t
  misc_feature (405)..(405): n is a, c, g, or t
  misc_feature (417)..(418): n is a, c, g, or t
  misc_feature (420)..(420): n is a, c, g, or t
  misc_feature (438)..(439): n is a, c, g, or t
  misc_feature (447)..(447): n is a, c, g, or t
  misc_feature (454)..(454): n is a, c, g, or t
  misc_feature (508)..(508): n is a, c, g, or t
  misc_feature (567)..(567): n is a, c, g, or t
  misc_feature (622)..(622): n is a, c, g, or t
tgtaacaacgcatcttatatttggaatgactattaaaaaaacnacaatgtgcaatacaaaagtcctcggccacattgtgaactttgggggatagactcgctccaaccgactagctgttaccttcaccgttcnagtttttaaatcctgagtnaanccaaaaaaaaaaaaaccaaaanaaaaaaaaaaaaanaaataaagcnatgcnattttttttttgttttttgcgaaagttaggttttntnaagaaagggtgttcgcaacttagttatagtccgcctagaaacatttncggtggacgatggaggggccggactcgtcataatcntgcttgctgatccacatctgctgganggtggacagcgaggccaggatgnagncnccgatcnacacggagtacttgcgctnaggaggagcaannanatagatcttcattgtgannggtgccanggcagtnatctccttctgcatcctgtcggcaatgccagggtacatggtggtgccgccaganagcactgtgttggcgtacaggtctttgcggatgtccacgtcacacttcatgatggagtngaaggtagtttcgtggatgccacaggactccatgcccaggaaggaaggctggaanagtgcctcagggcagcggaccgctcattgc

SEQ ID NO: 696894 - DNA, 324 bp, Homo sapiens
  misc_feature (21)..(21): n is a, c, g, or t
  misc_feature (38)..(38): n is a, c, g, or t
  misc_feature (51)..(51): n is a, c, g, or t
  misc_feature (79)..(79): n is a, c, g, or t
  misc_feature (277)..(277): n is a, c, g, or t
  misc_feature (280)..(280): n is a, c, g, or t
ctgggaaataaagggcctttnaggcttccccctaatgnctggtggaaagancacccattttgtaaggcaccttttgaancataaagcactgtgtgaccagcgctgggatatccatggctttgggggggggcctctcccctgactcccatccccataataatgagttttgtttgggaattggaataaggaatggactggatggtttaggaaattataaatatttggtcacgtggcctctctgaaaaaattggacccctttttcttttttaaaattttngtngatcttcgtagtaatgtaattgtattttatgcctgcttttttat

SEQ ID NO: 696895 - DNA, 202 bp, Homo sapiens
cctagaacgagtacgcatctataaaacgttgttgcgccctacattggtggctcttttttggttcaaccttctgctttagatttccagttctgccggaaccaggctccctatgcaattgtctgtgctttcccgtatctcctggccttcaccaccgactccatggagatccgcctggtggtgaacgggaacctggtccacactg

SEQ ID NO: 696896 - DNA, 264 bp, Homo sapiens
cgcgctgacaccggtacgaggcaaagaaaaagaatctcttgctccagttcctgatggactcctccatgtccttcagcgagcgctcgtcctcctcgaacttgttgcgggcctactgggcagcatcgatgaagagcctgcgtctgctcgccgtagggcgtcattttgtcttcctcagcagggctggccgacttgggctgctccccctgcacctcggaatcctcctcctcctcctcttcttcagcctcttccttatgtgcgcgtgac

SEQ ID NO: 696897 - DNA, 854 bp, Homo sapiens
  misc_feature (10)..(10): n is a, c, g, or t
  misc_feature (76)..(77): n is a, c, g, or t
  misc_feature (110)..(110): n is a, c, g, or t
  misc_feature (147)..(148): n is a, c, g, or t
  misc_feature (166)..(166): n is a, c, g, or t
  misc_feature (168)..(168): n is a, c, g, or t
  misc_feature (205)..(205): n is a, c, g, or t
  misc_feature (233)..(233): n is a, c, g, or t
  misc_feature (264)..(264): n is a, c, g, or t
  misc_feature (288)..(288): n is a, c, g, or t
  misc_feature (328)..(328): n is a, c, g, or t
  misc_feature (361)..(361): n is a, c, g, or t
  misc_feature (384)..(384): n is a, c, g, or t
  misc_feature (428)..(428): n is a, c, g, or t
  misc_feature (477)..(479): n is a, c, g, or t
  misc_feature (848)..(848): n is a, c, g, or t
aatataatgnctgaagactgtcagcgtctgattcagctccagcatccttggccacctccccacccgggagtcaagnntcgtggttctgccttgaacaggccacaggcgtngctgtagagacgccagtcgtcacaatgacccacgacnngccgcggagcctggcttntnggaaggggaaggcccaggcctgtgccgggccccaggnctggcagccaccagctcctcttccaggnatgggggacaccctgacaggatccggaagtntccatttacccaaaaatgcaaganccatgatcagtcatggcgacactgcaggcggtactgagtnaccatgtccagtccggctccgtccctcccacangggggacaagcttctcccgaggnggcctggccaaggtggaacaaataccctgatgtcgaaaaatgtntaaaaatcccacagacggaattttcaaaaagaggagaaatctccccgtnnnttggaggcagcgagactccgaacacggtagcaagcactcctggacagactcatgtatgaaaaagtacatcatggtttcaggaaacaagcccccacccagggtgggctgcctggagatggatcccctttcccaaaaacccgaaaagccagaaggaagagacggggggtgaacggacggtgtgtaggggtgaggtgtcacttcagagaggttccctgggtttccggcgacgccctccttcaagcgaggccgcagtctccggaggcgtgcgctgctgctgggtgtgcagcccccgaggggtctcggcagcgcccgggtctggctttgcgtattacagttcatctttcacagctttctgatcatcgtcttccnccatgt

SEQ ID NO: 696898 - DNA, 258 bp, Homo sapiens
cgtttcaaatctgattataaagatgcatatgccctatatggcgaatactaactacaaccgcaaatgcaatgacactgtaaattctaaggtcctcacgagaaaatctcgagaataaccaaagtggcaacaatggaaacgtttggctggaaattagtaagttatatcagtcatctttgtttttgggtccatgttacaggatgcgtgtgaactcgatgtaattgacaattccccttttgatcatttggtgcttctctgttc

SEQ ID NO: 696899 - DNA, 187 bp, Homo sapiens
ctgctcgtgcattcctccacttgttagttcttcaattctgaggtcctccctgagaggaccatcgtcactgtaccctcaagatgcgttcactcccccgactcgttacggtagctgtctgctcttcccgcatgtgcaccagtgcctgcttgcgattgtttcccctactccaacttgctctcgatgacag

SEQ ID NO: 696900 - DNA, 371 bp, Homo sapiens
cccaagcgcgaaattaaccccccctaaagggaacaaaagttggggcccccccccggtgggggcccctctaaaaaaaggggatcccccgggctccaaaaatttggcccaaggcaaaacaaaacaaaatttgaaagctttttaaaacacccagggcaccccggcccccaggggccagcctggccaacatggggaaacccggcagtttttgttcaagtgacaactacccggaacagtggtgtgaagacctgtaatccccggtcccccgggggtttgggcccaaaattttttatgcctcgcgggcgaaggttccagtatcccaattttgcccccatgcccccccgtttggggcaacaaaaataaactttgtcccc

SEQ ID NO: 696901 - DNA, 232 bp, Homo sapiens
  misc_feature (38)..(38): n is a, c, g, or t
  misc_feature (212)..(212): n is a, c, g, or t
  misc_feature (218)..(218): n is a, c, g, or t
tggagctgcccccacaatggctggctctcccacaactntggccatcatgaagacgctggtgtcatctgctcagcttcccagtcccagccgacacccagcccagacacttggccaacctcacatgcatcaacagcaggatctgaatccagtttggccctgaggctggtgaatggaggtgacaggtgtcagggccgagtggaggtcctataccnaggctnctggggcaccgtgt

SEQ ID NO: 696902 - DNA, 108 bp, Homo sapiens
ggcactactcatttatagcagtttgttcattttcatttctgtatagtttttcattttaagaatacacaattttgccaggcgcggtggctcatgcctgtaatcccagca

SEQ ID NO: 696903 - DNA, 478 bp, Homo sapiens
acagatatgcatccagtgacagcagcgcccaccaaataatgagcatagtcgatacttatatacgggataatgcattacgagctggtactggttaacttgcaccttgactcgtagaagatgaattggtgaataaatagtctctgcccagccgcgttcagtgaactctggacgtgcatccataaaagtatatgactctcaacccttctactaagaggaagaatactggatccccagacaggaagccctcaaagaagtccaagacagacagctcttctcttagttcaccactaaatcctaagttatggtgtcacgtacacttgaagaagtcattgagtggctcgccactcaaagtgaagaactcaaagaattccaaatctcctgaagaacatctagaagaaatgatgaagatgatgtcgcccaataagctgcacactaactttcacattcctaaaaaaggcccacctgccaagaaaccagg

SEQ ID NO: 696904 - DNA, 158 bp, Homo sapiens
ggtatcttatcgtcttcaaatctccgacttacgttattgtttaacgaagatccttctaggcataatgcttcggctcttggttccgatcttgtcgccgatcccagaagtttcactctcgtagtggtgctactacgatatgccgcccggccagtccctcg

SEQ ID NO: 696905 - DNA, 719 bp, Homo sapiens
gatctattttgaatgaactctaaattagcaataaatgccggtcttgtatactgtgactgtgatctgctttgagaaaaccggttacttcgttattcatgcttgttgataaatatcttatgctgagtattttcacgtatcttccaagtactcagcgttattcgtatttcaaataaggtcagaccttttatacttttgaccatgatagttattttctatgttggacacttagttatttaccaaagcctccgatttgtgatgcagtgtttagtagtccttgtaaacaatatatacagactatacaagaattaattttatctgggcttgtcaaaaaccatatttgcattccagaaccaaatcttaaatgagaccaaagtccaggttagcacaggtttttatttgtacctacaggctaacattgagatatagttcacataaatgacttggagttttatgttcatgaaaaaattagggattatgttcagagtactatttttctccattttagttaagtagtacttacacctcattgtttagatgtaacttgctgtgtctgaggtataaatatagtctgtgggagtgagagggaaccagtcctacccaatttgatttgactattctaaatctatggaaactgctaaatagatatttctatagatagatatggtaattatgtagctctgtgggagtaactttgtaattgtataatcagaaacactatt

SEQ ID NO: 696906 - DNA, 245 bp, Homo sapiens
caggttctgtggtggtatagatatatatagcttttcgttcatggttcctggcttctcaattcccatacctctatgcatacatgtcatttgttattatattggtgtgtcaggcgtcaggaaatcaggatctctctcctgccctccattctacctgtctcaaggtcgagaactctgattcttctaccaccattctgactgtgggtcataagacccacccggagagagctcctatccataaccacctg

SEQ ID NO: 696907 - DNA, 937 bp, Homo sapiens
cggcgctcgtcttcttactacacggcggtctattgattcacgtcgtggttgtaccccttccttgtgggtggtgtctccgcctgtttggtcgaccactttattagtgtggtgttttcgtggctacaccagcagtgtgttccgtctcctcccgccccggttctttatgttgttgttgggtcgcccctccctcgttctgcgggctctgtccgccccgccccgttgtttagtagggggcctgttgtgctcccccctcgatgttattgtcggtgcctactaccttggtggagggccgtcctcctttttgctgctttacgctttcttgtgccgccacgcgttgttgtgtgtgttttcgcccccctgccggctctgccgccgcgcgtcgtggtcggctggcccgccccgccgctcctagctgaatatttgtgccgctgtcttttttctcttcccccccgcaccggttggttgttgtgtgtttcgatcatcatcacgttttcgttctttttatttgttaaatacaccaccccaccacctccgcttgcggtccctcctcttgttgttttgtgtgagggcgctccgccgcccggctctccccctcccccgccaatattttttttttttatacgcgaaaatatatattttttcctcctgacgtctcgcctccaacctaattctttgtgtgggataagctccttcgtcatttgttatggtacacccacaaaattatttttgtttttatagcgaaccactccctcctcttctgtccgttagacgatatttttctattgaactgcctggcttttagtgttggttgtgaagaatactgtttccccctcggcgagaaaagaccaataaacttttttttttttttttgttttttttcccccccccccccgttgagggtgaaaaaaagaaaaaaaaaaaacgatttatagaagga

SEQ ID NO: 696908 - DNA, 749 bp, Homo sapiens
  misc_feature (202)..(202): n is a, c, g, or t
ggtattcccgccgtcatatgttaccgtgtggggatgcctctccacccccctccctgtgggcccgctggcggccaccatccctcctttttagcgggagatacattttcgatgattgtggcgcaccttttctctctccaagcaacatcgcggggccccgggcatatctcagtgtcccctgggcgcaaacagtgggcgtgacccncaccaccctcgtgggggtctccccccacgtgttttgacttttcgccgcccatctccccccatgggatgcgggatttggtgcaggaccaacgacatggcggtagttggtgcgcaaaatgtcatagaggcgccactgatactctcctgagtaggacccccggtggccctctctggggtccccgcagtagtcgtctcacggaacccctcccccaaaccgagtctccaccgcttggggtcgctcggtggtgcacatacttgcgaataatgacttgtgaaccctcttgtatgtttatctattaattccccccctcgagtcacactcctcttgcgccacgcaacagaagagtcaccccctcctcacccccacctttgtctccccaacatccctcagaattaatttctgcgtcctctcacgcacacttcccctttggtgcggtcacacgtctttccatctcttcccccccacaccccatgaactgatagcacacgtaaagtttaatacgaacagttaatgaaaataaacaacaataaataatcgccacaaaaca

SEQ ID NO: 696909 - DNA, 229 bp, Homo sapiens
agctcgtcaagagatgtctgttataggtggacggctcccgcggtgctgcgggccttctcctgatgtctcgggtcttctgtccgaagaggcctgcgcagtgctctgttcccatgatcctgcaagacaggaaccctacgagggaggaaactagcaatgctgccccgtctcaccgcgctggaccacgactagaagggaatcagacgatgaccagccacagtgaagagcgaca

SEQ ID NO: 696910 - DNA, 254 bp, Homo sapiens
  misc_feature (31)..(32): n is a, c, g, or t
  misc_feature (68)..(68): n is a, c, g, or t
  misc_feature (128)..(128): n is a, c, g, or t
  misc_feature (139)..(139): n is a, c, g, or t
  misc_feature (168)..(169): n is a, c, g, or t
  misc_feature (177)..(177): n is a, c, g, or t
  misc_feature (182)..(182): n is a, c, g, or t
  misc_feature (184)..(184): n is a, c, g, or t
  misc_feature (186)..(187): n is a, c, g, or t
  misc_feature (205)..(205): n is a, c, g, or t
  misc_feature (245)..(245): n is a, c, g, or t
  misc_feature (248)..(248): n is a, c, g, or t
ctccttccaagagcgttctcttttttttttnnttgagacagtctcactctatcccccaggctggagtncagcggcgcgatctcggctcactgcaaccaccatctcccaggagaggcgggagatttttnagcagcacctnaagagcctgaagctgacccagtccagcannttttactnccagngncnngcagagctgacaccaggnttcagtggggctgacatcgccaacatctgcaatgaggctncgntgcacg

SEQ ID NO: 696911 - DNA, 327 bp, Homo sapiens
  misc_feature (322)..(322): n is a, c, g, or t
tgagatttttatttgttgagatgacccaagtgaaatttcttagaaatgtcttctgccagataccctaaattatctctttcaagttcaaagttccacagaatctctagggcattggcaaaatgctgctagactctttaaaagagaattttagaccaatatccttgatgaacattgatgcaaaaatccttaataaaatactggcagaccgaatccagcagcacatcaaaaagcttatctaccatgatcaagtgggcttcatccctgggatgcaaggctggttcaatatacgcaaagtcaataaatggttaatccagcatataanacaga

SEQ ID NO: 696912 - DNA, 227 bp, Homo sapiens
gggttttccctaggggggcccggggggggaaaggcccccgggggccaagacccttttgtttttcccacaaaagattttattttccccaggggggggggggaaaaaatcaaaaagttttcctccccccgggaccggggggggggtccggtcctccccccagccaggggcacggggaaggggaaaaagagaaattgcccctgaaggttcaaaaaagttgtttttttgga

SEQ ID NO: 696913 - DNA, 782 bp, Homo sapiens
taaaatttttgaggcggggtctcgctctgccacccaggctggagtgcgggtggtgtgatcttggctcacggtaacttccacttcctgggtttaagcaattctctcgccttagcctcctcagtagctgggattgcaggtgcgtgccaccacgcctggctaatttttgtatttttggtggagatggggtttcgccatgttggctaggctggcttcgggctcctgacctcaggtgatccgcccacctcggcctcccggggtgctgggattataggcgtgagccacagtgccggccctttcttttatcttttcatttaatcccttcatttagttcagtgggtctcagccctgttgatacattagaatttcctaaatgctttgtgtgtgtgtgtgtgtgtgtgtgtgtgtgtgtggctttttttttttgtgttgggaaatggggtctgtctctatggcttaggcgggagtgcaggggcacaaccagggcatacggaaaccccaaactcccaggctcaagacagacctcgtggccctaagcctccatgagtgacgggaaccacaggtgcaaatggccatgccgggcaaaataggggactagacatgtaaatgggctcacaaaacattgccccaggggtggcctatgaacgccgggggctacaaggagatcccaccgggcctggggcccccagaacgggtggaggatacacaaagcaggacgccaaaccacggggccacgcatttgaaactcaaaacgcgtcgtggtccccaggggacgacacaggacc

SEQ ID NO: 696914 - DNA, 197 bp, Homo sapiens
tgagactccacgtatcactccagacagcactaagtctactactgccagtctgtagctgatcctcgatctccatgctactgtggttcgagtgaaagacgataataaattctactcagggttgtcccatcatcacttcctggtgtacgttctcctgatccccctttactccctggacgattcccgtgttggcttccaag

SEQ ID NO: 696915 - DNA, 158 bp, Homo sapiens
tgggtattatcacttgcgttttcaaagcattagctctgaaggcataaccttttcttttttttttcttctgaaaaagacagggtctctttgcattgatccaacgctggagtgcagtagctaattccacaggcatgatcatcaagcaccacagccccaaa

SEQ ID NO: 696916 - DNA, 1543 bp, Homo sapiens
  misc_feature (558)..(558): n is a, c, g, or t
  misc_feature (1248)..(1248): n is a, c, g, or t
tgggaaaagtgggggtagggtttatgtgatgtggactcaaaacagagtgcggggccctctataaaataaaggggactcactcgtgaaattaactaaaaaagtgatatagctcttggcgcttaattttaacagggcgtagaggggtgattaacactctcatagctcagtgtttccctactcaaagagagacaccagagtgttacatatattgtgtgcgtactatataacacccacacagaagacacatatatgttatatacacccacacacatatattttttaacacattatacgtgggtgttctccctataccttataacactgtgtgtgggttacgacgcttatacgcgaaccttctcttatgagggaacacattgtgttggtacaagacgcgcgaggtgtataacattttataatatagaggggtgtcgcgtggattttttttgtgtgtgtgataacgcgcgggagaatatagtgtctttatacagagagtgtggagatatataacacatttctctgcgagggtataatatatacacaaacatgtgcgcgtataanataataatgtgagaagatatgttgtgggagggtagaaaaaaatgtgtctgcgtctggggagtatataaaatttgtgcgtggagtaaatatataattccccgtggtgtgtcgcgtggaaaaagcggggtgttaagtggggcccactaaatatatttttttaaaaatttctctatatatctcttggagggattttctctaaaaacagcgcggggcctctatatgggggataaaacactcttattaacatatgttcctcctatttttccccacgatgtgcgcgacgtgagagataccacccttttctctaaaacctctattaagaggtgggccccaaaaacagagcgccaagtgttggacttccgcagcgagagacactcttaaagcgggggggggacaacaacggcgcggtgccccaacacaatggtgggaaacacccctgctgggggacaccccattcccaacaaacaacggggcgtcggacaactgcggtgcgcacacttcaaacggggacaaacactcctctgcgcggtctgacaccaaacaacaacctttctctctctcttcagaacaaacaacgagaacacacaacaccacaaacaacagcgggcgggggggcgcggccaccaaaagaaaattaccccccaggagggggcgccacccaagatagctaacggctagcaaaccccggcngctgtgcgtgggcaaccacaggtgtgccccccaataatgaggggagcgcgcacaatataaacgacgcaagagaccctgggcacggcgtcatgacaacaagctgtctggagcgtcgccacagcacagcgacacagcggcgcgaacctctcgtgggagaggacgcaccacacatcggggggggggcacaacagctgggcaacacaccactagcgagatatagacctcccgggcaacaaacacatcagcggatagggggccgcaggcattgctgcgtcgacaagggtcgaggatagaa

SEQ ID NO: 696917 - DNA, 454 bp, Homo sapiens
  misc_feature (310)..(310): n is a, c, g, or t
tgtgtatgtactcagaagcagaattgttggccaggcgcagtggctcacggctgtaatcccagcactttgggaggctgaggtgggtggatcacttgaagtcagcagttcgagactagcctggccaacatggtgaaacctgtttctactaaaattacaaaaattgggccaggcgccatgactcatgccggtaatctcagcactttggcaagccaaggcaggtggatcatctgaggtcaggagtttgaaaccagcctggccaacatagtaaaaccacatctttactaaaaatacaaaaattacttgggtgtgnaggcatgtgcctatcatcccagcgccctccgccgcctcccccctccgaattggttgaacccgggaggtagaggttgcagtgagctgagattatgccactgcactccagcctggatgacagagtgaggctctgtctcaaaaaaaa

SEQ ID NO: 696918 - DNA, 404 bp, Homo sapiens
  misc_feature (384)..(384): n is a, c, g, or t
aggcaatgcccaagagagtgctgcccgccaggacgtagacctcatcaagcgagaactggaagctgcgattgccagtgatgtggagatggcctcaggcgcctatgaaaacttccgcattgctacagagggggctgaggccatggctcagaacgaggcacaaatgcaacgcgcctacgaattgggtgaggctgacctgcagtccctgctgctatctcgacgtcaagcagtgacatcggcatcgaatgcactgcaggcgcatgtcgatactttgcggactcacttgtcactgctgatcgatgcccattggatatgggggttggacgaaagctgagcacgctcgtttagcctgaagtgcccggcagggagtgccgtgccatctgtcanaatcgtaatgaacttatcat

SEQ ID NO: 696919 - DNA, 147 bp, Homo sapiens
gtgagatggcttaggcagctgagaggctgtagggacatttcacttggaaacaggcagtaacagtggccagttgtttctgttaataccatcaaaatatccctactcttgtggtgccttgaagaaagtccttcatttaactgagacatc

SEQ ID NO: 696920 - DNA, 391 bp, Homo sapiens
ggctattccaaaagcgcatatcgtggggtatctcagaattcttcgcactttctggcgcgtattaaatgattgggtagtgtttgtatcttgcctgtcattttctcatggcctgggcctctaagagtcagacaggtcttgcaccctcagaaagtccttgcacctttgagggtccgctgggcctgtaaccagggcttgctgcgtgtcccagccagcccaccggccgtgctccctgcagacgaggccaaagacagccaccagtccgatgtgtagagggaagacccccttcatgggagtctgagcacggcccctcggtctgccacaaagcagaacccactccatatggcctgtatatagggagagcacaggaggtgctaagaggcgcaacctgtcg

SEQ ID NO: 696921 - DNA, 564 bp, Homo sapiens
  misc_feature (18)..(18): n is a, c, g, or t
  misc_feature (79)..(79): n is a, c, g, or t
  misc_feature (101)..(101): n is a, c, g, or t
  misc_feature (165)..(165): n is a, c, g, or t
  misc_feature (232)..(232): n is a, c, g, or t
  misc_feature (510)..(510): n is a, c, g, or t
gcaacccagtccctccantccaggctttcccttaaccccttccccctagccagccagttcttcaattttcccccagccntggctacagtccccctacctanacccgcctccctaatctcaagtggatgacttcacttccctacttgatgaataaaattgaaatcnccagctagaagctccgtcagcttcctgctctctcccagcaaggggacctacacccacatccagtctnatcagtcccctttcttaaagtctcatgtacaagggtttcgaagctgtccttgaggtgccgtctcattgagacattgctctgccagtcattgccttgctctcctataatttcagtctctgtcttttgcttttgttcatttttttttttcagcaaagccgagaaatttgattttcagttactaaaatagatatctagcaagactaattggtgacgaaatggggggaaacgtgcaaacaagtaacactaggaacaaaacttgtgaacataactacaatagncattttttaaatcacaggattcagtgaacaaaaactatgaattacttcatgcca

SEQ ID NO: 696922 - DNA, 563 bp, Homo sapiens
  misc_feature (214)..(214): n is a, c, g, or t
gtggctccagtttgggcgacacgaataaacttgctatacacattcatgttcaggtttttgtgtagacaagttttcaacccaagtaagtaattatttagagcaattgctggattgtgtgggaagactgtgtttagctttttagaaactgccaaactgtcttccaaagtggctgtaccattttgcattcctactaacaataacaagagttcctgtngttccccatcctttttagccattctaataggtatgtatgagtatccaattgtagttttaatttgcaatgtcccatgccaaatgatgttgagaatctttttatatacttgtttgctatctgtatatctttggtgaggtggctgttcagatcttttgctcatttttaaaattgggttgtttgttttcttgttgagatttaagagttctttacacatttgtcttttatcaagtatgtgggtttccggtttcgtagcgtccagggggtcgggggttgggacttgacttttcttgtttgttctttgagacaaggtcttgctctgtcacccaggctggggttcggggtgcagtca

SEQ ID NO: 696923 - DNA, 165 bp, Homo sapiens
  misc_feature (81)..(81): n is a, c, g, or t
gggactatgtcggtggcttggttgacagatgcagacaggcttcggggcaggagagggaccaagatgaggagttgctgtggncacctctgctgctgtgtggtgcgaggctgtgagcaggtggaggccattgagtactacacaaagctggagcaggggtaccgagct

SEQ ID NO: 696924 - DNA, 373 bp, Homo sapiens
tgtgaagcaggataaatgtgcccagaaataaattcccacatttacagttaattgattttcaacaaagattccaagaacacacagtggagaaaggacagtatcttcaataaacagtgctggaaaaactggacagttgcatggagaagaatgaaattagactgtcatttcatgtcacatacaaaaataaaaaaaaactcaaaatgatttaaagactcaaacataagacctcagactataaaactactagaagaaaacaaaggagaaaagccctgtgacattggtttgggtaaagatttattagatatattcacagaagcaaaggcaagagtaggcaaatggtattacatcaaaaataaaaggcttcagcctgccc

SEQ ID NO: 696925 - DNA, 341 bp, Homo sapiens
gtggtacccttcaacatctcatactccttccaacatctcatgcctccttccaacatctcatcccccttccaacatctcatgcccccttccaagatctcatcgtatgtggtggcggaatgagatgttggaaggggatgagatcttgcgaaggggccatgagatgctccatatttttctcccactcttggattgcaaaaccaaggattgagtgattactgcaaattgttttctattgctcatcaggaatcacttgcccatgaagacagcgcctccacattaaaccacctgtcagggaactcagggactttgttgatggactcaggggatcctcttagagtcca

SEQ ID NO: 696926 - DNA, 451 bp, Homo sapiens
tattagtcctgttgtcaggatgtatacacgggtgaggattttctcccactcagggggttgcctgtttactcgggtagttactttgggcatgcagaagctctttaagtcccacctatttatcttggtttttgttgcattggctttagggttcttggtcatgaagtcttggcctaagccaatatctagaagggtttttccaatgttatcctctagaatggttagtttcagatcttagatttaagtctttgatctacttggagttgattttggtataaggtgagagacgaggattcagtttcattcttctacatgtgactggccaattctcccagcactattggttgagtagggtgttctttccccacttcaggttttggttggtttggttgaggatcagttggctgtaactatttgttaaaaaaagttcctttagaatcttctgtatttctca

SEQ ID NO: 696927 - DNA, 372 bp, Homo sapiens
gggacacgcagtgcaacactcgtgcacctgtaccacctgctgaagatgggatatagaggaacatagcctcaacgaacaagagagcatacaaggagctgtccctgtctcagacgatgaacaggtcgatgttgaaccccctgagggagaggagaaagtggagacggcagaagtgtaggacagaacagaggaacctatggagacagagcccaaaggtgctgctgatgtatagatcgtgcgggacaaggcagcactagatctgacccctattgtgctagcagactagggacagaatatagacatagtacagcgacatgaggccatgcttcagaatggagagacgcctaaggacctgaatgatgagcagaatgattt

SEQ ID NO: 696928 - DNA, 899 bp, Homo sapiens
ggcatcatcataagagtgccttttgatgcaaagtacagagaacgaaataggcagctgtggtacgatgttggtacagcagtcatcaactcaaagtctgtttataggtcacacgctgtgacacaactatcacgattgacacttctggttgatactgttggacccagactgagtggctccaagaacctagaaaaagccatccaacattatgtaccaaaacctgcagcaagatgggctggagaaagttcaacgtggagccatgtgagaataccccactgggagcaggggagaagaatcagctgtgatgctggagccaagaattcataatgatagccatcctgggctctatggcagcagcattgggacatccatccagaaggcattacagaaagaagttctggtggtgacctctcttcgatgaactgcagagaagggcctcagaagccaagagggcaagattagtcgttatataacgcaaaccttacaatcaacctaactcaaaggacggatgccaactccccgcaaacgcacgggcgtgcggctgagacaagctgaccaagagtatggcggactatagagacactctcctacaattcgcatcccgtggaccttcccttactccaatactacaggtccgtcaacgacagccgctacatcccgcgacaatacccaggagactgtgcgattgcccccagaggaactagcgcaaaccaggcccgtggcgcaacacgggaaggaaacaaaatggccagcaaacatggactgaacgaagcaaacatgggccatatcctccaatggggcagcacacacacacatccggctccaacagccaggcgtaacacgactacgacggccaacgaacccctacccaccagaataacaaggagataccgttccaaaca

SEQ ID NO: 696929 - DNA, 106 bp, Homo sapiens
ctgataacctatcttcccggggtacagcacagtgtgcttgaaagagcatgactccttgcactatgaagggcctagggttaaactcctcaattctaagtgttgtact

SEQ ID NO: 696930 - DNA, 604 bp, Homo sapiens
  misc_feature (122)..(122): n is a, c, g, or t
tcaacgattggcaccgctgagagcttcatgggagtccgaatccagtaatgacatgttaagtgctgcagatcagtagactgtatgaagcttagttagacataaggccttcatagtaactagancattcatgcgcacagtcatatgtgttttgtcaggagagcccagaatgagtgtgtaggcgtatagacaccatagcaagcctagtggtcagagtaatcaggcagtcatctatagacccagcgatgtgggatacgacatgggctgtacagagtcataagtatagtctgtacagaggcattcatactaccatgatatagtgtaagccagtgtaccagatgtgggctctaggagatgacagttggtaagcatatgagaggatttagtataatgtcagctgagcctagggccatgttagggagatctagccgtgatgattaggccaaggtagcctattagtgtgatccatacatagtaggggtatgcgttcatagcgctccgagtggtcgcctcatcatgtccatcagacacagcacgcagcatgagtgaggaaccagagtcgcagagtaatgtatgtagcttaggtcatttgacagatctaatagat

SEQ ID NO: 696931 - DNA, 119 bp, Homo sapiens
  misc_feature (107)..(108): n is a, c, g, or t
gtgcctgcctgacgtgacaaaacctgctggttcgctattagccatggtcaaccccaccgtgtcttcgacattgccgtcgacggcgagcccttgtggccgctgtctcnnctttgacgctg

SEQ ID NO: 696932 - DNA, 120 bp, Homo sapiens
ggacggctcaacggaactttgccaacatgcagaggtgtccacctgagactgctgcggattattggttacggcccgggcgagaatttacacccttctcccccgaatttacaagggccagca

SEQ ID NO: 696933 - DNA, 193 bp, Homo sapiens
cgacgaactgatagctgttggcagtctcaggggcaatcatccagaagcaaggggggcaatccataccgtcaggggcagcagaagcagagttgcacggaggtacatcctagagctggtgaagaatggaaagaggctaccacagggcttcacgagtcaggattcccaggaggacaaggctcccacgcaccagagt

SEQ ID NO: 696934 - DNA, 301 bp, Homo sapiens
tgatcataccatgccctacgtgcgctcgagttagtcgaaagcgctgaacacgcgctgagcatcccactttccaaaattgagcagtctgaccggctatggctcgacgatttcggtcagggcatcgccaacttctcttcctttaccacctggcattacgagtacatcaaaatcgcgcgcgacctgtttattctgctgcgccagagtgaagaggggtcgaggctatttttcacccttgtcacgctgatgaatcgctacagtaaaggggtgattatcgaaggtgtcgagacggcgcaagagtggg

SEQ ID NO: 696935 - DNA, 850 bp, Homo sapiens
gcggtcctccagagacagaggggccggaagttctcttcacggagccgcgcggtgcgggggcgcaaatagggtcactgggccgcttggggtgtcgttgcggtaccaggtccggtgaggggttcgggggttctgggcaggcacaaatggcgtctcgagcaggcccgcgagcggcgggacgacggagcgactttcagcaccgggagcgcgtcgccattgactaccagatgagtgtgaccctcaagtatgaaatcaagaagctgatctacgtacatctggtcatatggtgctgtggttgtaagatgagcgtgggaacctgaggtcttgtcaacatgatcaggtggccatgcctatcagtgggaatacccgtatctggtgagcatttgggcctcttctctgtgggcttctctctttccccgaaaaaaattagcctacctggtggtctccatgatcagattgggattcttttccatcgtccatcatttatggcagatggagatgttcctgttggacagaaggctctaccggcatggaaaggctaccgtttctctgggttttctgccgttcaatcatgtactggtgttggtgtgggagtgcaagtgctgctggagttgtactacagaagagtctagattgtggtgcacagcacggagagagtaatgagccctggggggaggtgaatcatggaaggagactagtcagggtcaaatctttgtgttagcagtgttgtccgggggcagccagttggagcttggtggggggaaatatcgggggaaggggggggaaaggtggagggtaaaggtctcacccccgagagaatcggggggttaacacacagagcgggcgtggtggt

SEQ ID NO: 696936 - DNA, 818 bp, Homo sapiens
  misc_feature (818)..(818): n is a, c, g, or t
cggtggctcgtgtaatcccagcacttcggggggccgaggagggaggatcacttgaagatggagacgagcctggacaacacaacaacacagcaagaccctgtctctacaaaaataaaaaattagctgggctgaggtggcgtgcacctgtggtcccagcatacactggggcctgaggtgcggaggatcgcttgaggccaggaggctaagaggctgcagagagcttgagatcagtgccattgcactctgtgcctgggtgacagagtggagagcctgtctcaaactaaaaagaaagtggctggtgctttagctaagctcaaaagccaaagagtctctgagaacgaactttggcagatcgtgtgagtacaagtcagaggacttgatcgctcacaaggtctgaggaacgaaacggggagcaaagtaggcatgtggcatgagaatgacggaaggcaagagacgctggagttaagaggacaatcgggaaccgcgaagtcagagggctgggaaaagctacgtgggaactcgggaatttgaaggaggaaaagggaagcgggaaaacaatccaggggaccactgacgtgagaccccagcgggccttggagaacaagcaaggagggcttagctcggggaaaacccaagggtggagacgcgacaagccgcggggccacggggaacacgcaggcacccacgggagaggaggcggcacattaggcgcccccaaggagacacactagggggagtaggaggcgctccaccggggagaaaagcgcacaaacacgggttgacaacagcagaaacaaaagcgcaacaacgatacgagn

SEQ ID NO: 696937 - DNA, 163 bp, Homo sapiens
ggagactgtgtacaagatagctcactatgccatgtaatgttaaatttgcttatatctaggcttacgtatcctgtgggtaataccagacaaacttaaaatcttcagactcatttttttattccctaccccgtggtacagctacccgcgggatcacaggggtacc

SEQ ID NO: 696938 - DNA, 363 bp, Homo sapiens
  misc_feature (132)..(132): n is a, c, g, or t
tagcaggatcccgtgatgttatcgcccaacacacatccttaataacagactgaagttggcagagaacagaatgatttatttttagggtaaatggaagtttgttctcagcctcttggtttcactttaactgtntaaaaaccatttgtttttgcagctaatcagtttgaggggatttggcagttggataaaaatggctgggagaggttaacggtaagggaaaactactggtttactccttccactttttcaagtctaagttaagtaaaaaacaaataaacctgggttgttaatttattaggtgtttggggggataaacaattccaggggtacccgaaggctccggaatttcggtaaatccattgg

SEQ ID NO: 696939 - DNA, 287 bp, Homo sapiens
cggcacgagggagccaagatcgcgccactacaccactctagcctgggcaagagcgaaactctgtctcaaaaaaaaaaaaaaaaaaaaaaaaaagcgaaactctgtctcaaaagaaaagaaaaaaaaaaaagtcactagaggccgggtatagtggttcacacttgtaatcccagccctttgagaagccaaggcaggaggatcgcttgaacccataagctggagaccagcctgtgcaacatggtgagaccctgtccctaccaaaaaaaataaagtcattagagttttta

SEQ ID NO: 696940 - DNA, 390 bp, Homo sapiens
ccttccaccatagagacaacccctcgctagacgtgaactcagaactgtcggaggaaagacaacacaaccaacgcgaaaccaattcctcatcctcagatgctcaaagttgttttttttgtttgtttgtttattagatgaattatcctatttcagtacttcagcaggagagaccctaactgtatcttgaggtggtagtaaacacagagggccagtacgggtcgtaatgacttattgtggatacaagatatctttcctttagagactgaagggagcaggattacatgaatgttagtttgactctcctgtattcagtgctggatttactgatgcctataccgtgcttccacgcaccaggtgctatgctgtgagcaatgctattagtcatgtctt

SEQ ID NO: 696941 - DNA, 743 bp, Homo sapiens
  misc_feature (148)..(148): n is a, c, g, or t
gagaagtgtcctagtgaaagagtacctttcttgcttcttgtatcccttcaggaaaaagtgtttggaaagttctgtgccaagaagttcctccctatgtccttgctgtttaggtaattttctttgttctgttgatttgtcggggggcggnggggagaaaaaaaccaccactaatagtaaaagcagtaactgctagggctttagagcttccagcgccctctaggtacatcattctgttactttccaccctagaacagggtctggcacatagtacgtcctcagtataccgaatgaaccaatggatggatgaatgaatgaattactgaatatatcaataaactgccggaggaaagaattacccccatttattttatggacagtggaaacaaaggctaagagactagaattcagactctggcctgattccattgacattaatatttcagacgctggaagaccaagggctccggcattttactgagagtttggactggatctgccttgtgaccatgtcattgacgtttatccatgacaggccacccccattaagcctaccctgctgtgcccatcattaccgtgccgtcctctcgtggcggtcgtattccccagaccttctctaagaggaccaatgtcaataggacattctcccctgtctatggggaggggctcacgtatcttgactttcacactggtttcaatctgacaggcattggccgtctttgccatacgccctcctactatcctct

SEQ ID NO: 696942 - DNA, 1029 bp, Homo sapiens
  misc_feature (675)..(675): n is a, c, g, or t
  misc_feature (787)..(787): n is a, c, g, or t
  misc_feature (845)..(845): n is a, c, g, or t
  misc_feature (855)..(855): n is a, c, g, or t
  misc_feature (863)..(863): n is a, c, g, or t
  misc_feature (866)..(866): n is a, c, g, or t
  misc_feature (885)..(885): n is a, c, g, or t
  misc_feature (897)..(897): n is a, c, g, or t
  misc_feature (914)..(914): n is a, c, g, or t
  misc_feature (916)..(916): n is a, c, g, or t
  misc_feature (982)..(982): n is a, c, g, or t
  misc_feature (1026)..(1026): n is a, c, g, or t
gcatctggtaggtgctggactgtccctttgagtgggtatgcatggatgcccctgttgctgatacgagcgcaagtgctgcggggataccatacaagggaggatgcgcaatcccattacaacacatgtgtgcacggataagtactcaccgcgccgtgtgtggattactcacgtgtcacacatctgattccgttgcaagagatctcgtggcattctcctgagatggcattatgattgtcacgagtatccatcgttgcgccatgaacaacgatgatcgcttcgaccgctacgtgaaagcgcaaggttgctcgttcgcgagcctggtcatataatgttaaggaaactctgccactgtctctccatcggtgtgccatcggcagatatcgctaggttgccttgggcataggtctacctagatcccgtgaaataagctagaacgtgcgtcgctagcgtttggcacgtggatgtctagtgttgcttagctcctctaaagaagtgagatatgctctgaatgagaagagaaagcatccccactcccacgttgttggtcctgagcctatgtgaatatcccattcctacacgctttgatacctcgcgctgggatacatggtgcgtaggcgtccaatagtgtaaggtcatttgcaactccacgttccatagcgagacaccatctctctnggagtgtcacatacatatacacatagatacacagacctggaatggaacaattagcccgaacaaaagtaggagagggcgtttgggggctccgtgtgctagtatatagacctangttgccccttggtgtgattagttggtgtcgccgttagaggatggagttgacatggctnccgtacggtnctgttaancgncatatgtgctttggataancattcggatagncaacgcagataccaagntncgtggccgcatctgccctatttatcctagttcgagagagcgagacagagcaagtgtttatctcaanaggggagcccatggcagggttccttttacgcgctaccctagttntgg

SEQ ID NO: 696943 - DNA, 953 bp, Homo sapiens
gcagaggccggcattggtcactatggaggagataggcatcgtatgcgtggagaaggctcaggatgagatcccagacactgtgcggtgtcccggccccagaccggcctgtccttcctgggccctgagccatgaggacctggaggacctggtacagcctgcgtacatagaagctgcagcaagagcgtggagttccgtggaggtgcaggaggcagatacgatcagagatgagcaaagagaacctgcaaaaaggaatttctccgagtgcccaggaggaggtgaagcgatctccaagagactgtcccgcttggtcatcgtgacaatttgcgtaggaggcgtgtggatcaggaatacagccatcgtgggctctaccatgaggacatccaactattagtgtgcgcatcacgtggagcacgcattgcgatcggggtacgactgcatcgaaggcgcgcaaagcaggcactcagataggacactactcagaatgactacgatggcaattgtcaactgtgatgggagcagtgacgtgaacgcccctgaaagcgcagactagctagcaatcatggatgcgtaagctcagagccagaagaccggatgtgagtgtacgcggacatcggaggcatggacatccagaagcaggaggtgcgggaggccgtggagctcccgatcacgcataacgagcgtctacaaagcagatcggaatcgatcccccccgaggcgtcctcatgtatggcccacctggactgtgggaagaccaatgtaggccaaggcggtggcacaatcacacaacagatgacagttcaatcaggggtcgggggctcaggaggtaggacagaaagtatcctgggtgacgggcccccgacagtggtccgggaatgtgtaccgccatggcacaaggagaatgacactggcaaccaaactactacaacaagacggaagccacgacaaccagaaat

SEQ ID NO: 696944 - DNA, 198 bp, Homo sapiens
gacctgtggaggttggataggggtggggggtgtaccttcaaagtacttggaattctttatcacagaaataaaactcagattctcttctatctagtttacttctaagttccaaatttacaacaagaaccagtttgacattcgcagtaggagataatgtcttgaaccagtgagcttggctatccttctttcatcatagcg

SEQ ID NO: 696945 - DNA, 1601 bp, Homo sapiens
  misc_feature (26)..(26): n is a, c, g, or t
  misc_feature (193)..(193): n is a, c, g, or t
  misc_feature (258)..(258): n is a, c, g, or t
  misc_feature (300)..(300): n is a, c, g, or t
  misc_feature (516)..(516): n is a, c, g, or t
  misc_feature (752)..(752): n is a, c, g, or t
  misc_feature (919)..(919): n is a, c, g, or t
  misc_feature (955)..(955): n is a, c, g, or t
  misc_feature (1048)..(1048): n is a, c, g, or t
  misc_feature (1074)..(1074): n is a, c, g, or t
  misc_feature (1221)..(1221): n is a, c, g, or t
  misc_feature (1233)..(1233): n is a, c, g, or t
  misc_feature (1276)..(1276): n is a, c, g, or t
  misc_feature (1291)..(1291): n is a, c, g, or t
  misc_feature (1374)..(1374): n is a, c, g, or t
  misc_feature (1378)..(1378): n is a, c, g, or t
  misc_feature (1406)..(1406): n is a, c, g, or t
  misc_feature (1424)..(1424): n is a, c, g, or t
  misc_feature (1426)..(1426): n is a, c, g, or t
  misc_feature (1570)..(1570): n is a, c, g, or t
tgtatagatattatgcagtaataagntcgatgagagaacaatgtatatatagatagataatgtaagataatatagatgacgtaagtcaagatgtactgactatgtacttctgatatagatgatgatcgtgagtcagtatatatatgtggaagtgatactagaggatagtgtgtgctgtcccgtttgtgtctantctatagtgcattgagatgattgatgtgagagcaactagatggcgacagcacgctcacaacgtanaattaatatcacttacactcagatacatttatacgcatacantcagtttgttctacgctacactcggtatacaaatgtcattaacacagacatgaggtcgcatcgcgctagagtatgacgcgcgataagcttagacgagcgcagtacgcagtaagagcgcgcgacgcagacgcctggccgagatcgtgagtgacagcggatgcacagcagcacgtcattctacggactacgacatgacttacaatagcgacgtcactncagagatcgctagttatacaggtggaggagtacgtgcgcgcggcgagccggagtcggcagacgtcacgcagtgtgctgcgtagtgcgcggcgctcttaccgtgtcttagccagcgcgcatcactatgtctctactccgattggtaagttcggcgtcgtgcatgtatcttgtgcaggcagatcacgtccgaacacgtggacactggcgaggagagaccgacgcactagacagaacantaagagcgaatcgtatagctcacattgctcgatgccacgcatcgagcggcggacgcatctgagcccgcctgcctgtcgtcgtcatgctcggtcttgtacgtgcgagtcgcagagctacatacaccgaggccagattcacaagagatattgaaagaccgcgccacgtnaagtctctcacactcatggacctcgccagctactcnatcgtcagaactcgatcatgagacaccgaagaggtgagtacgagctcgcagagacgcacaatcacagagtagatgtgtaatctactatcactntcgcagttcgcgtccgactacgcgancgcgcacactacacgcacacgcatacatcatattcgagtaagagtcttaactgcatgtcttgcgcacgtctccgcaccctgtctcagtcttctgctctgcgcgctcgtacgatagagactagatgacgacgtactagtccgtgcacntgtactcaggtncatactccgcgctactctgtcctggtgtgctatacacatgtcncggatgtaagacacnatcactagactactctacgtgcagctgtctgatagcagtgaacggtgagatgagcgtcatgcggcatctcgactccgtgagantgcncggctcgcaccgacatacggccggaatncgtctgtatatgtgtctncntagtatagatatgtagatatgcgcgactatacagagtacacatcgatgcgcgatgagttcggcgtatatgtctacgacgtcgtccatgacgcggcgccgacagatcgtcgagcatcctactactcttgcacaacgactgacaanatgttcatcagagtcgattgcactgtcgaat

SEQ ID NO: 696946 - DNA, 164 bp, Homo sapiens
ttaccagagacacggtggtctaccctgcggacgtggttctgtttgaggcgcactcttggtgttctacatcgcggtaatccgggacatgttccacctgcgcctcttcgtgggcaccgactccggcgtcaggctgtctcgaagacgttctccgggacgtgcgctga

SEQ ID NO: 696947 - DNA, 154 bp, Homo sapiens
cttggtggatcactgatacgggagttgggcgagcgagtggcgcatgcctcgggtgccggcggcaagaagcaggcagcccatgtctgctcttacaattcctggcctctagcagtcttcctacctcagcctcctgagtagctgggattacagatct

SEQ ID NO: 696948 - DNA, 415 bp, Homo sapiens
  misc_feature (8)..(8): n is a, c, g, or t
  misc_feature (323)..(323): n is a, c, g, or t
  misc_feature (344)..(344): n is a, c, g, or t
  misc_feature (407)..(407): n is a, c, g, or t
cgtcagantcaactcatgcaggctcatatcgaccgtccgtaccgcttgatcattgatccagtggtgtctacctacttacgaggctgctgatgacatgtaggcttatgagaggatacctttagccaacactgacttagctctcatactaagtctactaatgagagacgacagggatacattggctcgatgacaacatgaatgacacgtgtgtcagcaaccaactgaagtgatggttccgtatattcgtattctttcagcgtattactcagcgtatgaacccaattaactgctgaagtgcatcgtggcgaagtacgcagtggccntgtacattggacacacttgtnagtgtagttgtcaatctatcactattttgtgaagagaataacattgatagacatattcagctnctattata

SEQ ID NO: 696949 - DNA, 964 bp, Homo sapiens
  misc_feature (22)..(22): n is a, c, g, or t
  misc_feature (84)..(84): n is a, c, g, or t
  misc_feature (89)..(94): n is a, c, g, or t
  misc_feature (115)..(115): n is a, c, g, or t
  misc_feature (122)..(122): n is a, c, g, or t
  misc_feature (130)..(130): n is a, c, g, or t
  misc_feature (137)..(137): n is a, c, g, or t
  misc_feature (146)..(146): n is a, c, g, or t
  misc_feature (186)..(186): n is a, c, g, or t
  misc_feature (197)..(197): n is a, c, g, or t
  misc_feature (206)..(206): n is a, c, g, or t
  misc_feature (213)..(213): n is a, c, g, or t
  misc_feature (228)..(228): n is a, c, g, or t
  misc_feature (235)..(235): n is a, c, g, or t
  misc_feature (237)..(237): n is a, c, g, or t
  misc_feature (268)..(268): n is a, c, g, or t
  misc_feature (281)..(281): n is a, c, g, or t
  misc_feature (295)..(295): n is a, c, g, or t
  misc_feature (299)..(299): n is a, c, g, or t
  misc_feature (314)..(314): n is a, c, g, or t
  misc_feature (327)..(327): n is a, c, g, or t
  misc_feature (331)..(331): n is a, c, g, or t
  misc_feature (341)..(341): n is a, c, g, or t
  misc_feature (350)..(351): n is a, c, g, or t
  misc_feature (396)..(396): n is a, c, g, or t
  misc_feature (398)..(398): n is a, c, g, or t
  misc_feature (401)..(401): n is a, c, g, or t
  misc_feature (407)..(407): n is a, c, g, or t
  misc_feature (412)..(412): n is a, c, g, or t
  misc_feature (420)..(420): n is a, c, g, or t
  misc_feature (426)..(426): n is a, c, g, or t
  misc_feature (429)..(429): n is a, c, g, or t
  misc_feature (431)..(432): n is a, c, g, or t
  misc_feature (435)..(437): n is a, c, g, or t
  misc_feature (441)..(441): n is a, c, g, or t
  misc_feature (475)..(477): n is a, c, g, or t
  misc_feature (479)..(479): n is a, c, g, or t
  misc_feature (483)..(483): n is a, c, g, or t
  misc_feature (503)..(503): n is a, c, g, or t
  misc_feature (511)..(511): n is a, c, g, or t
  misc_feature (515)..(515): n is a, c, g, or t
  misc_feature (519)..(519): n is a, c, g, or t
  misc_feature (546)..(546): n is a, c, g, or t
  misc_feature (559)..(559): n is a, c, g, or t
  misc_feature (563)..(563): n is a, c, g, or t
  misc_feature (581)..(581): n is a, c, g, or t
  misc_feature (586)..(586): n is a, c, g, or t
  misc_feature (595)..(595): n is a, c, g, or t
  misc_feature (597)..(597): n is a, c, g, or t
  misc_feature (599)..(599): n is a, c, g, or t
  misc_feature (640)..(641): n is a, c, g, or t
  misc_feature (956)..(956): n is a, c, g, or t
ggattctttagggaggcttttnttggcattttcctatttactatattatcaatttatctacataaatcacattcattatatttnccccnnnnnngacacagggtctcagtcagtngcgcggnggggggtngggtggngtgggcgcngctcactggggccgagagccactgggttcagctgatcctnccaactgagcntcttaagtnactaggnctacaggcacacganaccatcncnagctaattttttttttttttttaatttttgnttttttttttttnctcattttggtttnatanttctggtctcatgcnatcctcccacttnggcntcccaaagtnctgggattnnaggcatgaaccactgcccactgcctccagccatattatagatttntngcnatattntagcnatattatngatatnttntnnttnnntttntttcctatacctacatgatttttactagcttaannntnaatnaataaattacaaacaataanaccataanatcnaggnagatgagggctgttgtatgttcctttncattttatttgcnatanacattaagataattcagnttatnctggagatntntngcttttttgttatttcttgatgctaagcttcacacttaatnnttatgcttgctccccccatccaccccaattcaacatgcagatatcatttattttcttatatgctgattctagagcattgtaatctcgacggttttttaagagttatctttgcccttgcaacaatttcacaaactgtatacaatcatggtataataccatcattcaaatgaatccctaaggtgagtacatttacacaatattaacacttaaaaatctgtgtttttttaaaacaccatagaagtcaaaccacaaaaacccaggatcttgttttaaatgtgtttatgaagactgctgctgagctcaagcatgcaggtnatcatgac

SEQ ID NO: 696950 - DNA, 375 bp, Homo sapiens
  misc_feature (239)..(239): n is a, c, g, or t
  misc_feature (243)..(243): n is a, c, g, or t
ttggtagctattgtaaatgggattgtgatatagttcagatatttgtcccctccaaagctcatgttgaaatgttatcccaatattggagatagggctcagtgggaggtgtttgggtcatgggggtggatctctcatgaatgttttgctgccctccacattataagagagttcttgctctgttagtttatatgagctctgggtgttaaagagtctgggacttcctcccctcctgctctctntgcncatctctggctgtgtcacacttgaactcccctttcccatttgccatgattggaagctccctaaatccctcacccgaaacagatgctggtgccatgcttcttgtgcagcctgcagaaccacaaaacaaataag

SEQ ID NO: 696951 - DNA, 353 bp, Homo sapiens
gtgcctccagaccttattctcttgcctcaagcctacctaagtgatagggtttggctgtgtccccacccaaacctcatcttgaattgtagctcccataattcctacatgttgtgggagggacccagtgggagataattaaatcatgggggcagtttcctccagactgttcttgtggtagtgaagaagtctcatgtgatctgatggttttataaggggaaacccctttcgctcagttctcattctctcttgtctgccgccatgtaagatgtgcctttcaccttccactgtgattgtgaggcctccccgccacatggaactgtgagtccattaaacctctttttctttataaatta

SEQ ID NO: 696952 - DNA, 394 bp, Homo sapiens
tcggtccagactcggcaccgatcacaagcctgggccacttaatgtggcatcaaacagacgcctcaataaatcagtctaatctcgaaaaaaaaaagacttaacagatatacaatggcacgttagaatgctaaagaccataaacatataacaacttaaagtacatataaattcaatatatatccaatcattgtaactatgacacagtagaatattaaaatactattttcaaaatgtatacaagcttaatgttctatgtattcaaactatttattcaaaatacaaatcatcaacatacattgccactaatattcagtcccttcacaggacatgattcactgggagttaataaattagcagccagcaggcagtgacacaccgcaaaaatgaaaaccaa

SEQ ID NO: 696953 - DNA, 538 bp, Homo sapiens
taaaaaaaaaaaaaaatttaaaaaattttttttttgggtttttaaaaaaaatttacagggaaaaaaaattacaaaaaaaaaaaagggcaaaaaacggggtaaaaggaaagggtttttgggaaaaaaaacaaaaaaaaaaaaaatttttgaaatttttcttgggggtaaatttaacccccttattcccagaaaaaggcttgaaaacttaaacctgggaaaaaaacccaaacccgggcctttccccaaatgtgggccacaacaatttcggaaaaaattgggcaaaatggttttttttggttaatgggtcgggggaaaatttaaaaagagggaaacccttttttttccctggtccctcggttgaaaggggcttaaaacccctttaaaaaaagttttaaaaggctctgtaaaaggggggaaaaaaaaggggaataaaaaaaagacttttaggaaaccttaaaaaagggaccttttgggggctttatatggtttcttaaaatgaggccacaagggggggccccaggtgtaatatataataaaa

SEQ ID NO: 696954 - DNA, 816 bp, Homo sapiens
cagtgatgacgcgatgtagtacgataatgcttattccacaggcctacccacatgaccgaagctgttccatataactggttcttcgatggactgggatacactccgtattatatgacctcgaggagagtcaatggacatatcgaatgactttcactgagctcatattcaactacgtccaggcttaggcagaaaactccacagtacgtggcggggtattggatccttcaatgaggcgctcgagctcacgtgtgacatcagatgaaaaggtcccgactccttaaagatcatctagcataaatcgcgactaagggagttttcattgcactttgataattagtcgagtaggttttagggagagagcactatgttcggaaagggagaattaatactagggcaaaggcttagttgacaaattgctttattgaggtctcaatatttatatgccttcgttgaatagagcattctagtagataactaacgagttgctttttgaaccgattgattgagaagggaatcaaggtggaaaaaagaagtgttagatcacgtaataaggggtatcataaggagaattattaagatcgatagaatgtgggctcgattttataggattcgacgtgatcatggcattggagtccggataaatatagataatttcacgtaaaaaaaggttgcgaagtgatgaagtgtgtggagtatcaaaaaacctgaagacctgggtaatttggcatattcagggagcatgtggtaaagcctgggtttagtgttgtcacagaaaattgttgagggtcttcatggatggaatgaaaaaaatgacgg

SEQ ID NO: 696955 - DNA, 242 bp, Homo sapiens
gcccctcgcggggagccctgctcctttgacacgccatgagtgttgcacctggggcattcccgggacccgcggccaaattggcaccacagcctaagtttctcgggctcccgtgggccaccatcagcccccggcggcctcgagtcgcgctgctgctcgacagccccacgtcggcacgccgcgccgccctcctgctcttcggcctcgtcctgctcctcctccgcctcctcctgttcgcacgctcc

SEQ ID NO: 696956 - DNA, 615 bp, Homo sapiens
actaagagataagcacagagggaagaaagaagatagctatctgccaaccaaggaaaggctcagaagaaactaatcctgctgacaccttcgccttggattttcagcctcgtggaaatgtgaggaaataaatttctgctgtttaagccacccagtgtgtgatactttcttatgaaagccttagcaggccaggcacagtggcaggcgcctgtaatctcagctacttgggaggctgaggcaggatagtcgcttgaacctgggaagcaggggttgcagagaggcaagatgacgccgttgcagtccaatcagggcagcaagagtgaaactctgtcccccccaaaaaaaaaggaaagaaaattgggttgggtgcagtgactcacacctataatcccaccactttgggaggccggggtggatgcatcacctgagttcagaagtttgagaccagcctgggcaacaaggtaagaccccatctctacaaaaaataacctgggtgtgtggtagcatgtatttgtggtcccagccaccatggagactgaggtgggaggatcacctgagcctgcgaagtcaaggctgtgtgagctgagatcacgccacagcactccagcctggaagaca

SEQ ID NO: 696957 - DNA, 702 bp, Homo sapiens
  misc_feature (2)..(2): n is a, c, g, or t
  misc_feature (108)..(108): n is a, c, g, or t
  misc_feature (114)..(114): n is a, c, g, or t
  misc_feature (127)..(127): n is a, c, g, or t
  misc_feature (155)..(156): n is a, c, g, or t
  misc_feature (309)..(309): n is a, c, g, or t
  misc_feature (369)..(369): n is a, c, g, or t
  misc_feature (389)..(389): n is a, c, g, or t
  misc_feature (438)..(438): n is a, c, g, or t
  misc_feature (440)..(440): n is a, c, g, or t
  misc_feature (509)..(510): n is a, c, g, or t
  misc_feature (512)..(514): n is a, c, g, or t
  misc_feature (516)..(517): n is a, c, g, or t
  misc_feature (519)..(519): n is a, c, g, or t
  misc_feature (521)..(521): n is a, c, g, or t
  misc_feature (526)..(526): n is a, c, g, or t
  misc_feature (546)..(546): n is a, c, g, or t
  misc_feature (548)..(548): n is a, c, g, or t
  misc_feature (554)..(554): n is a, c, g, or t
  misc_feature (574)..(574): n is a, c, g, or t
  misc_feature (576)..(576): n is a, c, g, or t
  misc_feature (591)..(591): n is a, c, g, or t
  misc_feature (595)..(596): n is a, c, g, or t
  misc_feature (600)..(600): n is a, c, g, or t
  misc_feature (613)..(613): n is a, c, g, or t
  misc_feature (689)..(689): n is a, c, g, or t
gntgccatcacatgccaagccccaccacacacacgcccccgcgggtggccttgccctcgaagctctctgccagcccaaactcctcagctttctggggccacaccctgntcaggnagacatgccactngccctggcttgtttttgggaccccaggnngcccaagggaaaggtaccgctcccaggtgctgcgcggctctgccctgcccactctaaccctggggctagcaagacgtgtcaggggaaccaaggctcagatcattcccccttcatctacaaccctgccagccctacagggataaatcaaaaganaaaatctccccatctcacagcgagtgaaaagccgacctgggctactacatgtcccaagangcacagctccgtaaccatanaccacctcccccaagcgggatttatcagaaatgaggccgggcacaccgnantctgggatttgtagtccccaggagccagcaccaaacacccaaggaagagagtgcacaggctaagactanngnnncnncncncccgncccccacccgccacccaggnanaggctntaaaataaacatgggttaangngaaaaatggagggtncctnncagngcatgggggaagngctgtcctgttggaactgtgcagcgattctggaacccggcatccagctcagaacacatctggggagagagaggggnggggtgacagaga

SEQ ID NO: 696958 - DNA, 209 bp, Homo sapiens
ggagcggggataccggatcgttccccagtccgatcatacttactaccatctctgtgacaaacataaatacaaaaggtacccacactccgccccccgatccactttgggcccctaatatatgaaatgtcgctactgcaaaatggggaccaaatagtgaatactgggctcttcccacagatagatacctattcctgatgaaaatctattca

SEQ ID NO: 696959 - DNA, 122 bp, Homo sapiens
agcctcgcctttgcctgatcctgccgcccgtccacacccgccgccagctcaccatggatgatgatatcgccgcgctcgtcgtcgacaactggctccggcattgtgcaatggcctggctttcg

SEQ ID NO: 696960 - DNA, 218 bp, Homo sapiens
ggccatgggaattgattggtcttttattgatcatgaattgagagattggaatgatgtggtattgggaggacaagtgcttaattgttgagcccgggtgaagcaatatccagggtttctatggggggttattttcgtatcatatgagagggttgccttgtcgtgtaactgaaaaggacattgttaatattcttctccccactaaatccaaaacgtgtcca

SEQ ID NO: 696961 - DNA, 303 bp, Homo sapiens
ccgaatcttctagcaggaatacaagcgctttgtgcatgggcagtcgtctatctgagcccctcctaccggctggactggagcctggctccactcttcggtgagctgacaagggccaccccaactcctgtagacgggcctatgcccgcctcccgccctacaagctgctccaagcatggtctgagtgcctagtgctgcgaggatcccaccgggcagggcctccagcctagatcactgacctgtgtatccctctatcagaagtaccttccctggctgccggaggagagcctattaacccagtctgcc

SEQ ID NO: 696962 - DNA, 687 bp, Homo sapiens
gcaagtcagcaaagtgatctgagtggatatatgtgaaggtatctcgaaacgtgacgttcaatggctaacaccgtgagcttggtgtaatgttaataagaccttgatgtggatgaacctttcagctaatttaattatgtgtcccttacatgccaagtgatgtacaggtttggaatgttttgtatcagttttttcctttgtaaatggcattaacatgttacttgaggtcatgcttaagtcactttgttgtcctgaggacttgatctgtaacagtgcatcaagatttgttgcaaatttgtctgtagatagtctatgcttcagactgtgtatggtgatgctagcattttcgtttataaagtatgttagtggtataaaataaatgagtataaccatgggtttggaacaaatttggcttacattgttcatacaagaaatcataaagtatctgtatgctattgaagtttaactttgtatgatgcttaaaaagccactatgtggggaaataataaaataagtctttaccatgtatgaaagaaggttttaaaacatacaaagatattgtcctgattagcatctagcttataataaattttccaaaaagctgaaggcaaaaatgccttcatcaggatgcactgagaactatatagttacgtcctgcttttgtataaactgagatgctcacatgcttcc

SEQ ID NO: 696963 - DNA, 154 bp, Homo sapiens
cctaaacctgacactgatctcatctctgacaaatgttcacattccttccccaaatctctgatgacactctgatcttgagaatgactctgagagaagctcatagagatgaaagaaatctccaccaaagaaagactcagggagaactgagattgag

SEQ ID NO: 696964 - DNA, 119 bp, Homo sapiens
gaggacagaaggataaacagaagggtgacatgttggtagctgttgaagatgggctgtagagacatgtgggttcattacactattttcgtctctgtgtgtgaatttctgtaaaaaggttt

SEQ ID NO: 696965 - DNA, 340 bp, Homo sapiens
actggggagtcagacggcgctatgtacgccctcttcctgcaatattatgtatctggaatctagccgggccctttggttttgaagatacaagggctatggttatgtaacccaggctggcttacaaggccatagcttaaagagatcgcgtctcaccacagatatccaaagtgctgggattgcaggtgtgattcatggcacccagactttgctgcctttgtgacatgatccaggcccagaacccaaactcaggcacggtatagatgaccactttcgtaaactactgacctagcttgtcgccaattgttgattgaacttcccataactccacttcgtgtctgta

SEQ ID NO: 696966 - DNA, 82 bp, Homo sapiens
caatgtaaatattatgtctttcccaaggaaagccggcaagctaggaagaaggctgtactcatctggattctaatttctcctc

SEQ ID NO: 696967 - DNA, 214 bp, Homo sapiens
  misc_feature (85)..(85): n is a, c, g, or t
  misc_feature (138)..(138): n is a, c, g, or t
  misc_feature (190)..(190): n is a, c, g, or t
ggcgaccggctgaaggcttgtgaaaaagcagttgaagaagcaccgctcaggggaggagcatgacaaactgcaacagctgcttcanggatggagcaacaagagatggcacagcaggaacgcaagcagcagcaggagctngctttggccttgaagcaggagcgccgggctcaggcacagcagggcatcgcantacttcctgaagaaatctgagcag

SEQ ID NO: 696968 - DNA, 274 bp, Homo sapiens
tcttcaggttccaggctgctgagcaggatgaaatgaggcttgagctgcagagatctgctaactcaaacccggctatggcaccccgagaacgcaaagctgggtttgagttagcagatctctgcagtcaaaccccggctatggcacccccgagaacgcaaagctggctgcaagaatttcttctggaagactttcacatcctgttagctttcttaactagtattgtccatatcaagacctctgatccctcgcccccacaccccatctctctttccct

SEQ ID NO: 696969 - DNA, 131 bp, Homo sapiens
tgacccagagcagctgaacaggaatcaaagcctcgggaaatccaagggctgctgtcaggaaaataccgacaacttccccgaggtgggacgcaggggcaggcaggccatctgtcaccagattgacccagagc

SEQ ID NO: 696970 - DNA, 108 bp, Homo sapiens
  misc_feature (3)..(3): n is a, c, g, or t
agnctcgaggaggctcgaaggctggaggaggctacgatttttatgatgtcattttgcgtaagggcgcagactgctgcgagcagagtgttgatagcgcctaagcatagt

SEQ ID NO: 696971 - DNA, 688 bp, Homo sapiens
  misc_feature (188)..(188): n is a, c, g, or t
gttcccgttttgtctgtcaacctcagtgtatttcacagtagaatgatcttgtctttgggaccggaagccttctgaagtccctctcctggtctgtgcttcagtgggcatgatcaactttcacctgtcctcttttttccaggcttccaaaagaggaccactccttctgagagacacatttttctttgatngtgttaatcctacagcctgattacccacccctcctgctagtcttagagtccagcagaccaggtggtctctttctgttaactttgcatatctttaaatctagtggattttgcagattatcacttgggggtatgtttcctggattgtaaccatggggtactgattgtaaaacatgcaattgatttaataatagctttttaaaatgagtaagtagtcacatgggctatttgagaaacaggtttcaagtcattgagtcattgaggggaccttgcattgtggacctctaatgaatgttaactgactggctgaatgaataaatgaatgagagaaggacagagatttctgatctagtaaaaggatatcttacattaagacaacggaggccaggcgaggtggctcacacctgtaatcccagcacttagggaggcccagatgggtggattgcttgagcgcaggagttcgagaccagcttgcgcaacataacgaaaccccatctctgcaa

SEQ ID NO: 696972 - DNA, 334 bp, Homo sapiens
cagcatggactagcattctgtgtcttggatgaggaccacatgcagtagtaggcttgtctatagaagctgtgtagtacaaaaactctcatttcttagcatcccactgacaggggataacactggcaagcaggcgttgtgggaatgcgccacagttgagcagcacagtagatctgtagttttccatctcactccctgtccagcctatgttcacaaagtaaagcatggtggctcgagctgcctgtatgatctgtccactgtcatctttctctgttctccctgttcgtgtgtgctcgctcgctctctctgctggatgtgtacagttgcatttctgggt

SEQ ID NO: 696973 - DNA, 1587 bp, Homo sapiens
  misc_feature (814)..(814): n is a, c, g, or t
gaaaaaacacatgggtttattgtggagacaaagaacatgggttaaaaaaactccaggtgggtaaaaactcaggacgagacacacagcaacgttattttacaggatacgtaatacagggtgggcccgggccttttaggcatacacctcataggcagaagggtacacatgtgggcagcggccctttacgaggctacgacctctataagaacacgagggtgtggccacaagcccccgcgggtgtggccacgagctctcgtgggaggaggtgcgtgtgccccagagggagggggagaaaaagtgcgagataccggggcgatacaaaacttctctctcgtggtggcgagctctccaacgagagagtgagaggctcgtgggcgtgcggacagaagtggcgtgggtgctcagcccacaaagccagtggcgtggcccctcatcgcgtggatacgcggtgggctctcccaaaggacagagaaaaagcgtgggttctcgtggggcatgattctccttctcaggctacgaggtctacatgtcgtgggaccatctcgcgtggggcttacctctctcgcgttgggaggggggggcatctcttgtgtggacccaaggcctttggcgcccaattccgagcggttgggcccccttttcccgaggcttcgaggctccccagcgtgggtggccctttaggggggacccaaggtgccccggacaaacaagactgggagtaacccattggggcgctaataacaggcgcagggacacggcgtgggagaacagggcgacgtgggcttcccaacttccattttcatccaaatacccntacgcgaggggtgacaagggtgggggaggatttgggccacccgtgcgccggggccatgaggtagggggcgccctcacactatccggggctgtggaaaacaaacgccgttaaaaactaacagtggaacccgcagattatgagggaagggccgatgaacaaaggcggtaaaaccacggcctataaatggacaccctgatgtgcggggagggcgcacaagttggggtatcccccaaccgacggacctgtggggggtgcgcacctgggaaacaggttgggggcccccccacagagaaaaccacgaggcttttgcgggagcagtggccactgggtaccccatctcacattaaagagcgaggtggtgcccccctccctttaacatgggcgcacggggggggggtgtactaacaaaccccatatcaccgggagggtttgggcgaccaccgccgaaaatgtgtgagaagaggagcaaccaaagcgatccaaaggaaacgtgtgctaaaagcgcgggtggtcggcccccattaagtacaccagcgtataatgttaacaccccgcgccccggtgcgaccagaggagaagaagcaaccaccaccgggaggaagagacaggaccgacagaacgagcgatagagatactaaccgccagaggcgaccacaccacaagcagcgagggagtactgccgaggagagctggcagagagaacaaccagagcttaacaaccaaccgagaacaacaaacggaagacaacacaccacgaacgagagcgagctgca

SEQ ID NO: 696974 - DNA, 167 bp, Homo sapiens
ttaagaattcggactctaagaagctagtccgatgaaacccgagcaatggaagaacccggagtccagcgctggttgtgcggggcccaagatccattcccaggcccgccccgtccctgtggaagtggtccagaagttctgtcgcattgacaaatcccggtacatgcaag

SEQ ID NO: 696975 - DNA, 730 bp, Homo sapiens
tcaatggtccagtttcctttaatgacccccatctccctgaaagggcaggtgcaggcagctaggtgatggcaaaaaatgttcacttgaaaatcttgccctgattgaaggtcttggcccacatgtgcgtggagggccccctctcccgaggaaaagtacctctcgaaccagcgttcgtgggtcctcctcgcgtgccaaggactccagtttctccgccatgtgtgtgtattgacttcgttagctccaccgtgccaatctcgtggacttcaggcggaagaggcaagcctccgtggccctcgagaagacccagactctccaaaaatgtggagcgtgcatagtgtggtgtggtctccaaaaaaaggatgtgacaccgtggcagaaggcatttctatcctatcagacttggtctccagtctcgtctgtggaaacattctcacaagtgtgatgtgaagattgtgcgaagctctcatgtgacaaggtctcgtgagagtgagttctctctcgagcgggaagcgaatactcgtgagttaccacgaggggaaccagcgcgtccttaatcaaaggtgcccccagaaatttggcagtgccaccagagagtggtgtcctcaatgggagtactggcgcttaaatttcatccaacacaaagggtactctgtgggcaggtgagcgaaggggtcctgtggccctggggctcagcaagccagcgcctgttccactttcatccatctcctcc

SEQ ID NO: 696976 - DNA, 110 bp, Homo sapiens
taatcagctcggtaccatctctccacactggtcaggctcatcttctacctggaaagggtgaaggctgtggacccctaagactggccgggagatcccttacacatttgagg

SEQ ID NO: 696977 - DNA, 393 bp, Homo sapiens
aacgcgctatcacgcgcagcaggatgctgtctctcggctgagtctaggagaccagtgctaaagtagagaggagtatctcgaatgctggcttgctgaagcttccaatgcaagtttctcgcggcctcccaggcaagtctttttcatcgtcatttctttttcccctgagccagttgatccccgtccaaaagcgctctcggaagctcaggaaagcgacttagctctcgtagcacttagacccctcatcctacaatgcaaagccaaaaacactgtggcctccaggactctctgtgggcggactcggccctaaggagtttggtcgcattttttaggtagcagggtaggaggccaaaaagcctgcagtgcaaacatacgggattggcctgtgaataaaag

SEQ ID NO: 696978 - DNA, 165 bp, Homo sapiens
  misc_feature (53)..(53): n is a, c, g, or t
  misc_feature (60)..(60): n is a, c, g, or t
  misc_feature (88)..(88): n is a, c, g, or t
cctcgccggtaggctacgccaccgagtgaagccggccgcggccaatcgcgcgncccgccntgctcccagtggcacggcctgggggcancgtccgccgggctggggaagccgttccaagttccaagggtcgcgggtgtaactcatgcccctcccagcacgcgccgg

SEQ ID NO: 696979 - DNA, 207 bp, Homo sapiens
cattgatgccccgtgtgatcggtgcatggcaagagccaagaggagggaaaagggggtcgagtgttgtctgtaactctgttcccacgaggcacattcaggaagtagaggcataaataaggagatttacaccattcctcctttcacaggtatgacagattaaataatacctgtacactgtagtataaactttgtaccttctataggtca

SEQ ID NO: 696980 - DNA, 293 bp, Homo sapiens
attcgcggccgcgtcgacgatcggcattttgaagaatagggtgggttggccagcacgggcggatcaggaggtcaggagatcgagaccatcttggctaacacagggaaaccacgtctctactaaaaatacaaaaaattagccgggtgtggtggcgggcgcctgtagtcccagctgagggactgaggctgaggcaggagaatggcgtgaacctgggaggcggaggttgcagtgagccgagattgcgccactgcagtccgcagtccggcctgggcgacagagcgagacttcgtctc

SEQ ID NO: 696981 - DNA, 144 bp, Homo sapiens
aaataacaatggttgaaattactataaaagaaataaaaaatacaaaaaaaaggatcaataaaaccaaaagctagtttttggacaagattattaaaatagcaaaactcagccgggtgtggtggctcacacctctaatcctagcat

SEQ ID NO: 696982 - DNA, 884 bp, Homo sapiens
  misc_feature (430)..(430): n is a, c, g, or t
  misc_feature (466)..(466): n is a, c, g, or t
  misc_feature (476)..(476): n is a, c, g, or t
  misc_feature (481)..(481): n is a, c, g, or t
  misc_feature (490)..(490): n is a, c, g, or t
  misc_feature (502)..(502): n is a, c, g, or t
  misc_feature (510)..(510): n is a, c, g, or t
  misc_feature (607)..(607): n is a, c, g, or t
  misc_feature (655)..(656): n is a, c, g, or t
  misc_feature (678)..(678): n is a, c, g, or t
  misc_feature (681)..(681): n is a, c, g, or t
  misc_feature (698)..(698): n is a, c, g, or t
  misc_feature (729)..(729): n is a, c, g, or t
  misc_feature (744)..(744): n is a, c, g, or t
  misc_feature (761)..(761): n is a, c, g, or t
  misc_feature (766)..(766): n is a, c, g, or t
  misc_feature (775)..(775): n is a, c, g, or t
  misc_feature (884)..(884): n is a, c, g, or t
ccttaaatacgtcccctctggctctgccgtccaggagccccagttaccgggagaggcgtgtcaaaggcgccatgagcaagatcagcgaggccgtgaagcgcgcccgcgccgccttcagctcgggcaggacccgtccgctgcagttccggatccagcagctggaggcgctgcagcgcctgatccaggagcaggagcaggagctggtgggcgcgctggccgcagacctgcacaagaatgaatggaacgcctactatgaggaggtggtgtacgtcctagaggagatcgagtacatgatccagaagctccctgagtgggccgcggtatgagcccgtggagaagacgccccagactcagcaggacgagctctacatccactcggagccactgggcgtggtcctcgtcattggcacctggaactaccccttcaacntcaccatccagcccatggttgggcgccatcgcgtgntggtggaacngcagntggtcctcnaagcgcctcggnagctgagntgagaacatggcgagcctgttggctaccatcatcccccagtacctggacatggatctgtacccagtaatcacttgggggtgtccctgagaccacggngctgctcaggagaggttcgaccatatctgtacacgggcagcacggggnnggggaagatcatcatgaggtgntgncaagcactgaccctgtnacgctggagctgggcagggaagagtccctgntacgtggacaagaantgtgactggagtggctngcgangctcgctgnggggaattcatgaacccaggtggtccaggacttgtgttgtgccccagaatactttcttctgttgaccctcgattccggaaaccccaattgggggaacctccaggaagtn

SEQ ID NO: 696983 - DNA, 480 bp, Homo sapiens
  misc_feature (433)..(433): n is a, c, g, or t
ccagcctggagcccaggactggaggtagaaagtgtgcaaaggaaaatgaaaagaaatctcagaacccctaacttctagagaccgagtcacaaaacaccaccagctttttcccaaataaacaacagttactttacaagctggtgtccaagcattccacactcaacaaactgtggcaggagaacagggagttagagtaaacgggggttcagcaggtgtagccagttcatataagcaaaagaacagcaggtgccgccggtttgtataagcaggagagcagcaggggctgcatacaggccacatcctcccgcccatggtaacaagccactccagcctctgatggactgcaagctgggtctccactccagcctctgatggactgcaagctgggtctccactgcagcctctgatgggtcgcaggccaatctttcatggngtgtagccaattggaggcctctgggcatggaggggtgttgccaggtt

SEQ ID NO: 696984 - DNA, 416 bp, Homo sapiens
cactgcagcccggtttgcctttctaaatttcatcttaatttaaggaggtaaagaatgaagtccacactccacaggataactacttctaaggagctggaaagctgtctggcttattgacacaaatttaagaaggaatatttcctccaaagtcttgggtgaaccacagcagcttgggcagtgtggacgtctggcgtcctgagcttgtgctgggctggaaggagagcgggggagtttgtaaggcaggttgcagtggtgtgggcgggagacaggggtggcgttcacagtgagagacggccaggggaggcccctaggaagaatccgcccatcacagtggatggaagccacgattggacgtgaggcttaatgtgagctctgtgtacaaacaaagcccagctcattctgtagaccagtattct

SEQ ID NO: 696985 - DNA, 323 bp, Homo sapiens
ggacaatggtccagccaaatcaggaaggactttctcaggtcctagaaatgaaaggagcagtggcccaccatcaaaaagggggaagagagggccatttgatgaccagcctgcaggcacaacgggggttgacctcatcaagggcagctctgcacaccatcaggaaggagtacctaagggtacaggacaaaagaactccaaagactggtcctgggaaacaaagagaagaccccaaaccaggccctaaaaaaccaaaagagaaggggggtgctctatcagcagttggatctcaccaattatgcaagggtggttatcctggaggatca

SEQ ID NO: 696986 - DNA, 533 bp, Homo sapiens
gtcgagctgttctatgagtatcccagtactgtgcgatccttgcagtgcgcctgcgtcgctgggatacaggcgtgcccgacacatgcatggtaaataataaattatatcgtagagatgagatctccctgtattgcccagtgtggtctctaactcctgggctcaagcaggactcctgtcccagcctcccaaagcactggaattacaggtgtgagccaccacactcagtcacaaactattatttaaaatatttaattatacggaaaatttccaacaatagaatgtacttactcaatgcttctcagccacagggtgatatagccctctagtggacattttgacacatgtctaaagacctcttatggtaaatcacagctggagacaggtattggctgcacaggaatgctcactaaaccatttacagtaacataggcaggccttccacagcaaatgagttacccgggcctaacaatgtcagtagtggccagcgagagaacccctggtatgtactagccccccatgtactcaacagcgca

SEQ ID NO: 696987 - DNA, 884 bp, Homo sapiens
  misc_feature (481)..(481): n is a, c, g, or t
ccaccatgggtgtttcctaagcccccatcttctcggcggccgcctccccgggtttttgtaatctcccccgagcaacgaatcccgcgggggtcaaaaacttctgggggaacgccgtctgattgtttgcgcaaagaactgcttgtcggataagccgccccgccatgttgaaaggtggggtgtccccctttccaatgaagagctcataaacatataatgtatgtgatcttcgtgctcccgggccatcattaaatatgttatcatacattatgggggaagacacacaccccttttacgaggacccccactatgcgtctatataccctccactccctctcggagcgatcaattcaattcctggttatttatgagggaacacacacagattatgggtgtctttgggatcccaggttcgatctcaccacccgcgtggatactcagctgccaccccctttgtgtggagaacacccaaggtgggagtgantgactacccccgtgtggacccccggcggcgatatagaaccacccccactgctgggggttccaaacgaagctgcgtatacacattcacactcagctctctcatcatatatatcactccacacataaaattcccgcgtggtctggtttaggcgcaagcctccgtgttgtgacccacgactcttacgcgggagctatgtgcgtgtgggagcggctgctctctgtgagttcccacgaggacgccaccatctccccactcgatgacgtggacgagtggcggaccaccccacctctccaccccgggtgaagcaactatgataacttttttgtaccaaacaaggaaaataaaaaaaactcaaaaatgcttttaaacaaactgatctgaaaattttccgaaaaacaaaaca

SEQ ID NO: 696988 - DNA, 257 bp, Homo sapiens
  misc_feature (42)..(42): n is a, c, g, or t
tccaattctcctgcctcagcctcctgagtagctgggactacnaggtgtgcgccaccacacccagctaatttttgtatttttagcagagacaggctttcaccatgttggccaggctgttctcgaactcctgacctcaagtgatccacccacctcggcctcccaaagtgctgggattacaggtgtgggccagcactcctggcaaggctgtttttttgttttgttctgttttcctttttttttgagaccgtgtctcactc

SEQ ID NO: 696989 - DNA, 198 bp, Homo sapiens
tagggaagaaaagaatgttgcttaagaaagaacatcaccattgattttaaatacacgtagcagggtattgcctttgattcactgttttaagtcctcattttctcaaactaagtgcttcctgttcccaatatgcaagaataacttttacactttttcctcccacacttcttgattggcttgcagaaataagttttaaat

SEQ ID NO: 696990 - DNA, 330 bp, Homo sapiens
cttatatgtattttggagacggatactcgctctgtcacccaggctgagtgcagtggtgtgatctcggcccactgcaacctccacctcccgggttcaggtgattctcctgcctcagtttcctgagtagctgggatcacaggtgcacaccaccacgcccacctaattttggtattttaagtaaagatggggttcaccatgtgggtcaggctggtcttgaactttggaactcatgatctgcctgcttcggcttcccaaagtgccgagattacaggtgtgagcccactgcgcccagccaagggataaaaacttctactcagccggggtctccag

SEQ ID NO: 696991 - DNA, 101 bp, Homo sapiens
agaaccacacgaagcatggtcacacaggaacagctgcacggccttgtcactggagctgctggctggtgtggtagccaggctgtcctgcaggtcccactggc

SEQ ID NO: 696992 - DNA, 457 bp, Homo sapiens
  misc_feature (14)..(14): n is a, c, g, or t
  misc_feature (65)..(65): n is a, c, g, or t
  misc_feature (72)..(73): n is a, c, g, or t
  misc_feature (111)..(111): n is a, c, g, or t
  misc_feature (212)..(212): n is a, c, g, or t
  misc_feature (221)..(221): n is a, c, g, or t
  misc_feature (227)..(227): n is a, c, g, or t
  misc_feature (233)..(234): n is a, c, g, or t
  misc_feature (236)..(236): n is a, c, g, or t
  misc_feature (240)..(240): n is a, c, g, or t
  misc_feature (384)..(384): n is a, c, g, or t
  misc_feature (405)..(405): n is a, c, g, or t
cccaccccagtgcncccctccccccagcctcgttaaaaatcgctgcgtaaagtcaggttaactgnggcgggnnccccctcccccctcccacctaagatgcaaactaaaagnccccgtccctcccctgcccccctccccccaccccgggggccattctggttcggtgtacagcactgtgctacctcgcccctctttccctaataagggggggngggggagtnggtggngagctnntntggngccaaaatttgtgcaaggggggggaggggggcttgaaagagggcagagttggggttctgaggggggaagagggaggtgaatgaggaggagagctagaaaatggaagatttagaggtttggggggggtgtggaggcgggtagtgnccctccctccctcgaaggggnctcgaggggggagaggcgggtacaggtgcggagatggggtgggggaattcgc

SEQ ID NO: 696993 - DNA, 212 bp, Homo sapiens
aagaatgagctggccacacgcgagtgccatacccacaagccccactcaccaaagtgcttgatctgtttctcgtatttttccacgaaggtctggtccctcggcgtgtgcagcaacaacttcgtccattatgatttgcaacaacttcgtccactctgacttctgagcagaccggtgtcactcagcgtgtgcagtatggtcactcggcgtgtgca

SEQ ID NO: 696994 - DNA, 352 bp, Homo sapiens
gaaagatggaatgtcacccgagatagtaaaaacaaatataaacctcgggggattatccacaagggagcctgttgcctttgctgctgcagaaattgcagagagccattgggcgcattgaatattagggagtgtgttttttagaagtcatgtggcatgcaaagtgaaagcaaagaagcagactttcacccaaggcagaaggtttgtgggcgtgaaaagccattttagacacacacacagaacacagagatggggggatacatttttggagaagagccattttagttggaagaaaagcagaggaatccagacattgcatggttttcggcctagcgtacactttatagccccattt

SEQ ID NO: 696995 - DNA, 1445 bp, Homo sapiens
gagagtgagggcccaaggtccgccctgctccgccacttagcgccgccccagatgcttccctcgtgggctgccacgcggcgtcgtggcgctgctgccgctggctcgcggggcctttctcgccgacgaccggcgacggcccgaagccagcgcgagccgatccttctgcgaagcggcggactgcctggtgccccgcacgcacgccagagatcgtacgcccgcgtcgagctctctgctagccttggcggcctgggaggcgggcgctcaggcggtcgcgtggcccggccgcagtgggcgccgtgtggtctggctgcgcgcggtagtgcttgcagttctgactttcggcccgcggagcagctcgaagccacgcaggctaccatcgatgcgcacctctgctggattcctccacttccatagtgtcgttccccacacctatgtgttagcgctgacgagccctcagaggccgtgctagtatgccactctccgtcgggagactccgggggacccttcgccccgacgtatccatcgcgtggacgtcttcccctttgcgtagccaaggcactgcggctcggccacggtggttgccacgcctctggcttccgattaggctcgcacgcaggttaactggtgcgggctgtccccaggggtccttcccattacacaggcccgattcccagtcacacatacgcatagaaccttcgttgttccgcgaagatacaaccgttgcgggtttcacgcaccttgcaacttgacaacaacctttgcggtcggtgaacaccggctgcgaaaacaagtgattgtcaatgaggtcgaagggggaagcacacactccccctttgtggaaaagagacctgtgaaccaacccgcagggtcgcattgggtgagaacgccgccttggccacatggtacaaggttgaaagcaagagcctcacccgcgaattgaggtgtgggccagccataggtctgccaccgtaccacccggcgttgtgcaccgcctggggtccgcatgtgtcgtagcccttggcgcgcctcttgggtgagctgccggtgtgtggcctgccttgcaggggcttaggccggacccttttggcacatttgtgttccttacaccccggggaagggtttggcgattgtcggggggtcgcaccggggcgcctggaacgcggcctactgttgaagtgcagaccgttgaatcggagagaaggcaaccacgtccagaggcgttgaggcaacgcgattgccataatggaacattggtaccctgaagctggcgtaatgcggacagacaaggcgccatcaactatccagtttttggaactgtgaatctccagtataagggatgggtctcttgtatcttcccccaaggtgttcgacgcaactattaagttccctcgatctgcgaaactaagaagtgaagcgaattccccctgccttaagcatggtgccct

SEQ ID NO: 696996 - DNA, 248 bp, Homo sapiens
ggcaaaatagtctcctcttgactagctgtgcaactccccaatcatactgtatgccacatcctgtctccactgttgtggtatagctaaccagaagggcacgtgtgacataccaggagattctgtcctccccaataactggcccaatataagtgtccttgccaacatgcgcaaacccagagggtacaggtggtttactccaataaactttttcccacaagaacaccagctcatttggaggagcactgaca

SEQ ID NO: 696997 - DNA, 402 bp, Homo sapiens
taaccatagggacagagtgggcaggtgaagatagcaggtaccacataaccaaggaactctagcgtaggtctatacccaaacacttccgcaagatgtatgtacaagaaaacactcgctgcaacattagtcgtgatggcaaagatttaaaaatagataaactctgtagcacttatttggtggaccacgattcatagctgtgatgaggagtgcctggcatacaagcactatataagtgtaagatgcacatcatcattgtcactgtcatcatcagaatagataaacctcaagagctgaagttcagtataaaaaaaacatcaccagaaagtggtacagggagtgtactgacaggtataccgtccatgtagtcacacacatcgcatggccaatgtggtacggcatact

SEQ ID NO: 696998 - DNA, 938 bp, Homo sapiens
  misc_feature (235)..(235): n is a, c, g, or t
gtggacgaggagctacagataagaggacaaaagaagagatggcatggtggcgcttattgcgggccacgtatgttttctgtgtgaagcacgtccactgttggagtgtgtggtttattgtcgccccctggtagatcgggcctgtggaatatgagactgtctgaacattcaaggttgccgcgcgtcacttacgatctggtgcgccccgcttgccgtttatagcccacagtgttccaanaaggtgaaatgttctccaacaacttaatgcggttgtcggtttgctagcaacctttcctgataagggaaatgcggcccctccactttttacggagcccccccgttgtgtcaaaaccaccgggaattgtggggagtctgatcccgtcccccgcaatctgtgggaccttttctagcgcccaatttatttctggtggtgtcttatgaaacccttgtatgaagaggaccgctaatttgccaccgaactgacccacggggaacacatcaccttccccagtcatacgacgtactaagtgcgcagagaataattggtctcaggaacccacggtgcccgagatccaccaagtccttggaagatttcgtctttgtcgtcgcccctttaaagaccacacatctttgctgtagaagaggcaaagagcaccctttgggcttcaaaaggtaagaaggttacatttatcccaccttttacaacaggggcacctcttgtcaaaaattttgattaaccttccatattcaatcgcccttaagagggagttggctctgtctactttgatcgtgtatcggttaaaactccctgctaagccgcttgtgtagaacaccctcccctcagcgacgacatcatggctggggccaaagtagatccccaagtagaggctggtttttcttcttccccatccaaaaacaatttcaccccccccaacaaaaca

SEQ ID NO: 696999 - DNA, 270 bp, Homo sapiens
aaattttcattttgagattttctcaattgtatctagttaaatagcacagtttggaaacttgttctgagactgactttatcaataatctaaccgacaaggatcatatccatgtgtatgttggttagacatttttatttcattgactaaccaggacagtttcagtgatgcacattgtgtgccctctggttcagctgacacagtcctcggactttcaaaaaccttgattaggctcccacagttgtataaattggacactttaggattttgaaa

SEQ ID NO: 697000 - DNA, 934 bp, Homo sapiens
  misc_feature (262)..(262): n is a, c, g, or t
tcttacaagcagatccgtgggcacacccctgtggccccgcggtttgcccccgtggagcgctggtcccttccccgcgacgggtgtttccccgccctccctgtccaattgtccgcccggttgtcccccgtgtgatgggtgccaccccggagcaacttgcaagcataacttgctctgctgtaagaaagcgcatgtggcccccccttgttgttaaacaccggcgaggtgtccccccatatcttctgcagttgtgttagggccaccnccccgcatggctaatcagggtcttgcgccacgagaccccccagatttctagggagccttcttcacgctacaccccacgctgggcggcccccccatgccggtctgcggatacaatacaaggaacgcacgccacccctgcgtgagtgcggtgttctatccgaaaacaacgctgggcccacacacaacatggtggccaagtcgaatgactacgaggcatcacaccaacttgctgcctcacatcaccatttattacaagcgacgccagtactattcatattgtccgcacctaacactaccgcgccaccgcccccactccttaacacccactctaggggtcggagaaaccacgctcatttaccaagatatggttggcgcctcatacacgcggtgcccaagccaaacgctcacattttccaaaagaaactcggtgaattgcctgtacagcaacgaccgtccgccgcactttactacgatcaagaagaagcaatatttggtggaccacgcccttcggattctatcttggttcgggtgaggcgccccatgttagatatgagtcgtttcccaaaaacccagaaatgtgtcttattagggagagcacgactttgccccgaccaacactgtgtttcccgacgtctaggcccccccgaaaaaattcaaacagacatagaccaaa

SEQ ID NO: 697001 - DNA, 986 bp, Homo sapiens
  misc_feature (28)..(28): n is a, c, g, or t
  misc_feature (63)..(63): n is a, c, g, or t
  misc_feature (66)..(67): n is a, c, g, or t
  misc_feature (70)..(70): n is a, c, g, or t
  misc_feature (89)..(91): n is a, c, g, or t
  misc_feature (113)..(113): n is a, c, g, or t
  misc_feature (124)..(124): n is a, c, g, or t
  misc_feature (131)..(131): n is a, c, g, or t
  misc_feature (133)..(133): n is a, c, g, or t
  misc_feature (136)..(137): n is a, c, g, or t
  misc_feature (139)..(141): n is a, c, g, or t
  misc_feature (143)..(143): n is a, c, g, or t
  misc_feature (152)..(153): n is a, c, g, or t
  misc_feature (156)..(157): n is a, c, g, or t
  misc_feature (162)..(162): n is a, c, g, or t
  misc_feature (165)..(166): n is a, c, g, or t
  misc_feature (168)..(169): n is a, c, g, or t
  misc_feature (173)..(174): n is a, c, g, or t
  misc_feature (179)..(180): n is a, c, g, or t
  misc_feature (182)..(182): n is a, c, g, or t
  misc_feature (185)..(186): n is a, c, g, or t
  misc_feature (189)..(191): n is a, c, g, or t
  misc_feature (193)..(193): n is a, c, g, or t
  misc_feature (195)..(197): n is a, c, g, or t
  misc_feature (199)..(202): n is a, c, g, or t
  misc_feature (205)..(205): n is a, c, g, or t
  misc_feature (210)..(211): n is a, c, g, or t
  misc_feature (213)..(213): n is a, c, g, or t
  misc_feature (216)..(216): n is a, c, g, or t
  misc_feature (225)..(225): n is a, c, g, or t
  misc_feature (231)..(232): n is a, c, g, or t
  misc_feature (235)..(235): n is a, c, g, or t
  misc_feature (242)..(242): n is a, c, g, or t
  misc_feature (247)..(247): n is a, c, g, or t
  misc_feature (290)..(290): n is a, c, g, or t
  misc_feature (292)..(292): n is a, c, g, or t
  misc_feature (297)..(299): n is a, c, g, or t
  misc_feature (303)..(303): n is a, c, g, or t
  misc_feature (305)..(305): n is a, c, g, or t
  misc_feature (312)..(312): n is a, c, g, or t
  misc_feature (352)..(352): n is a, c, g, or t
  misc_feature (356)..(357): n is a, c, g, or t
  misc_feature (359)..(359): n is a, c, g, or t
  misc_feature (362)..(364): n is a, c, g, or t
  misc_feature (367)..(367): n is a, c, g, or t
  misc_feature (374)..(375): n is a, c, g, or t
  misc_feature (378)..(379): n is a, c, g, or t
  misc_feature (385)..(385): n is a, c, g, or t
  misc_feature (391)..(391): n is a, c, g, or t
  misc_feature (436)..(436): n is a, c, g, or t
  misc_feature (439)..(439): n is a, c, g, or t
  misc_feature (446)..(448): n is a, c, g, or t
  misc_feature (451)..(451): n is a, c, g, or t
  misc_feature (453)..(455): n is a, c, g, or t
  misc_feature (462)..(463): n is a, c, g, or t
  misc_feature (466)..(466): n is a, c, g, or t
  misc_feature (469)..(470): n is a, c, g, or t
  misc_feature (477)..(478): n is a, c, g, or t
  misc_feature (490)..(490): n is a, c, g, or t
  misc_feature (518)..(518): n is a, c, g, or t
  misc_feature (541)..(541): n is a, c, g, or t
  misc_feature (547)..(549): n is a, c, g, or t
  misc_feature (561)..(561): n is a, c, g, or t
  misc_feature (566)..(570): n is a, c, g, or t
  misc_feature (572)..(572): n is a, c, g, or t
  misc_feature (640)..(640): n is a, c, g, or t
  misc_feature (657)..(657): n is a, c, g, or t
  misc_feature (664)..(664): n is a, c, g, or t
  misc_feature (669)..(670): n is a, c, g, or t
  misc_feature (711)..(711): n is a, c, g, or t
  misc_feature (717)..(717): n is a, c, g, or t
  misc_feature (735)..(735): n is a, c, g, or t
  misc_feature (849)..(849): n is a, c, g, or t
  misc_feature (897)..(897): n is a, c, g, or t
  misc_feature (985)..(985): n is a, c, g, or t
caagctgagtggaaccagaggcggctcnctagcaatgttatccacaggagtcccagtctgcgnatnntcnttaatctatataaaaatannnttaatatgtagtcatataatanttttattattntataaantnttnntnnnantttttttannatnntaaanatnntnncttnnttatnnanttnncannnantnnncnnnnctnacctnntntantataaacanctcttnncantctcctnctctngagggctggttcccttccccagaggaggcaccggtggaggacntnccagnnncccngncctaacntcctgctcagcctctgcactcagccccaggtcgggccctngcanntnctnnnatnacccacnnaanncacttngctggngcctgcaggcccctggaggatgcggtccgtggctcagtagatttnggnggaccannnaanannnaaccaannaanagnnaaccaannagctgagccctngtgggtggcccatcccagggtgggcttngctgtggcattggcaggcctgantcctannngctcagagcttngcccnnnnntngctctgcagcagggcacgcatgtccaggagcgccttctccaggtaatgcgccaggcgggcggcgttgntctccgcgcactgttgntaggccnacagnnagaagttgatgtgggcctccatggggttatagcagacaccntagccntcggggaccacgggcccnaagaacatgacacagtctgtcttggcagggacctggctggtggagaggtggaagtgcatggcgatggcgtaggaggtgtccatgaagatgtcgggcatgctcaccaggtcctcnatggcctgcagcttcaggcccagcaggtgtcgatcaaaggcctcccgncggatggcccggtcgggtgtagcctcgggtgggcctgcacggccttccgcagcagctccaccttctggtgctccgtgaagctggagtna

SEQ ID NO: 697002 - DNA, 410 bp, Homo sapiens
  misc_feature (184)..(184): n is a, c, g, or t
tttttctttttatctttgattacattaacctcccaaaccttagggaggcaagtattactatttagtgttaaataagcaagaaaaaggtcacatttcagaaacatgccagtgggctcacaaatttcttagcaagcatgagagaatccgaatcccaaatgtaagatgacacatttataaataaaancaaggacaaatgtctcctttattctaaatataccatcacactctgagtagctggggttaactatttttacccacaccggctcttttgcatctcaaactcatgtaaaacaactagatccgtggacacgaaggggaagctgtgggccttcagcacttgacgattgtgcgtttatcttctcgcgattatagttacacaggcgaccgaatggtgctcatgtgttgtcctg

SEQ ID NO: 697003 - DNA, 199 bp, Homo sapiens
gacagcaacatttcagatgtatcaccacaaaccagactaaacagaatactttggcttgaaaccggaacacccagggttactgaggacattatgctgcctgacctgattagatgatacatggaggtatctcccgaatcatacaaaattaaatgtgaagaacgtttatgcataccttcatgtgcctgacagtcttggcttt

SEQ ID NO: 697004 - DNA, 480 bp, Homo sapiens
  misc_feature (184)..(184): n is a, c, g, or t
tttttctttttatctttgattacattaacctcccaaaccttagggaggcaagtattactatttagtgttaaataagcaagaaaaaggtcacatttcagaaacatgccagtgggctcacaaatttcttagcaagcatgagagaatccgaatcccaaatgtaagatgacacatttataaataaaancaaggacaaatgtctcctttattctaaatataccatcacactctgagtagctggggttaactatttttacccacaccggctcttttgcatctcaaactcatgtaaaacaaaaacggtgagaaatgaaaatggaccctggaccaactgccccggcggagtcaaagggtttgtctttcagcactagatccgtggacacgaaggggaagctgtgggccttcagcacttgacgattgtgcgtttatcttctcgcgattatagttacacaggcgaccgaatggtgctcatgtgttgtcctg

SEQ ID NO: 697005 - DNA, 482 bp, Homo sapiens
  misc_feature (4)..(4): n is a, c, g, or t
ccanggtcctatgagaagtggggctggaaaatctctgtgtgagaaacagtatcacttgaggaagtcttaaggcttcttagagcggtttcaggttcgaagcaaaattgagagaaacatagagagatttcccataaactcctgcctctgcacacatgcatcctcccccatgatcacctttgcccactagagtggtacctttgtcagaactgatgagcctacacgggtacatctttattatacagagtccagggtttacactcgggttcacccttgggctcaatgtgtttcaaaagtgctgcacattccttgggtttgaccagtgtataatgacatgcatccaccactatcgtattgtactgagtcgtttctctgccctaaaaatcctctgtgctctacgtattcatccttctctacctagtaacccttggcaaccattgatctctgtaatgtctccatagctttgccttttccaaaacaccata

SEQ ID NO: 697006 - DNA, 540 bp, Homo sapiens
  misc_feature (141)..(141): n is a, c, g, or t
gcagcatcgtgacgctgctgccttcctaatctgatccccctcagatcatcatatgctgtaccctgtctatagcgtgctcagccatgagctactggacttgccctttaacaagcgttcttacttggaaaaccccttggcggnggtacgtgacaggggccgcatgcactggtggtcagagagaaacagaacagggcagggagtttcacagcgttcttctatacaatgtctggaatctatgaataacatcggtttttaagttatgagttgatttttaactactgggtttaggccaggcaggcccatgtccagttttgggcctggtgccgggctgcctgtctttggttttacttccctgttgtttttttcttagaacaggtactgagtataaaataatatgagagggtctttctcttccttcataacaatgattaagattgacagccagcccttttattttaaagtaactttttttcacattttaaaaaaattccttttcaaagttgacatgtaacatgtatttattatacacaacatgctttc

SEQ ID NO: 697007 - DNA, 111 bp, Homo sapiens
agctgacatagcaccactgcactccagactgggcgacagagtgaggccctgtctcaaaaaaagatgacacgaggaaagagtaaagagtgagccatatgtagataacatacc

SEQ ID NO: 697008 - DNA, 566 bp, Homo sapiens
  misc_feature (465)..(465): n is a, c, g, or t
  misc_feature (478)..(478): n is a, c, g, or t
  misc_feature (492)..(493): n is a, c, g, or t
  misc_feature (500)..(500): n is a, c, g, or t
gcctttcttcttattctttcttccctttcactaatttatcccgatgttagcacattctgtctcgttactagcggacgcctgtaggttgctacatgggatcattactgatcacggtgactctgaagtctgaactgaaggcggaatgagaagtgggaaaacttttttctctaaactctctgttttttaaaaaactattattctcgatgcttgttaagaggaaaaaaaaacctttggtgcttctgttgtgaatgtgaaacattattttccagctgtacagtgacacattttttttaaggagaaaaggactgattcgtttgccaaaaggggggtggggaggtggaataatgttatcgagtgattattctggctgagatgtgttatttggtttcttccttcttgatcatttggtgtttaagtaaaatgaggcacaggcttgtttgccgagtggagtgggaaaggcatttngatttgtggctanttaaaaaatgatannggattanaaggaaaaggtggacctggactgagggtgtaaaatccctggacacattcgtggggcagggaaaaga

SEQ ID NO: 697009 - DNA, 246 bp, Homo sapiens
gtagccggacctttcaaagcggagatgctggttctgtgtgctctgggctgcgtgtacagcagaggcagcaaggtgtgtgggattccttgtggcttgcaccacaaagtgactgtcttttgaaaactggcactttgatttctgggaaagcgcccattcaacagttaccatgctgcctgcctttaatggctgcggtcctgaagtgatgaggcacactagcccaaggaggcagcatctccgctttggaaa

SEQ ID NO: 697010 - DNA, 1491 bp, Homo sapiens
  misc_feature (404)..(404): n is a, c, g, or t
  misc_feature (726)..(726): n is a, c, g, or t
aatcaccatggcgtgctgggaccctgtacactgtatcctgaatacactgggatgggccttcattggctctcatcgctgctcagtacagcggggctcagtgtccgcgtagctctccgcttccaccccagtttccattttggcacgaataccgaagaccgcgaccccgtgtaagtttctcccgcgataatttcacatgcctggcacaggtccctaggactatcttgatggtgtgatggatcggcattcatgttgtgtgtagagcagcgacatccaattgcctacgtatgtgagcaatgaggagctgctggaggacacgttactccaggaaggacatgcaagcaccacggtagtgttgctaagtccgtggtagacgcttgttgctaagatgtacctgattatatgtngcctccccaagactcaagtacctaggggttgtttccactcattctttgagagccttccattgcaaccctacagatcaaagaaggtccattaggtacgcaatagcccaaatgcgcagcgcaatgtaggcaaggccggtacatttctagtggtgctgcttccggtatcgcattatactttcgcaccagcacccgcatgggcactgtttctcctttggttcggcgcggagaccggcacgtttgactcatctaggcgcttggcaccatcagacacgagatttagttcttagcaccccgtcggtttgtagtgccttccatagtaggnggtccatgaagtgatacttgataagaaaggctcatttccttttgataccgtgcaccaacggcgccacttttgattctctcaaaagtttacaccaaaaccactgggcttggggttttctctttcgtatctcttaggcaatttaatagcaccatggggtccccatggtattccccaggggtcattggtcctttaagggggagggaaaacggtcagaaaaagccgtgggtcagtccggatggaaaggcgacttgggtacccccaagattggtcgaaatttggccatatacagtagcatggtctttatgccagagagaagaagcgcccaaacgccgttaagacaaacatgtgtacaacaagcaccatccgggtacacacgaacgtacacgggggctcttcacccgggggggagcacgaacggacacagccggagtaaaaggcccccccatagggggccatatgaaaggtccagggacagggcgcacggcgacgtgaacaacaacacagggtgtcgtggactttgtcccccccctggtgctatcccatttgtcacgcgatagtgtactgacgactgggcgaatggcataattgttatgactagcccaaaggcttgacattaggtggacagtcgcgtggcatgtcccccaagtgggcaccaggagaaccccattttacaggttccaaaaccttggcccaaaagaattatccactttgtgatgagagtacgggaactcggaaattaaacggacagcacgaagtatgatctaa

SEQ ID NO: 697011 - DNA, 438 bp, Homo sapiens
ctgaccacaatggaataaagctagaagttaataacgagggatttttgaatacatggaaattaaacaatatgttcctgaatgacaaatgggttaatgaagaaattaagatggaaattaaaaaattttttgaaacaaatgataatggaaaaccaaaacttatggtatacagcaaaaacagtactgagaggataagtttacaactgtaaatgcctacatcaaaaaaaaaaaaaaaggaaaactttcaattaaacaccctattgatccttcttaaagaactaaaaaagcaagttctttggggtcccaaccccaaatttagtaaaagaaaagaattaataaaattcagcgcagaattaattgatttggaaatgaagaaaacaatcacaaaagtatattgaaccaaaaagtgggtttcctgaattgacaaatttgacaaccttt

SEQ ID NO: 697012 - DNA, 937 bp, Homo sapiens
ttagctctcgcggttcatttttggttccccgcgagctggtctgctttttctgtgactcgtgaagccagtgcttctgcttaaactcgggtgggccccgcaccgtgagtaagtgcttttgcccccatcgcgaggggcattggccaggacggcctgtggccaggaggtgagacaggtgctgttcgccggactgactggctttttccccgggggcctctggaagatttggtgggcaggacaagagggcactgtcccctgtccccgtccccaggaggtaccgacagtccctgtgcgtggttagactcggagcgctgcacaccgaaagcccaaatcgggagctctgcctgccggctactttgctgatggggtgtattgctgcttctggggggtaaggaaacaagttacagaaattaccgcgttctgtgtgaagggtctgagggtgtggtgtctttggtcagagggtcatttatagagagagccgccccagcccctcgcatcgcctggacttggggtgtcattttgcgctggcggaccaggcactactagcttcgcctgaccccgggcactggggctgttatctggaccgctgattactcagaacaacctaccagattaccggcattactagcagtgggacaagaccggggacgcacaggtccatccttccttgtcggcagggactctttatttattcccattgctctagggctttcggtttccccgttcttccggtaggcgcgcgtagaggcatgcagccgggataggttatcccgctggtgaccccatcgtcggccatagagggacgctccctgccccatcccggcatgtgggctgggccgcttgcctctgcgtcgccctgtgctgtgttcatccagctttgtagcagcagcctgtacatacccaggcgcatgtaccaaggtattaccacgtgggattttcg

SEQ ID NO: 697013 - DNA, 116 bp, Homo sapiens
tcctcgtagagtgttttgttcgcttatccaaagagtttgggcaaactaccactctgggatcagcttaatctaacttcaaggattaagatccgtactcggaggctgggctgcaattc

SEQ ID NO: 697014 - DNA, 319 bp, Homo sapiens
tgatggttcagcggagcaatagtacaggtgctgcaagagaaacagcagcagtttttgaagcttcagaaacagaaagcaaagttgggaacgcaagttacattagagaaacagtgcagagttgaagaagcatcagcagtaggtcctgttcacaactctgtgccttccaacccagtggctgcccctggattcttcattcatccatctgatgtaattccacccattccaaaaagaacacctctttttatgactccaccattcactccacccaatgaagcagtttccgtggtgattaatgccgaacttgcacagctaattccgg

SEQ ID NO: 697015 - DNA, 938 bp, Homo sapiens
tattaaaagtgtcttaaggaataaccaacatatattgtgttgcatttattaatcaagtaaattttatactcatctctgtcaaatatattgtgtcaaaattggcataggagacacaaaactataaacccagcccaaatcagaatgatcttgtgtaatttttaataaattagacatttatatgggtttaatgaaaatagctgcatcttgaatttagtaagattaccttaacttctaatcctgtggttttaggcagttggttcacagccaataaagaggtttatttgggaaaggactcttattgtcttgtttcaaagctaaactttaagttcctctcaaagttacttggcctatgcccaggaatgaacaaggacagttggatgttaagagcaagacggagtcagttaggtccaatcttttttcaccgcctcaattataattttccaatggtagtttcataactttaaatcatgactatcacagttttcataaataatctagataaacaattacaataaaataagtaaatgtaatggaataaatacttgtagtcaaacggtcttatttagaatatatggttatatcacattaatgataagatatttcatattgagtatttcaataattttttctgtaggaaaacattcttgctaacagaaagtgtccttctttcacaaaaggtggaccacgttcggataactcacaacttccttcaacgatgatgtttaaacaggtaaaggcaccgggaggttacaatttgacaaggacgtgcaaatcaaagccacggctctgaggaaaaccggacacatatcaacacgacccccacgagtgagcaaaaaaagtgtgacacgggcggaacaactacggaaaaacgaaacaagtcatcaaaaacaatcgtacgaatcacaacacagaacttcttttcctaatatcgcttctct

SEQ ID NO: 697016 - DNA, 191 bp, Homo sapiens
tgtaaacacacacacacacacacacgcacgtatgtcacacacgcatgcacacacacacacaccccacctaaagaccagccatggagaccaatacgtggaggactcaggcctatacaccagtgatgcccatgtatggaagcagagaaatagagtccaggggtggctatttgttagtgggttatggggccata

SEQ ID NO: 697017 - DNA, 374 bp, Homo sapiens
aaaaagatcctgaataggtgtgtttctagaggcagaaattagattactggttgcatagtgcagggtgaatgcagaaatttggtggggagatgagaactaatacacaggagttttttgtttttttagataaaactgattgttacgttgaatgcacaagtctgtgaatttactaggaaatacttaattttaaatactaattgatgaatcatatggtatttgaattatactccaacaaagatttacaagatattcattgaaccacgatattcaaaaatgctgtttgcattgtacaatcatttcatctcttattctgtgtcaagggctctgcaggactctctcacttgccactgttcttgacactattataaagtagg

SEQ ID NO: 697018 - DNA, 381 bp, Homo sapiens
  misc_feature (221)..(221): n is a, c, g, or t
tccctcagctgactgcaagagggtttattgtacacgagctacacttggccacaagagaacagagctagtccagagtgccgggggtccagggcagagggactgttttggttgtaagaaaggcggtcatttctccaggcgatcgcggcgaggtgacgttccaggtctactgagactcattaccgatggcagcacacagtccgatagcttgtcccggccctcancatccctcacttctgctcctgcaggcgtcgtaggtgcacgggctggcttacttggacctctgcctcatctttcttctcttgcgcttcagcctgcgcattctcttcttccgccacttcgctctcatggcgcaggagtctcaaggaagatggcctcgtgccg

SEQ ID NO: 697019 - DNA, 1035 bp, Homo sapiens
  misc_feature (312)..(312): n is a, c, g, or t
gacggcgtgcagaagctgtgactcagcaaagttttctcgcaagaaaccggctgatacgaggcggaggcggagaagatcctgctagcggagaacccagttgacatgcgcacgcctagaagtttgcgcttggaatgatcaggctgagcatgtttggcaataattcgacgccattaagaaaggacaccatcattagaagtgcgcactcatggaaaggagcagcagacgacggccatgtgcatcgagagcaatcctgtacatgtgacttatatgttccacgttccgccagtccgctagagcttcttcttggttggntgtgttcactgggtgaggaactcagacacgacacatggatgcaacggatgggtctatatggccctgagtgtatatctctcgccaacaactgagaacaatcagtacggtcggctgtagacagatatacctcatatctacatgtatatgagattaatccttcgagctgcccagaatggcctggctcgaggaaaagttactagatgtcagtgttttttgcgtccttcacgaatgtgtctccgtagtagttcaaacggtcacgactcttcaccagctgtaattcactttcggtggcactcaaagggatttatatagaggttaaaaggtcaggcgacaaattgtatctctcatttacgcacttagtctgcaaagcagtccatctaaaccgaaaaaagcacttggtagggacccaaaaggtggggacttgacgtgtgacacggtccaagcaaatcaacgtttcccagataatgacaccgaaacggtcggttattggttctgggccttgtaatgccttgttgtgagtccaacgcgtttgaaaccgaattggacccaagacgggagtggaagggctttggtggttagtaaaccacttttcaaccactttgggacattggttcagaactttaccttttggggcttgggttcaatttgcctccaattgaacaaacacagcctggtgccaggcacattgtttcgccgggacgcctttatatattaattccagag

SEQ ID NO: 697020 - DNA, 306 bp, Homo sapiens
gtcgaccactgtaaatatgttcaaagaaataaacgaagccatgcttaaagaataagggaaggtaggctgggtgcagtggctcatgcctgtaatccccgcactttgggaggccaagaggggtggatcacctgaggtcaggaatttgagaccagcctggccaacatggtgaaaccccatctctactaaaaatacaaaaattagctgggcatggtggcaggtgctgtagtcccagctactcgggaggctgaggcatgagaatcacttgaacccaggaggcggaggttgcagtgagctgagatgtcgacg

SEQ ID NO: 697021 - DNA, 291 bp, Homo sapiens
ctagcgaaaacaaagcggaattgttctaggaaaaaattacttgaacagcggaggagactttgccctatttgatatggaaagcgcagccatgggtatggatatcagagcctcagagttaggagctgctccaagccttcttccctagatgcctcacacccctcctggacagcttccaagtatcacagctctggatggccgctcatcttctgtgtacagactccaacccagctgaaacccatttcatgaaatgtactttatataaacctaatttattaaagagttgcattcatt

SEQ ID NO: 697022 - DNA, 104 bp, Homo sapiens
aatcacaagcgtaacacgcccacttattctacatatatgggtctccctctgtagtccaaggctggagtgtagtagtgctatacgcatctgactgcagactacaa

SEQ ID NO: 697023 - DNA, 803 bp, Homo sapiens
gaagagaaaggggatgcagatcttgctaagagtgatggatttctgggttcagcctacatgagtcatcttccatactacccctggacatgctttccttggctgccaattttctattttataaatttcaggaaagagagattatggttgttaaaaccattcatgacaatgatcccactttagagaaaacaacagcaacaagcaaagaagatggtgtggagatccgcacattccacatcttttaattggtacccattaaataacaaagggaaaaagtaccctcagaccacaactctccaccttgtgtggaggccaaggacccagcagggagaaggcagaagattaggttctccactcatcctggctctcagaccactgaactcacatttgggttctaatggaatggtgattggaagcatattctccaataggaggtttttaaaagttctgtgccatcagccaggcagcatctgtcatttaaaatgactggccagttgcacgtttaaaagcaaagataaaattgctaatttatacttactgaataaacatcagcagtatccatgaaggtacctaccctaatagcaagttgtattctcatcccatggtggtggcgaagcttgccaggaaaaccaaaggcatcagttctttaacttaccatctggttagtcactgatttcatactcacaatttctctggcttccttagaaccaaagagccctacccttggaccctgctgtatcattagacactgggaacagtccctgggcctacaatcaggcacttgcacaggactcggcaaacacctg

SEQ ID NO: 697024 - DNA, 305 bp, Homo sapiens
tcgacaccatcagactactcatacacaccaactacgccctggaccgtacgccataaaccagctaacattactcgcaggccacctactcatgcacctaattgcaatcaccacccaacaatgacataaatacaactaacctcaaaacaaataataaccataaacaaaacgaaaaaaactctacctctctatactaatctccctacaaatcaccttaattataacattcacagacacagaactaatcatatataatatctacatcgaaaccacacttatccccaccttggctatcatcacccgatgag

SEQ ID NO: 697025 - DNA, 721 bp, Homo sapiens
agcggggggtgtggctctgccggcccaggcgcgatgaggcggctgcccgctgggtggcgccgatttcccggggaggtcccttctgggcccccgtgcggaggtgggagagagtcaggcaggagccgaggccggggagccctcttcgtcagctggttgctcacttgcgccagcgccagctgcccagccgggattcacccgcagctccatgcttgtgcccggttcgattcgtccaatcctccaagaagaggcaggaattctaagagtgcccagggtcttggctgggtcttcgaaaccttgggaacacgtgcttcaatgaactcaaattctgcagttgcctgaggcaacactcggggaagttgacgagattacttgctccagaggctctacatgcggggaccttgcaccacggcagcaatgcacacaacagcctcgtggaagaagtttgcaaaaagtaaattcagaccatatggacttcaatccccccaatgatgtggtgagcccatctgaagttcaagacccagatccagaagatacgcaccgggctttgtggctataatcaggaggattgctcaggagttccttcgctttcttctggatgggtccataaagaggtgaaccgagtgaacttgagaacctaagtccaaccgtgagaaacctcgatcatcttcctggatgacgagaaaggcgacagatgttgcgcacacatatcttagaagggaga

SEQ ID NO: 697026 - DNA, 178 bp, Homo sapiens
ggcgcggctgtcccctttcctgcgccgtcggtcgccccgtgctgctgggccgaccgccggccccgtccgtcctggccgggcccggtgcccgttcgaccgacccctggctctctgttgtaccgtgtccgtctacgacggtctccctgccccgacgttcactcccctgacctgccgacct

SEQ ID NO: 697027 - DNA, 284 bp, Homo sapiens
ctccgcctagagaaatttagttacactgttgactccttccctaaatttttaggattgagggagacctcttcttttgcaaaaggcagtttaaaaagccaggtaagcataaacagaaaacaaaagtgagggattttttttgttgggttgtttggtttgggaaggggaggtgctatggaggttattgttgtgacatgttgcttcgaaatctataaaccacacaacaggaacaactgtttttctgttttctgtgacaaggagtactgcagggacaacctcacccagag

SEQ ID NO: 697028 - DNA, 403 bp, Homo sapiens
aatgtgcctgggacctagtgagcgattcttctcacttattattgttttcgtcatcatcgacatcatcgtcaccattacttttcattgtctttggaaatttggacagagaccacaggcagatgcggtgccgtatatccacagggctggagcagcgggatgacacggcagttaggagcttctctgggccttcaggcagacggtctgggctgtgtccatgctgtgccttttcccagccctacctgcagtcctacacatcttctccacctccagcggcttctccttctcacatccaccctctgcgaaggcataaatagtagcaactcccttctggattctatgaggtgataattacatgaggatgcagagccctgagcacgggagctcctcagtgaaaaaaaaaaaa

SEQ ID NO: 697029 - DNA, 457 bp, Homo sapiens
attcgcgggcgcgtcgacgccgtggctcgtgcctgtaatcccagtgctttgggaggctgaggtgggaggatcacttgagaccaggagtttgagaccaatttgggcaacacagtgagaccccatctctaaaaaaattttaaaaattaggcaggcatggtggtgcatacctgtaatctcagatacttgggaggttgaggtggtaggattgcttgagctcaggagtttgaggctgcagtaagctatgatcactgccactgcacaccagcctggtagcctgggtgaaagggggagaccctgtctcttaaaaaaaagggctgggctgttatcccagcacctttgaatggcaaagcgggcggtttattttagcccaagtaattatagtacgaggccttgggttaaaggcaaaaccctgttgtttccgtaaaaatatacaataaagtaaagctggtggttggtg

SEQ ID NO: 697030 - DNA, 125 bp, Homo sapiens
gccgactactactactactactactactaaattcgcggccggtcgacccagattgtgagccagacctccattttatcagaggagttgtgataattatcacatttgtctacaataatggaacagta

SEQ ID NO: 697031 - DNA, 466 bp, Homo sapiens
ggctccccagagcacctgtccgcccaactgcccgtagctgttctgggatcatcgctgacagatcacgggaaacaagcatgagtccgctcgcacccgcggactgctctcccggctcggcccagggaaccgcctctgtctccagggccacacgaggatggcgactggcacagtaagccagagccgccgcgtcccggcgctttccaggagccacaggcccggaggaggcgaaggcccacagagcaaaggtggaaacacgtgcatacgctgtaaagaaatcctgttccagagcatacctgtttgtacaaacagacacatgttcctaacgagaggagtgacgtattttcatcaccgctttaataattttgttttcttacgggtttacgattttgaatttttcttatttggttgaaagaattttgagtctatcagcctgagtgagttcaagtatcgcgaaaggatgtaagtt

SEQ ID NO: 697032 - DNA, 202 bp, Homo sapiens
  misc_feature (177)..(177): n is a, c, g, or t
ttacagtagaaaaatagcagtatagaaatatagtaggaaggtaaaattcggtacttttcgaacatcagggttaaatgataattctttccctttccggctttatgcagttaatatttatttgctactaattaataaacatggtcttttaatgtcctgaatgtccatcgagattacaantgtttatgaagagattctaatacca

SEQ ID NO: 697033 - DNA, 213 bp, Homo sapiens
  misc_feature (20)..(20): n is a, c, g, or t
  misc_feature (30)..(33): n is a, c, g, or t
  misc_feature (35)..(35): n is a, c, g, or t
  misc_feature (55)..(55): n is a, c, g, or t
  misc_feature (75)..(76): n is a, c, g, or t
  misc_feature (82)..(82): n is a, c, g, or t
  misc_feature (129)..(130): n is a, c, g, or t
  misc_feature (142)..(142): n is a, c, g, or t
  misc_feature (144)..(144): n is a, c, g, or t
  misc_feature (151)..(151): n is a, c, g, or t
  misc_feature (165)..(165): n is a, c, g, or t
  misc_feature (188)..(188): n is a, c, g, or t
  misc_feature (206)..(206): n is a, c, g, or t
  misc_feature (210)..(211): n is a, c, g, or t
cacaggcatgctcataaggncttgttggtnnnncnagatattgggctgttaattntcagttcagtgttttaatcnnccgcangcttatgcggaggagaatgttttcatgttacttatactaacattagnncttctatagggngntagattntctctctctctctntctctctctctcgtctctctctntctctctctctctctctntctnntg

SEQ ID NO: 697034 - DNA, 772 bp, Homo sapiens
agcgggttcgtctgcttcccaccgggcagcgtgccgaccgaatgacgcgcggccgcgcgcctctccgatgtggagcttcccacctgcatgtaccggcttccccaacgatgcacggcaggagctacggcccagcgccgggcgctggccacgtgacacggaagagtctaatctgtctctagctagctcttgagtcccgccaagatgatattctaaaacgtctgtatgagttgaaagctgcgagttgatggcctctgcaagatgattcaaacaccatgatgcagacttggatgtaaccaaatataatccaagcggatgagcccacgacgtttaaggcaccaatgcgctggacttgaattcagtgcttgggaaggattacggggctgctgacaagagcatcgctgatcaacggcaaatgctcggcctccgcgcgtccccgtctccctggcttgttggctggcagcaggcgtgctcatgtgagcacttcaggagtcctggtccacggatgcacacgcacttcctcggtcaatgagcgtgcctgagaaaccttctcaaggtgctggtggagaacgagaataaacaaacagcaccgctcgaagactatcagctgggattcactttaacttttgggcagaactgtgccgacatacgccagatgaaattcagcatccagacgaggtgccccatctgaatggctgaagggaacattgcgcgttctgtgtactctcgtgtgtggccagaagcataatgctgtcaacgcaagccttatagatag

SEQ ID NO: 697035 - DNA, 344 bp, Homo sapiens
gttggcgccacatctgtctatgtattgccgtagttctagattcacctcatacgatgtctcacttaggcacaagcgcgctacatagacttctaagcacggataatcgccctgagccccaggctggagtgtatcgcagtgaccatagataagtgcaacctctatctcgcggtctgaagggatcgggcagccacagcctactgagtggctgatgatacgattcgaaccattttacattgattggcaaggcagatacaccgcacccgtacacgtgaagctcttggcacatctgtctcacacactggctcggacgcggcctgttctctgatggcagagtcacaccacgg

SEQ ID NO: 697036 - DNA, 283 bp, Homo sapiens
agatagtagaacaattctgtgtcgaaatggaactacttgctacagttatgaatgtcatatgtgtcaccaaaatttacagagttgaaatccataactcccatagtgatggtcttgggaggtgggtctttggaaggtgattagggcatgagtgaggagctgtcatcaatgggatcagtctcatataaaagactaccttccactatgggaggacacagtgagatgacatcatccatgaaccagacagtgggcccttggcagacaccaaatctactagtgcactgac

SEQ ID NO: 697037 - DNA, 135 bp, Homo sapiens
gacagcataggcttaggcagaagccctattactttgcaatggggcccttcaggaagtcgcatgggctcagaatggctcttagtcgtgcttaagatgtgagcctttcgaatgagactaatttctctcggaccattg

SEQ ID NO: 697038 - DNA, 910 bp, Homo sapiens
  misc_feature (25)..(25): n is a, c, g, or t
  misc_feature (58)..(58): n is a, c, g, or t
caattcccgccccgtcgttcccccntttcttatgaacccccgggttctcctccgccanattctctccctctcttcactcgtcgctttaaggaggctccccctccccctcctacttttcaaagaacaaccttgggttagttgttcctccattacgacctcatctaaactgtgcggcgcaccccaccaccaaacatggtgagaagaaacaagaataatgttcttcacctcgaaggttttcatataggcgccgcatattactcccccgcctctctctccctccttgctgcacagtgttaacacagtacgttcccctctcttgagtgcacaacacatctcttcccaacgaatacactttttctctctttggtgcgaccacctcgcgcgcacagttcccacgagccccacgccaagctgtctgcggctctaacgcgcgcccctgtgtggactcgctcctcccgcctccactaagacaatgtggggcaccacgcccgctggtgtgcacacatcatgtaaggtatgtgctcgcctctagaagagcaacgagctcatcgccgagggctagacatacattaaagagctggtcgtcattcagtctgcgccccacaaatctagtctgtgtgatggcatagacaatgttgaacaagactttggtttctactgttacatgcatccctggagatgcccgctatatagtggcgaagctgttgggtgttaggagaagaaatggatgttgcctcgttttcccaagggcccactaggttcacactacttcttttatgctgacccgatgcaatacaagatacccctgggagcacccttatgcccctatgtggctcactgttctgcttcgtgttgacccaacagggcgactatagaacccctcaaggatggtggcgccccacaatagaca

SEQ ID NO: 697039 - DNA, 115 bp, Homo sapiens
ttctagaggatacccccaggtcccttagccatttaactataccataaacggccaccagcctgtgtaacatagcactgtatggctgtagtcccagctactcaggaggctgtggcgg

SEQ ID NO: 697040 - DNA, 135 bp, Homo sapiens
ctccaccttactaccagacaaccttagccaaaccatgttaccgaaataaagtatatggcgatagaattgaaccttggcgcaatagatatagtaccgcagtgaagatgaaaattcattaccaagcatattatagca

SEQ ID NO: 697041 - DNA, 185 bp, Homo sapiens
gagaggcccgaggacctaaacttgcccattgccgtaatcaccaggatcatcaaggaggcgctcccggacggtgtcaacatctccaaggaggcccggagcgccatcttctgcgccgccagcttttttgtgttgtacggacatcctgtgctaaaactttgcaattaaaggaaagcggagaggtgaat

SEQ ID NO: 697042 - DNA, 146 bp, Homo sapiens
agcggtcctgtggcaggagtcaggtcagtggtgttcacacattcatgctgttgtgcagctatcacttccatctccagagcccttttcatcttaaaactgaagctctcccatcacacagtgacccttcatgtcctccacaacctcgt

SEQ ID NO: 697043 - DNA, 498 bp, Homo sapiens
  misc_feature (7)..(7): n is a, c, g, or t
  misc_feature (20)..(20): n is a, c, g, or t
  misc_feature (37)..(37): n is a, c, g, or t
  misc_feature (60)..(60): n is a, c, g, or t
  misc_feature (79)..(79): n is a, c, g, or t
  misc_feature (155)..(155): n is a, c, g, or t
  misc_feature (493)..(494): n is a, c, g, or t
  misc_feature (497)..(497): n is a, c, g, or t
caaggtnggaaccaatgggnaacctgaggcctaaaanttcccaaaagtgttttggggttnggggggcttcttttccccnctgtctctctctctcctctctctctcttttttcctctttcctctgtctctttctttttcccctcagcagattcctnattctctatccctctcccctcccctcccccacatttcctttcctttccagaaatttttaaatgctggcccaggtgcgatggctcacaactataatccctagcactttagtaggccgaagtgggcagatcatttgaggcccaggagtttgaggtttgagaccaacatggtgaaaccccatctctactaaaaaattagccaggcattgtggcaagcacctgtaatgccagctatgtggggatctgaagctcgagaatagcttgaacccgggaggtggagtttgcagtgagtccagatggcaccactgtactccagcctgagtaatagaatgagactgtcnnagnt

SEQ ID NO: 697044 - DNA, 183 bp, Homo sapiens
tcgagccggtaccggttcgcatgtgccctaatgtcctaaatacccacacgggctgggtgcagtggtttacgcctatatcccagcactttggtgaggctgaggcaggtggatcaccatgtgtgttgagagttcaagaccagtctgtccaacatggtgaaactcgtctctattaaaaatataaaa

SEQ ID NO: 697045 - DNA, 438 bp, Homo sapiens
ctaccgactgacagctgtgctcccaaagtgctgggattatggtgtgagccaccgtgcctgacctttttcttttcttttttaaacacgggctcttgcgctgtcacccaggctggattacagtgacaccatcatggctcactgctgcctcaacctcccggcatcaagtagtcctcccactctagactcccgtgtagctggaactacaggcatatgccaccatgctggctaattagtttttgtatttttttatagagacgtggttttgccatgctgcccaggctggtcttgaactcctgagctcaagcaatctgcctgccttaggcttccaaagtgctgggattgcatgtgtgaaccactgcacctgactacaaccaatccttttcatgaagtttgcctttgttccaagtgtatgtaacttattgaggcacagattgcagt

SEQ ID NO: 697046 - DNA, 162 bp, Homo sapiens
ccgggggggggaaggggggggggggggggggggggcacggttttataactaagggttttgttgggaatccccttttttacccctgggggggtcccccatttttttttttatgccccccccctcccttgtttttgccctttttttttgcatttacccttcccc

SEQ ID NO: 697047 - DNA, 114 bp, Homo sapiens
atcgatgctactccgtgcttcggatcgactgtcctacgaggactcccgttattgctattgtcgtgcctgtaaaagccttactagaagtgtgaaaacgtaggcttggattaaggc

SEQ ID NO: 697048 - DNA, 918 bp, Homo sapiens
  misc_feature (452)..(452): n is a, c, g, or t
agcgggcggtcccagcgtcgctccggacgctgccaacctgtcctccagccgtcgctcgacgttgccacctactaagactcccacttgcaatactcgaggttcgaagtaatgctgtctagaattacacagactgagactcaacgacatggctgacccagatgatgctcacacaaggtggcagctgaaatgtttcctgtgccacactcttttggcactaagagatatcgaggtcataacgtcagatccctttatgtgtgttcgttcttgaatacaagtggtctacaggtggtatgaggtggagcgcgcagaaaggattaagaattgctatgaatccccagagttttccaagacatttagtcattgattactacgtttgaagtggttcagaaatttgatcattggaggggtttatagaccatcgacgacaaaactattgatgcatgatgtgcacngcatgactctctgtagggtgactgtgatactgtacacttgggaaccacattgtcatccatgcgaagtagagtctcacactcgaccatctggttgatgcatgagactggtaggacctgtcagcgagaccgtgcggagctaacttccacgaatcttcagccgtaggagaagaaatgtgagagatgatcagcagtgggtctctgtatgaaagtggaacgcccatgaagagactggataactaaggactctattcggaaagtcagacccaatacctggaaattccagcgagcagaagccactctgagtggaaaactggctcaatgagtgcagtcggagcgaaggttggttagaaacccactgggaatcgctggctgggagggctcttcaaagaatcttccctttattcactgggttacgggagaattatggaccaaaccgattaaggtgggagtgtcatgacattggcca

SEQ ID NO: 697049 - DNA, 196 bp, Homo sapiens
agcttacaacagctagctgtaaagaaggatcacttgtctgtaacaaataacaagaccacgtagagaagattaatcctgttttgttctttcgttgattgaaacataataagttgttaatattctctagcagccttctttttcttccatagcgtatcttccttctaatagttctggctttctgtgtagctctcgataa

SEQ ID NO: 697050 - DNA, 117 bp, Homo sapiens
tgctgctcaggttccttgctcaggtctcctgccttgccagctctgcctggcccaggccagctcagttacagctcagctcagctcagcccagcccagcccagacctgagcaagccagg

SEQ ID NO: 697051 - DNA, 136 bp, Homo sapiens
catgttgcagcacgtggtcgagtggtggaggctatgcgagtgagaatgcaggcatgagtagcgaaagaagggtgagaaacccttccgccggatgaccaaggttctagggctaggctaatccgccctgggtaagtcg

SEQ ID NO: 697052 - DNA, 1063 bp, Homo sapiens
  misc_feature (223)..(223): n is a, c, g, or t
acatgacaaaaactagcccccatctcaatcatataccaaatctctcacctcgactagacgtaagcgcgttgcatcctcacgtctctcaatcttatccatcatagcaggcagtggaggtggattaaaccaaagccagctacgcaagaatcttgagcatacatcctcaattacccagcgataggatgaagtaatagcagttctgaccagtgacaaccacttaacnatcaaacgattcgtgtgaagtttaacgtcattgtaatattgatctctaactaactacgcagcattcctaactgactcaaacattcgagacatccaagcaccgacgaacccgtaactgactatctcggcaccttgaaacaaagctatacatgatctaagcagacacttaaatttccagtcacatccactacgcttctactcgctaaggaagggcctagcgcctccgataatccgagtctatttttgactccaaagttgagggccattattcgaatgaacttgcacagagaaaaagcaagtacgcactcgatcatgccccagccattcatcgggcctaccatcatccacttccttaaacctgctactttctaacctatgctcctaatctacgtccactctcaattcacagcgtactccccatagtctaacaaaggtaaaaaatgacacatgagcagtttgtaaacataacaataacccatccccaattttcctcgcccatattgcagtcgaaccttaatcaacgtctatctccatacgctattcttaccctttttatactaagtaatcttaaccggaaaacatggggactgacagacagggagagaacgcgtttttgaggagagaggatggggcaacgacgaaagcacacacccttcacacacacaccctggcgtcctgggagacggcacgagacaacacgcacggtagaaactcagcaccgaggccaagacagggactcccaaggagcaacccgcggacaaaaaaggagcgcgcagatacccaccaaaatataaaaggcccgggagaccgagtggtcagaacaaaaccacaggagccacga

SEQ ID NO: 697053 - DNA, 218 bp, Homo sapiens
tcagggccgagatgaaacggagctaccagtgactcagcgagtgaccatatcagggcaggcaaagtgagggtggagctcattgtggttctgtcaagcttcagtataatgaggcttagacgaagtcttcaaaccaaaaatatatcaagtattacagttcacacatggcaaagttttcaaacagaataatcctgtattcagatttatagcggattgaagtt

SEQ ID NO: 697054 - DNA, 763 bp, Homo sapiens
ggccgggcgcggtggctcacgcctgtaatcccagcactttgggaggccgaggcgggcggatcacgaggtcaggagatcgagaccatcctggctaacacggtgaaaccccgtctctactaaaaaaaaaaattacaaaaaattagccgggcgtggtagcgggcgcctgtagtcccagctactcgggaggctgaggcaggagaatggcgtgaacccgggaggcggagcttgcagtgagccgagatcgcgccacggcactccagccggggcgacagagcgagactccgctctcaaaaaaaaataaaataaaataaaataacacttaaaaacaaaaaaaaaaaaaaaaaaaaaacaacactattttcggcgcgcgcgcccgggcgcccctgagagaaaacggcttctcgagacacacacaccgcggtgggcgcgcgcgcggggcgcccagaggagaggactagagtgagacacacacggggctcaagagaagtgtgtgctcccatgagagagaacacccggggccaagagaacacatagggcgtgggaattcttccacccacaactgaaaaacaaagcgccgcgcggggggcgaaaaaacgagagagaggcgtcttgtgtgaagacaaagatctgtcccgaagagagggaggaataccgaggaaggggctaacaaaaactgcggggaaaacaacatataacgaccaaggggagcgctctaaaaggagagagagaccgcgaaatataccacaagtgtcgcgcgccccgt

SEQ ID NO: 697055 - DNA, 233 bp, Homo sapiens
  misc_feature (200)..(200): n is a, c, g, or t
ccaggaagtgatctacattatggcgtgctatatcaggcatttctctgtcatacttcaatgcacttagtatttggagagcaaagggaaatcagtctagccgctaacatcaagctcaaagaagtataaggatgctatttcatagaaaacatcctaagtgttgattctacttatgcatgcttgacaaagctcagaaattccanaactccaacgaaggaaagaggaaaacaatgaat

SEQ ID NO: 697056 - DNA, 565 bp, Homo sapiens
  misc_feature (11)..(11): n is a, c, g, or t
  misc_feature (38)..(38): n is a, c, g, or t
  misc_feature (135)..(135): n is a, c, g, or t
  misc_feature (180)..(180): n is a, c, g, or t
ggagaaaacanctgtggaactcaaacccccccgaaaanaaatcaaaagaaaacgcggtttggtgcttgtggggtcctccccaccaaaattccccgtttgttttttttcactttcaaaaaccaacaagcccgcgcnacatgtgagaaaagcctgtgtttcctcccctcctcaccccccggngagaagaagggttgtggggtgttcactagtgggggccccccatctcccctcatcaccccagggaaacctttgtgttttgccctggaaaacacccgaaatttttgtacattgaaaggcccttttccttcctccctccccagaaggtggtttttgtttaaccccccccctttttgacccatgtaaatcaaataatgtgagaaatcatcggcctgaaaaaagactttgtgcggattattgggaacattgaagcggtttttgtgttttttcttcccttgtagtttggttttgaattaaaaaaggaaaaaaaagtaattatgatccattgtagtttgtgtacaaaaaatgttgaaaacggttttattaaaagggacattttttttccgca

SEQ ID NO: 697057 - DNA, 332 bp, Homo sapiens
  misc_feature (30)..(30): n is a, c, g, or t
  misc_feature (111)..(112): n is a, c, g, or t
  misc_feature (216)..(216): n is a, c, g, or t
  misc_feature (276)..(276): n is a, c, g, or t
  misc_feature (297)..(297): n is a, c, g, or t
cccccctaaccccccccaaaagaccagaancctaaaatccttgaagaaagaggttaggaagtagatattgattacctatccataattccagcacctaacctatgacccccnncatcatacctaaaccttcaccctcattatcctcaccttagtccctttatcatccttaaaacaattctgtgacatacatattatctcattttacacaaagggaantcgggcatggtgctcatgcctgtaatctcagcactttgggaggctgaggcagaaggattncctgaggcaaggagtttgagnccagcttagccaacatagtaagacccccatctctt

SEQ ID NO: 697058 - DNA, 619 bp, Homo sapiens
tgacagaatcacactcaaatgccttcaatcaacaagtggataaagaaactgtggtatatatatatgatggaatactactcagtcataaaaaggaatgaattaatagcattcgcagcaacctggatgggataggagactattctaagtgaagtaactcaggaatggaaaaccaaacagcgttatattctcactcataagtgggagctaagcttgggatataggtgcaccaaaatatcacatatcaccactaaacaacgtactcatctcaccaaatgccacctgttccccaaaaacctatggaaataaaaaattttacaaaaagataattattaatccagtttttggtgaatcagtgagtgacagtggttatagtagtggtggtttaaatcaaggaataaatgttttcaaagtgaaaggagcacatcctaccacacagttcaaaaacaatcacaaatatggcaggcttgctgagagctttcatacatcattcatcgtcatgcacttgtatgattattgtataactgtacacatttctattcaacaatgatttgtatcctccaatgcggttattgcagttcagtgtgatacatggctggggcctatctggtagctcggcgca

SEQ ID NO: 697059 - DNA, 417 bp, Homo sapiens
tcaggggaaaatatttttttggaaacccccccaactgaaaattggtcccgggttaaacccctttttctcttggaatgggttttttcggggtcccaaaaatgttttttctcctccggtggttcgggaagcggccgagggccaacattgggggggtggtgtacagtgaactttagggtcaatcattctaccagaagcccgccgtttcgttctgcaccagacaaggactgggggagggtgaccccccgttttttgggtccccaccagacagcttttacagcaatgacaaatattatgggtcattttcaccaatgatgggacaaggccccccaggagggttgatgctctgtgtcagataggtcatattatggggaggcatgtgtcatagaatcatcttggcccgtcctgatagggaacccg

SEQ ID NO: 697060 - DNA, 884 bp, Homo sapiens
gctctcgccaggcgtcctcgtggcaagtgacatcgtctttaaaccctgcgtgaaatccctgacgcaccgccgttgatgcccaggaagacaggcgacctgaattccaatacttccttaagatcatccaactatgtggatgattatccgaaatgtttcatttgttgggagcagacaaatgtgggctccaagcagatgcagcagatccgcagtgtcccttcgcgggaaggctgttggtgcctgaatgggcaaagaaccacccatgattgcgcaaggccatccgaggggcaccctggaaaaaacaaccccagctctggagaaaactggttggcctcatatccgggggaaactgtggcgcttggtgttcacccaggggaggacctcacttgagaatcaggcaccattgtttgcttgcccacataagggttgccagctgctgcccgttgctggttgccatttgggccccatgtgaagtcactgtgttgcccacgcccaagaaaccactgttctcgggcccgagaaagacctccttttcccaggctttaaggtatcacccactaaaatctccagggcaccatttgaaatcctgagtgatgtgcagctgctcacgactgagacaatgtgggacgcaggcgaaggccacgtgttgacttgtcaaattttcccctttctcttggctggtcatccagcaggtgtcgcatggcgtctacacctgatggttgttcccagcggactctgctcccgtcgggggtgccgcatgtgcggttgctgctcgctccctgtgctcggcccttaatagggacggctgctgttgggaggtactccccgggacgcgttggccctgtgccttgcatttttccctgccaggcgtgtttttcccttctcaa

SEQ ID NO: 697061 - DNA, 962 bp, Homo sapiens
gcttgggctgatgtgacccaacaagcagggctggtgaagtctgaactggaagcacagacagggtctccaaatcttggcagacaggagtgggacagagggaggaggcagctgcagtccttccccaaactgcgcacagcacctcacccatgcgctcagtgctgctcactctggtggccctggcaggtgtggctgggctgctgggtggctctggctgtggctctgtgtgtgcggcagcatgcgcggcgagcaagacaaggagcgccatggcgagctccatggggcctgagggggcccatggtgacacgtacctttgagtaccatggacctgtggcgtcagcacatggccacgaagtccttgttcaatccgggcagagggtccacgcggagccttcacgggtgagcagtgtgtcctcccagttcagcgacgcagagacccaaggccaagacccaggtcccacagcagcattcccgtacctggtgcgaggattgccggccaagtgcaacatggacatctccatcgggacacatgatgctggcatacatggaggatcacctgcggaacgggacgcttgccaaggagtggaggcctctgtgctaacaagcagagcaaaactgtggcaccggcagggggagggaaatcaaaaagaacggattctgattctgcctatgagcatgccgcataaaactgacgtggagagagacttctcggaggaataatcaacgcagccatattgagatgacctcggatgcaagcctaaatagcagcgggccggtggtccatacatcgaaaaattctggacaatggtgggaaaagggggcaggatagtagtgaccgggggggaggggtaaaggggcggtggcaaagggtgccaacagttttaggagagggggtgacatggagagtgggggagagaaaaaaagaaaaagaaagcaatatgtaagaagacagggaagaaaaggga

SEQ ID NO: 697062 - DNA, 112 bp, Homo sapiens
cacgaccttgaaaaccaagccagagtccctggtcgctgagggtaaaaaggctgccttgatccccaaggaattcacgctggacaagcagaccacggaatacaccattgaccag

SEQ ID NO: 697063 - DNA, 205 bp, Homo sapiens
acagtcaatccagggaagataccttcaataaggaataagctaatcactaatagcaaggcttgggagattcacagttgaatagaagtctttagtaaactgttagacacagatctatacaatgcattaaggagatccactaaagaaagaattttaacaaagcgggggggtacccgaggtttcgaattcggtaattcatgggtcatag

SEQ ID NO: 697064 - DNA, 1239 bp, Homo sapiens
  misc_feature (514)..(514): n is a, c, g, or t
  misc_feature (1239)..(1239): n is a, c, g, or t
agcgattgatacacggctggtcttaggcccttctataaagagtgtgagaaagtgtacccggaactggtgtgaacaacctgcagcatcatggagcgggaaccctgaagttcatcttatgccctgctctcagcgcatctatgcacacgtgaaactggtggtgtagacgtaagccgactatccatggctcgttgtacttcgccgacgacttcccatagcagtatctagcagttgcccgaataggagtcagattgggtcgcctggttgaggagggctagctgagtggtgcatcatggcatggaaggacatcgcatagccccgcgaagtgggcacgcatgggcgccgagtggctcgcaaggcccacgttatgtctatcggctagggatctcaagcacaacgtgttcttctgtgcctgggccaggggaaagcttcttgcgtgaaacatgcagtggcttgccttccgtggcatggtgtacatggaggcatcgtccctgcgtaaaccacgcttgtattgcgncggtaacgctctgggcacctaagtcttccccacgccaaaggaggtcgagtggcgaacggggcccatgtgtgcgacgaaatcgaggggctgtcgtgttctcatctacctctcaggaaaaaacctattggagcaccggtgggcatagggtactactgggacattgagaacgatcccttttatttccacaaggaaacccacaattagaccaggttaacatatcacttgggaggcacaggagtcgctcaccatagggggtagtttgttggcccttccaccccaagtttggttttaagccttcgagaatttcgcctaagacttttttccccggccaacttcgttgaagggcggtaaccccttcggcctttagttggagccggaattggcccacaattggggccaaagcacacgggtctcttcacctagcaaggagattggcacttgctaaacagctaagacgcgagggttgcggcgccactatgagggcaaaaagacccgagagcgttgaacccgcagaaggcgacggcttgcaggggagagagcccccacaaacaacttgcgtagcgttgggcgccattttaacttccttaccattggtgttggccgcctttgttctcaggggaagaaggaaaaatttgcgggcgggaacgaactaggacgctaatttgtagccacctttctcaaactcttcaaagcataaccccacccgttgagagcttcgtgtgggn

SEQ ID NO: 697065 - DNA, 202 bp, Homo sapiens
gtaaccatccacttgacaagtacgccgaggacccgatgggaggtggtcttgcactatcatggtggggctacccacagtgcaagctgtcagccatggacttgggtcagctcctcaggcaggctgggctcatgaagagtactgaacccggagagcagcctgaaataattccgctggcttcagatcaccggatgtagaaacacgg

SEQ ID NO: 697066 - DNA, 231 bp, Homo sapiens
  misc_feature (110)..(110): n is a, c, g, or t
tctagagtacccctgcggaaccctatcggagtacaatactatatggattttgggagtgactcaagaagtgaagaatgcacaagaatggatcacaagatggtatttagcanaccctagccttgcttgttacaattttcttttttaagaatatctgtaatggtactgactttgcttgttttgatgtagctcttttttaagtgattatttattttttttgttgtgctacaccta

SEQ ID NO: 697067 - DNA, 346 bp, Homo sapiens
cttgaatcaaaatttttggggggtggggcccaaaaatctggaaattttttttggttaaacctcccccagaaccccctggttccgatgcccctgggtggggggcctgcttttaaatgcttgtttgcaaagtccccccacccatgaaacccttatggctgggcaaatgagctttgctttaaaattgttgccattcatgtttttgagttccaaaagtgctaattccccacatgtaattgtgtaagtaaaccttggccctttcctacttttttatgtaataaaagttataaccctaagcttatataaaacctgggggggtattaaataaagggaataaaaatgaatggga

SEQ ID NO: 697068 - DNA, 202 bp, Homo sapiens
aaataactcctggactcctacctatatttacaccaaccacccaactatcttaaacctagcctggccatcccttatgagcggcgcaggatatagcttcgctctaagataaaaatgccctacccacttttaccacaggcacacctacaccctatccccatactagtatatcgaaaccatacctatattaaccatacccggccga

SEQ ID NO: 697069 - DNA, 686 bp, Homo sapiens
aacacttaaaattatgcacacttatgctaaaatgaactgctaaaatttcgtgcattcacaaagggatctcagaaagatagacacaggtgaacatcattcacatgcgacatatagaagtcatataccaagatggtagatttaaattcaaccctgtaatatgagtaattacattaaatgtaaatgcactaagctatccagttacagacagcaattgtcagtctgaattaaaaagagtcaccataatctgaacacacaagggtacatcaagatatgtagatatatcatgtatattagttatatgtaactgcaggataatttatcgccataatttatcagctaacaatgccacacacttatttctctgttcagtctggttcatctgtgggaaatttggttacaagctcactccccagctcaagagagtgagatagacacagaatccccaataaaaacctgtcatttcttaaaaattgattctgtcatgtacatcaatattaggttcccctcaaaatcaagcagaaggcatacattggcataccattatcacccaaagtctgtaatctacgttaagattcactcttggtattgtacattccatggatttgtcacaaatatataatcacatgtgtccaccattatagtactgcacagagtagtctctctgctctaaactatcctctatactc

SEQ ID NO: 697070 - DNA, 220 bp, Homo sapiens
tcagctctgtacctgatcttcgtgtccgccctacattatcgtcactcagttccactatcaacttttctcatacggggctatcacccactatggccagcgtttccaacgctgttttgataagtcgacttgctaaagaggactaggctcctgccgatttcgctcgctcactactttctggaatctcggtttggacacgaaatgttcaggggcgatcctctta

SEQ ID NO: 697071 - DNA, 992 bp, Homo sapiens
  misc_feature (413)..(413): n is a, c, g, or t
taaccccagggtagtaaaccgtttacatgggaaacgggtataaaaataagggccccccaagctttagggttcccttggggtaacagtttggggggtggctcttagggtttttaccaaaaaaaaccaaatggacaaaaaccagaccttaacaagacggaggggttcctaaaactagggaagccggaaaggggctgagatcacaccggctggtgttttcacaacccagaggccctaagccgccacgctcaagcaccctcatgcgctccaggagatacgcgggattttggcacggcacactaactggcggatacataacaaaggatgtctcatcttggaagttcttattcaccacatgtggtgctcttcatggaattacaaccaaataacaaatgtcccacaatctttggggaggngcgcgtggctataaaaaatatctatcaggagaatctctcctggcaatgaatctattaatctaaccagatatacaattgcgcccacaaagaggcgtccagaggaaaaatcacgctctggaaaaacctggggtacgggtgcacttataccttggggggaaatttccaccctagaggatatggtttatcccgcggggaaccaggtatggtccctcctgctccaaaagaggtcttttccaccacctgttgtgaacacaattccccggaagtgtccccggacgcaggggactcggccctgtgacactctagttacaggcgtaaagaaacaaggcttccaagaggttaccacagagcggggagggggggacacaggggagcgcctctggagctaggaggcgccgaccccatttccccgaggaaggtttcaacacagggacggcgaggggatcaccacttcggcagcttataggatcccccagcttatttctcaaaacaggtgtgtctaacaagcaggtataaaaagagacgcgcgtgaccgtaaccacaaagtactcacacaggaacggaccaacgatgtagata

SEQ ID NO: 697072 - DNA, 391 bp, Homo sapiens
  misc_feature (313)..(313): n is a, c, g, or t
ttgtagaaagaaaaatcaactcactgttcagagctgagaggggatgtaggcccatgggcacctggcctccaggagtcattgtgttgggagagccggccacgcccttggctttagagctgtgttgaaatccatttgggtggttggtttttaacccaaactcagtgcattttttaaaatatttaacaatccaagttgagaacacttgaacacacacaatggagaccccgcctaacatcgattttcagttacgggccggaatgcgaaccaccagccaatctgttcccatggggaacatgaggtggtggtggcgcancacactgcgatcaattctgcatgggcacagtagagatccccgctactcgcttgctgttgggtcaccctagcttccata

SEQ ID NO: 697073 - DNA, 683 bp, Homo sapiens
  misc_feature (8)..(8): n is a, c, g, or t
ccccaagnaggcctgactgggctggtctgcctggtctgcatactctccgccacctgcttcacgctgcagtctgggaactactggctggagattttcgacaattttgccgcttccctgaacctgctcatgttggcctttctcgaggttgtgggtgtcgtttatgtttatggaatgaaacggttctgcgatgacattgcgtggatgaccgggaggcggcccagcccctactggcggctgacctggagggtggtcagtcccctgctgctgaccatctttgtggcttacatcatcctcctgttctggaagccactgagatacaaggcctggaaccccaaatacgagctgttcccctcgcgtcaggagaagctctacccgggctgggcgcgcgccgcctgtgtgctgctgtccttgctgcccgtgctgtgggtcccggtggccgcgcttgctcagctgctcacccggcggaggcggacgtggagggacagggacgcgcgcccagacacggacatgcgcccggacacggacacgcgcccagacacggacatgcgcccggacacggacatgcgctgaagccggccggagcggggcctgcatgggcgggtctgtgggggggcttggcctgatggtgggcggggccccgcccacagggccgaccccaatacaccagcgactcaaccttgaaa

SEQ ID NO: 697074 - DNA, 372 bp, Homo sapiens
tgtgcgagtatggcacgagcgtcagactctcaagcggatgtgactacacgtgcgcgcgaccacacgtgtgtataattttgtgtgtgtagtgtagacacgatattactgtgttagccacagatagggtctatatttctgagcttacacactgtgatggcaggactttgagagggtataagcgcgagaactggttgagttccggagtgtaagaacaggctgggttacacaatgagacacctgtgtctataattattaattaatggattaattaatttggatgacttgggaagaataggtgtagagagttatattaaacctttggaaggaacttaacaaatttttataattagttttttatacacgagtacacac

SEQ ID NO: 697075 - DNA, 223 bp, Homo sapiens
actggttacgtcgcaacgtaaagaacggcagaaggtgagcggtgcgtgactagtggcgaacgaatcctcgtcatcgttcttgtcgtcgacatgtgctcgccactctctcagctccaaggccgcagcagattcgttgcgcgtgacggctttgatgagatgaagctcgttctctttgaagaccctgtacatgcccttgttgatgatggccatgttggacagatct

SEQ ID NO: 697076 - DNA, 505 bp, Homo sapiens
  misc_feature (210)..(211): n is a, c, g, or t
tttttccccccccccccaaaaaagaagatgttttttttcctccgcagccctctcttcctaaaaaaaaaaagcgggggggggcctcctttctggaggggggaaaaaacacccccccgcggggggaggtttttttttcccccccccccaaaaaaaaaaaaaaaaaaggggggtttccccccctttttcccccccccgggaaattaccccccnncccccaaaaaaagggggggagaaaaacccgggtttttttaaaacccccggaggcccccccttttggtgaagaaaaaattttttctcttttaaaaaacaccctcttttttccccaaaaataaaccccccaaaaaaaaaaaacactttttttttaaaaaaacccccccctcccccggaaaaaaccccccccccccccttttttaaaaaaaaaaggtttgtttaaaaaaaaattttttaaaggggttttagggcccttttaatcaaacccatccaatttttggttgggccagttaaa

SEQ ID NO: 697077 - DNA, 541 bp, Homo sapiens
ctgagagcagcgtgcatatatgcaacaaaaagagcgagccccagtacccgtcagacgtgggaccgatagtgtgtcgcgaagccacataagcgtggcttcgggatgggaggctcatgctcaacgacctgccctcaccccccaaccttcgagggcggggaagaggtggtgagcttccggggacgaggtcgcgagcgaggatttggtggcgccaaccatggaggctacttgaatgccggtgctgggtatggatgctatgggtacggaggcacctctgcgacagtaggagacagtgactgtgccacagactgctacggctatcatgattttgggtcttcctagagcgtctaaaagtatcgcacacaaaatcaactttttcctccaatttcctccaactccaaaacccaaagtgtccgtgctgtgtccctgtgcttcactgggtttctcaagcgtggcttttcaccgcagcttgtctgaaactcttagcctgcagaatataagacaatgacagtttcaatcgtgattggcctttgaacttggtcct

SEQ ID NO: 697078 - DNA, 323 bp, Homo sapiens
  misc_feature (45)..(45): n is a, c, g, or t
  misc_feature (315)..(315): n is a, c, g, or t
tagagactgagtctccctctgtcgcccaggctggagagcagtggngctgacttggctcactgcaatctccgcctcccaagttcaagcgatttttctgcctcagcctggcaagagctgggattatagataggcacatgccaccacccgtggctaatttttgtatttttagtagacacagagtttcaccatgttggccaggctggtctccaactcccagcctcaagtgatccagccacctcagcctcccaaagtgctgggattacaggaatggccactgcgcctaccctattttatttttttaaagcacttgtttanttatcacc

SEQ ID NO: 697079 - DNA, 397 bp, Homo sapiens
agacaggatgaacagagaaactcagtaggaagagagaaagaagcaagaagagcaggccacacgccagccataagaagaagcagctgctcagcattaaagacatacaagaatccattcagcttcatcatgaagcttgggaacgacatcatttaagaaaggaacttcgtagcaaaaaccaaattgctccggacagccgaccagaggaaaacttcttcagccgcctcgactcaagtttgaagaaaaatactgcttttgtcaagaaactaaaaactattacagaacaacagagagactccttgtcccatgattttaatggcctaaatttaagcaaatacattgcagaagctgtagcttccatcgtggaagcaaaactaaaaatctctgatgtgaactgtgc

SEQ ID NO: 697080 - DNA, 223 bp, Homo sapiens
gagcacagcaatcatccctgtcggtatctaatatccagcactagtagacactataaatccctaccacatttcccacaaaacagaccgtgtgattatgcaaacatcacagcctcacaggctcttagtgaatggactttccccgtgtggcaacgcgtgacatgatttaaacaaagtccctgatctctacacagagatgttcgtaatgtgcgcagcgggcagagtc

SEQ ID NO: 697081 - DNA, 170 bp, Homo sapiens
tccggtagctgagcttcgtggaagacggtgtttgacgaaccagacccggcttcccggaggcaggggatctacatgagtgacaactacaccgatgtgaacggtggagaaggtgcttcccaaggcatgacattagagtgcccacatggcgctggaagttgggaatgatgagg

SEQ ID NO: 697082 - DNA, 110 bp, Homo sapiens
ttagcgtaggttacaaccagcctgctgaaatctctttacatgaagagtaagaacaggaggagcacgagaaattagcatctgctttttggcattggtgtaaaccatgcttc

SEQ ID NO: 697083 - DNA, 1163 bp, Homo sapiens
  misc_feature (639)..(639): n is a, c, g, or t
aacggtttctctcgcttacgatgcgtcaccccgctctgatcaggcgcaggacgtagctcgatgcccctgtaaaacagggaggtgatggaattagattagacccaatctttgccagatgtcggtagtctcacgtagataatcgtggcgtagttgattggaagttgtccaagtctgttggtgagaactctactgatctacagaatggtggtcaacggtcaagtaccctctacggagtaccctgaatggaagagatgtatactcgattcgtgtctcatatgtgatcgcataaatgatgagcagagatagctgtggctagagtgagccgggttttgtctcttcatttggtctataactcacagaacacatgcaccgacaaaacttcctgtcctgttctacatttgatgggcttggactagttgacttggatcgctatgatggagaagggtggcctcattaactggagttaccaggcgcatgagtgaactgctctgttagtctgcaataatacagtgctctgtgaagtgagcacttcttttgcactcatatgcgagctctggcgctctctgaaacgaagtagactagacttgtctacggcgacggtgtagacccgagaataggtggtaaggactcccgttagtntccgatgactcattactatacttcatggcacaggtggaagggatgctcccagggggtataagacccgtgattgatgggaaacattgacttggggccacccagattcctagtacgactttgcaagcccgtcatgaacacacaggggctggtacctgagtgaaagtaagcccaagcggcaggcactggcatcgccagacacttcttccaatccgggagtggacattgccataattgatttgtttggtatcatatgttggcacaatttccctggggggagttacctcaggcagttctacaaatagaaagaaacgccttgttaccgcgtttcaatagtttcacgtagaagcttgggtcacttgaaacacactcttgagcaacttgcaaacgtggtttgacaatagcccaaccggtttccatgttagtcgtgccttcaccaagcaggctgagtgtgttcttagcctgttgaatacacacatttcactgtgacgctaacagagcgtaaccattacagcacagcgaaaaaa

SEQ ID NO: 697084 - DNA, 384 bp, Homo sapiens
  misc_feature (67)..(67): n is a, c, g, or t
  misc_feature (140)..(140): n is a, c, g, or t
  misc_feature (230)..(230): n is a, c, g, or t
  misc_feature (365)..(365): n is a, c, g, or t
acctgaaaccctgggaagacggaggttgtggtgaagcccattgaagctcccaccctgggcaacaaanatttaaactctgtcttaagacaaacacacacacacagatgcacacacacgcacacacacacaaacaatgaaanaaaaacatctgtagtcccagcagtttgggaggctgaggcgggtggatcacttgaggtcaggagttcgcgaccagtctgggcaacatggtnaaaccccatctccactaaaaatacaaaaattagccgggcgtggtagtgggcgcctgttgtcccagatacttgggaggctgaggcaggagaatcgcttgaacccgggaggcggaggttgcagtgaatggaggcgtngctgctcagccctgccgcc

SEQ ID NO: 697085 - DNA, 515 bp, Homo sapiens
tcaacttcactgtttgcatcccacaacgtgatcttcccatcattccctccagtaagcaacaaataggattctgggagaaagcaaacctgggatacccctgaagtgtggcccttaaatcccagttcctgttcacacttaacttccatcacccgaaagattccaaccttaccatcttttgcaccacaactaaaaattttaccacaccgaaccccccaagatagaaaggggctagggcagggattaaaagctgaccaagtgaacctggggccttccatttctattgtttaatccccactgaaaatattccaatccaaaaatggcggggcttttatgtaaaacttcccattattacactgcgctttcccttaggggccggcattgtgcccgcaatatcttggccctctggaggcctaaaattccctaaaaggtgagggcgtattaaatatcctccaataaagtacatacccctttctccctttgggaaaaagagtattccgcttcaaaaattccaccct

SEQ ID NO: 697086 - DNA, 376 bp, Homo sapiens
gcggccgcctactactactattaaattcgcggccgctcgaccacggatgtgtccagggtggcctcgtcgatatcgatctcggtcgagtccgaaagtacggcccacgattctcgcgataattcgatgaacggccccggttcggtgttgtcgtcgtcaacgggagtgatgggggtcaagttcatcgggcgcctccgaatggttggtcgtagtgactgtacttcaccgcgacgttggggacgtggttaatgcgacgttgatgggcacatttccgagtagcgtcgagccatgcccatcgaatcttgctggcgccctaactgggcctgaatgggcgaatggtgcaggtgaccggggcggcccgctacggggtccgtcgacg

SEQ ID NO: 697087 - DNA, 368 bp, Homo sapiens
tcctttattatgtaactgcatttcacagcagcatcacttattttatttgtattcgatgattaatgctgtagaaagtttagtccttttctaagttcattgagtttttcatcatgcatcttttctgtaaactagtcaaaattctcaccatggtttgtttcataatggcatcttcagttgtattcttttgacacagacaaagtttggttacatattgaacacataggactatacttccacaaagaaatatgcttgctcccacttctcttgaaacacgcggcgctatcaatccatctttcattttcccacttttgatagagacataggaacaaaaagagaattcacttttctttaagagaaacaacagcgca

SEQ ID NO: 697088 - DNA, 1777 bp, Homo sapiens
  misc_feature (1620)..(1620): n is a, c, g, or t
  misc_feature (1636)..(1636): n is a, c, g, or t
  misc_feature (1642)..(1642): n is a, c, g, or t
  misc_feature (1644)..(1644): n is a, c, g, or t
  misc_feature (1650)..(1650): n is a, c, g, or t
  misc_feature (1660)..(1660): n is a, c, g, or t
  misc_feature (1665)..(1665): n is a, c, g, or t
  misc_feature (1669)..(1669): n is a, c, g, or t
  misc_feature (1671)..(1671): n is a, c, g, or t
  misc_feature (1692)..(1692): n is a, c, g, or t
  misc_feature (1703)..(1703): n is a, c, g, or t
tcaacatgatttatcacaattatctcatcaataattaccctatttatcttatttcaactaaaagtctcatcacaaacattcccactggcaccttcaccaaaatcactaacaaccataaaagtaaaaaccccttgagaattaaaatgaacgaaaatctatttgcctcattcattaccccaacaataataggattcccaatcgttgtagccatcattatatttccttcaatcctattcccatcctcaaaacgcctaatcaacaaccgtctccattctttccaacactgactagttaaacttattatcaaacaaataatgctaatccacacaccaaaaggacgaacatgaaccctaataattgtttccctaatcatatttattggatcaacaaatctcctaggccttttaccacatacatttacacctactacccaactatccataaatctaagtatagccattccactatgagctggagccgtaattacaggcttccgacacaaactaaaaagctcacttgcccacttccttccacaaggaactccaatttcactaattccaatacttattattattgaaacaattagcctatttattcaaccaatggcattagcagtccggcttacagctaacattactgcaggacacttattaatacacctaatcggaggagctactctagtattaataaatattagcccaccaacagctaccattacatttattattttacttctactcacaattctagaatttgcagtagcattaattcaagcctacgtattcaccctcctagtaagcctatatctacatgataatacataatgacccaccaaactcatgcatatcacatagttaatccaagtccatgaccattaactggagccttttcagccctccttctaacatcaggtctagtaatatgatttcactataattcaattacactattaacccttggcctactcaccaatatcctcacaatatatcaatgatgacgagacgtaattcgtgaaggaacctaccaaggccaccacactcctattgtacaaaaaggactacgatatggtataattctattcatcgtctcggaagtatttttctttgcaggattcttctgagcgttctatcattctagcctcgtaccaacacatgatctaggaggctgctgacctccaacaggaatttcaccacttaaccctctagaagtcccactacttaatacttcagtacttctagcatcaggtgtttcaattacatgagctcatcatagccttatagaaggtaaacgaaaccacataaatcaagccctactaattaccattatactaggactttacttcaccatcctccaagcttcagaatactttgaaacatcattctccatttcagatggtatctatggttctacattcttcatggctactggattccatggactccatgtaattattggatcaacattccttattgtttgcctactacgacaactaaaatttcacttcacatcaaaacatcacttcggatttgaagccgcagcatgatactgacattttgtagacgtagtctgacttttcctatacgtctccatttattgatgaggatcttaaaaaaaaaaaanaaaaaaaggggggggnaaaatncncggggnccatttggcncccgntttntncaagggccaaggggggaaaanaaggggggggnaaaagggggaaaggggttgtggaaccttggggtggggccaagaacgggaaaagtgggctgggtggtataaaaac

SEQ ID NO: 697089 - DNA, 800 bp, Homo sapiens
tcaacatgatttatcacaattatctcatcaataattaccctatttatcttatttcaactaaaagtctcatcacaaacattcccactggcaccttcaccaaaatcactaacaaccataaaagtaaaaaccccttgagaattaaaatgaacgaaaatctatttgcctcattcattaccccaacaataataggattcccaatcgttgtagccatcattatatttccttcaatcctattcccatcctcaaaacgcctaatcaacaaccgtctccattctttccaacactgactagttaaacttattatcaaacaaataatgctaatccacacaccaaaaggacgaacatgaaccctaataattgtttccctaatcatatttattggatcaacaaatctcctaggccttttaccacatacatttacacctactacccaactatccataaatctaagtatagccattccactatgagctggagccgtaattacaggcttccgacacaaactaaaaagctcacttgcccacttccttccacaaggaactccaatttcactaattccaatacttattattattgaaacaattagcctatttattcaaccaatggcattagcagtccggcttactaggagggtgaatacgtaggcttgaattaatgctactgcaaattctagaattgtgagtagaagtaaaataataaatgtaatggtagctgttggtgggctaatatttattaatactagagtagctcctcctgattaggtgtattaataagtgtcctgcagtaatgttagctgtaaa

SEQ ID NO: 697090 - DNA, 765 bp, Homo sapiens
  misc_feature (47)..(47): n is a, c, g, or t
  misc_feature (61)..(61): n is a, c, g, or t
  misc_feature (64)..(64): n is a, c, g, or t
  misc_feature (116)..(116): n is a, c, g, or t
  misc_feature (154)..(154): n is a, c, g, or t
  misc_feature (187)..(187): n is a, c, g, or t
  misc_feature (191)..(192): n is a, c, g, or t
  misc_feature (223)..(223): n is a, c, g, or t
  misc_feature (242)..(242): n is a, c, g, or t
  misc_feature (262)..(263): n is a, c, g, or t
  misc_feature (269)..(269): n is a, c, g, or t
  misc_feature (318)..(318): n is a, c, g, or t
  misc_feature (462)..(462): n is a, c, g, or t
  misc_feature (468)..(468): n is a, c, g, or t
  misc_feature (503)..(503): n is a, c, g, or t
  misc_feature (507)..(507): n is a, c, g, or t
  misc_feature (518)..(518): n is a, c, g, or t
  misc_feature (746)..(746): n is a, c, g, or t
aaatataatttaagaacccacatccaagcaccggcgtcctgtttctnggttccaccaccanccnccgcccttttcactacctcaccccacaccccttcataggacacagctatggnggtcccaggcgggagtcacagggagatgtgggatgatnaaggtcactgattctggaaacagacatgatgangggnncctgtttcaacttgggcaaaggaggccatantgaaacaggttccctccancacaaagttatttttttgtnngtaganaaacaaaacgaagaaaacaaaaagagagaacggggagaaaaattaagancaaaaacaaaactcaaaagccttcaatatgaaggcagcagctgggggaggggcatttacaagggaaaaaaatgattgagtttggtggtgacagcagcaagttgagagactacaaaccccaatgattttgtcactgggccctganaccccntcttgccccctgggacagcccccccactctggagntggnaagggagtcanactctctttggtctgcgggaacgcacccatcaaggtgaggggggcacctggagagaggctgggagatgttgggcacttccttttcctctggtcacacccagtcctgagggaaaggcgccctcacccttggtctggagttccccgaggtggctggggggtgattttcccctcctattatggcagaacccccaaatcctgtctctccaaattgccaactcctcaccccangggctcaaagtgcaatcca

SEQ ID NO: 697091 - DNA, 1570 bp, Homo sapiens
  misc_feature (69)..(69): n is a, c, g, or t
  misc_feature (369)..(369): n is a, c, g, or t
  misc_feature (1413)..(1413): n is a, c, g, or t
  misc_feature (1429)..(1429): n is a, c, g, or t
  misc_feature (1435)..(1435): n is a, c, g, or t
  misc_feature (1437)..(1437): n is a, c, g, or t
  misc_feature (1443)..(1443): n is a, c, g, or t
  misc_feature (1453)..(1453): n is a, c, g, or t
  misc_feature (1458)..(1458): n is a, c, g, or t
  misc_feature (1462)..(1462): n is a, c, g, or t
  misc_feature (1464)..(1464): n is a, c, g, or t
  misc_feature (1485)..(1485): n is a, c, g, or t
  misc_feature (1496)..(1496): n is a, c, g, or t
caggaagagaccctgtctcaaaaaaacaaaaaaacaacaacaaaacccctaggtggacagagccaaagnctcaacacgcacaaacatctgcatacacacctcaaaatggaagcctcgttgccttgccttgatcataagttcttgctaccccaccattcccagaaataaccgctattcctaagtttcacagttcttttgcctgttgttttagtgtttactgcctctgtatgctcaggccatatatgctgttttatctgatgtaaatggactcatacagcttgcgtcctgtggctacacctttgttaacaatacatttgcagtttgtctacactgatgcgcgtggcagctccgtgccgaattcggagaganaaacaattagcctatttattcaaccaatggcattagcagtccggcttacagctaacattactgcaggacacttattaatacacctaatcggaggagctactctagtattaataaatattagcccaccaacagctaccattacatttattattttacttctactcacaattctagaatttgcagtagcattaattcaagcctacgtattcaccctcctagtaagcctatatctacatgataatacataatgacccaccaaactcatgcatatcacatagttaatccaagtccatgaccattaactggagccttttcagccctccttctaacatcaggtctagtaatatgatttcactataattcaattacactattaacccttggcctactcaccaatatcctcacaatatatcaatgatgacgagacgtaattcgtgaaggaacctaccaaggccaccacactcctattgtacaaaaaggactacgatatggtataattctattcatcgtctcggaagtatttttctttgcaggattcttctgagcgttctatcattctagcctcgtaccaacacatgatctaggaggctgctgacctccaacaggaatttcaccacttaaccctctagaagtcccactacttaatacttcagtacttctagcatcaggtgtttcaattacatgagctcatcatagccttatagaaggtaaacgaaaccacataaatcaagccctactaattaccattatactaggactttacttcaccatcctccaagcttcagaatactttgaaacatcattctccatttcagatggtatctatggttctacattcttcatggctactggattccatggactccatgtaattattggatcaacattccttattgtttgcctactacgacaactaaaatttcacttcacatcaaaacatcacttcggatttgaagccgcagcatgatactgacattttgtagacgtagtctgacttttcctatacgtctccatttattgatgaggatcttaaaaaaaaaaaanaaaaaaaggggggggnaaaatncncggggnccatttggcncccgntttntncaagggccaaggggggaaaanaaggggggggnaaaagggggaaaggggttgtggaaccttggggtggggccaagaacgggaaaagtgggctgggtggtataaaaac

SEQ ID NO: 697092 - DNA, 309 bp, Homo sapiens
aaaaatgttggactcaaggcgcatatgtatctggcaacataaaagaaacatttacttcaatgcttttacatggaggagaacgtcattaaacgtattttaattttagtactctcacagtaggacagataatagtctggcttttacacagggtctccagaaattccgtgtttttccgtttagataaattggaccttcatatgtcaagaagtctcagtggtaacagaaaagggtatcaacaatactctatatttttggttttcaagctcaatttccccacaaaggttaccttcagactattctttattccgc

SEQ ID NO: 697093 - DNA, 268 bp, Homo sapiens
atacacacaccagaggatctatccctacctggtcctggttgtgcatactgtcaatcttaacatccgtgcgcctggcactgaacaaggtggagtatcgctcctggaacatccacaaggtgacaataggtcggacctttgcaagctgaagagtgttgtcacgagcataaggggagtgaaaaatcacagagctggctgtctcccatgcatgcaacacatcaaatacacaaccaaactgacttactgagtctccagtggaaaaacactatgt

SEQ ID NO: 697094 - DNA, 145 bp, Homo sapiens
agaaggcgagggggcccggaccagggcaagaaggccgaggggaccccgaaccagagtaaagggctaggagggtaaagggctacccggagggtaaagggctacccggaggttaaagggctcccggaggataaagggctacccggag

SEQ ID NO: 697095 - DNA, 250 bp, Homo sapiens
  misc_feature (31)..(31): n is a, c, g, or t
  misc_feature (116)..(116): n is a, c, g, or t
  misc_feature (165)..(165): n is a, c, g, or t
  misc_feature (187)..(187): n is a, c, g, or t
  misc_feature (197)..(197): n is a, c, g, or t
  misc_feature (243)..(243): n is a, c, g, or t
aagaaattgaaggttttgggacatatatgtnacagcaataggttaagaaaagcaaagcagagaaattgaagatttgtgtcaacactgctttaagcaaatcttttggcaccattttnccaatagcatgtgcccattttgggtctctacattgcattttggtaattncttgcaatatttcaagcatttncattgttatnatatgtgttatagtgatctgtgatcagtgatctttgatatattatngtaattg

SEQ ID NO: 697096 - DNA, 270 bp, Homo sapiens
ctggggaagcagaaggtgaatgagtagcgaagtaacgtcttacatggtggcagacgagaggatgtgcaggagaattcccctttataaaaccatcagatctcatgaggcttattcactatcatgagaacagcatggaaaagacccacccccatgattcaataatccccacagggattattacaattcaaggtgcgatttcggtggggacacagagctaaatcatatcattacacttacacaattgtggtcttcaccatcattgggcagaga

SEQ ID NO: 697097 - DNA, 1440 bp, Homo sapiens
ttgcgtgcctcgctgtgagcccgattgattattggttctccttgcgctggacgtggtctctcgtgcgtgcctcagcacgcgctgttgtggtgtgttgtcggcgccgtgattctgtcttcttcgtggcgttcgtttgttggggagtgtgtggtaatcgcttgcgttctttgcttgtgggggggggtgtggtgtctgcaccgcttggtgttgtcttgatcgctcagggtggtgtgttctccgcccgtgctgttttttgtgtttgatgtttgttgtgttcctcggttgtgttctcggtcgtgctctgttctggtgttgttttgtgttgatccccgctcctctcttgtgttttttcggttcgctgcgtggcgtgtcgccgtcgtttggtggtgtgcacgtaccaagctttctttttgttgggggtggtggggcttttcgtcgcccgcctgctgttttttgcgttgcggctgctttttttcttctctctccctcccttctgtgagaggggcggctccccacaactcgacttttggtgtggtttgtgcgtggtctgggaggtgtggcgccccccctcccttttcacgtcagtgtgtgcgtgctctccccgccgcgggctgtctctccgcgccgctcttgttgtttttctcgtggtgggggttgtcatatattttctcttctcctcgcgcgctctgctctcgcgcgcgtggtatgtctcttctctcgctgcggcggattgatgtgtgtgtctctctcgtatgtagcctcctctgcgcggcgtgggtctcgtctctctctctctctttctctcgcgcgcgcgcgcgcgtgtgtgtgtgatatttatatttgtgtgtgtcgctgcgcgtggtgtctgtgtctctcttccgcacaccacactctcttttctctctctctcactctcgcgagagctctgtgtggagtctctcactccccccccctcgcgcgtctctctctcacgcgtcgagagttgtctcttctctctctctcattgtgcttgcgcgccctctctctatagagagtgtgtctctctctctgtggagtgtgtgtgtgttgtgtataggagcgtctcttctgttccccccgcgcgcgtcttcttcttgtgtgtattctctctctctcttataaactctcccctcccctccgcgcgcgcccctcctcccccctctttctcccgagagagagaggggcgcgctcccctctctctattataagagagatgtttttgtgtgtacacacacacacacacacagaagagaaatttctttctttgtttgtggtggtttccccccctctctctctctctttttattttgtgtgcgcgcgccccctcctcctctctctctgtgtgcctcccccccccccgtctgtgttttgcttgtttttgttgttttgttgtctataaaagggggggggtgtgttttttta

SEQ ID NO: 697098 - DNA, 234 bp, Homo sapiens
cacagccctgcggtcacatacagccctggggtcacacacagccctggtgtgatgcctggccctgcggtcacacacagccccagggacacatatgggcacacgatcacacagggccatatggtgtacatacagccctgaggtcacacatagccctgaggtcacacacagccctggggtcacacacagcgccagggtcacatatgggcacatgatcacacacgggcccgtggtcac

SEQ ID NO: 697099 - DNA, 283 bp, Homo sapiens
tgtaatgggagactagccagtgaattgatcttctggggcagcaaggagtaaagcgagaaaaaggtgctagcggtgaaaactcagctgtcctgtcgggagtggtctggcagtcagtaccctgaggcctgggcttgaagtttactacatgtggtaccatggagggacacatttgcgactgacgacgtggcaaaccttcttgatgccgattgtcttcatgccgcatgactggttactccaaatggaagggcccatgtacaaatgtgggtagcttggcacttgggca

SEQ ID NO: 697100 - DNA, 336 bp, Homo sapiens
agcggaggaaagcggagatacataaaagtacaaagtgaagcagcaagtgctgatgcagaagctacagcaagttatacagaagatctagctaagtggctacactaaacaacagatttggagttttttttatttttatttttttgaaagcggagtctcactcttatggcccaggctggagtgcagtggggcgatcttggcttattgcaacccccgccttcccaggttcaagggattctccggcctcagcctcctgagtagctgggattactggcgcctgccaccatgcccagctaatttttttggtgtgtgtgtatggtcgggctggggatcctctag

SEQ ID NO: 697101 - DNA, 1007 bp, Homo sapiens
cttaggggcgccaattgtgttgtatgcccagcgtctcgagaggctccctttctcaggtagaatctttatccaagggtgttcataggccatgggatggtgcgaaagacgcaatacgtggtgtacacgagtgaagatgttctcaagggcctctctctggcgcacaccacattgggccatgaggaaaaactttgttggtggcgcacattttttctccggtcacatttggtctccctctgggagggggggtcacacacctcctgtgtgtgtgagagcaccccccttttttgggcgccccccctctggctcactgtgatgagcacatttttgtgcacagcacgcacacacacgctcgtgtcgcccctgtgtgggggtgtctcacaggcgtgggcccgcacctgtctctgcgcacgagaccgcgaagggttctttgggggggaatctccccaccacagcggtggataggccacacatctcgcgtgtcacaccgccacgggtgtgtctccacagcacggagctctccccagcacccccccctgtgagattttgtctcctgtgtgtctctcgtcgcacagtctccctgtgacggtgttctggcctctttgcccacactgggcttgttgagttctctttgtatattcctctcttggggctgtagaagcgacgagtcccgacgtgttctccccctcggctacacccccagcttttgtggggggagaccctcgtgatgtttgttgtgaagcacaacatctccccagttctccccaccctggtctctccccccgttctccacatgctgcaccacattttatacccgccaatatgtgacgtcttgtgcgttgttcttgtgtttatattctctgttgtatatataaatggaaatgtttgttggagaatgaccccctcccctgtgcccgctggttctctttccccttttccctggtcccggctactccatggaaccccggacccctaagggacccttctggtttaaaaaaaaaagaccaata

SEQ ID NO: 697102 - DNA, 150 bp, Homo sapiens
  misc_feature (63)..(63): n is a, c, g, or t
  misc_feature (80)..(80): n is a, c, g, or t
ggatgacacataatggctgggacattgaaagtctaacataatttgagtcattttctcccggtnggccttggggttcaggngtgcctccgcgagcagggtgggatgctcttcaggggcaacacgaagctcattgaagaaaagagtgcttgg

SEQ ID NO: 697103 - DNA, 678 bp, Homo sapiens
ggctgcctcggctccagcgccatggagccctccaggtaagtgcttcgtaggtggaaactggaaaatgaatcgggacggaatgcacagtctggctggagctcatcggcgaatctgaacgctggccaaaggtgcctggcactgacagccgaggtggttcagtgctcccccatactgcctatttcgacttcgcccggtatgattagctaggcgtccctgagtaatttgctgtggccgtgcgcatgattactgctgcggatgtgagctagagtggtggcttccactgggcgagatcatgtcctgggcactgtactcaagagactgcggtagtcaccgtgggtggtcctggcggcgctcagagagagtgccctgtcttgtggggtgtcagactgtgctgattgtgcaagatggtggacccatgctctggactgacggactcggagtgactcgctctggagtggggagatcttagaatgaatgggccaggctcggcgatcgaactggatgacggttagtaagcgattcgaacaaagcgacgtcggagtatatcgtgagccgtctggcgcaatgcttgtcctggcctatgagcctgtgtgggccatttggtacttggcaagactgaaaacaacccaaaaggacccagggaagtacacgagaagctccgaggatggctgaagtcca

SEQ ID NO: 697104 - DNA, 100 bp, Homo sapiens
gactgctgtagacatttattgaatcatctgttgcaccaacagcacattgtatttcacagaagattggccacaggcaaaataaaataacccaccacaaatc

SEQ ID NO: 697105 - DNA, 319 bp, Homo sapiens
  misc_feature (48)..(48): n is a, c, g, or t
  misc_feature (75)..(75): n is a, c, g, or t
  misc_feature (84)..(84): n is a, c, g, or t
  misc_feature (104)..(104): n is a, c, g, or t
  misc_feature (119)..(119): n is a, c, g, or t
  misc_feature (127)..(127): n is a, c, g, or t
  misc_feature (131)..(131): n is a, c, g, or t
  misc_feature (133)..(133): n is a, c, g, or t
  misc_feature (135)..(135): n is a, c, g, or t
  misc_feature (144)..(144): n is a, c, g, or t
  misc_feature (166)..(166): n is a, c, g, or t
  misc_feature (170)..(170): n is a, c, g, or t
  misc_feature (266)..(266): n is a, c, g, or t
  misc_feature (282)..(282): n is a, c, g, or t
  misc_feature (295)..(295): n is a, c, g, or t
cagcaactggataggccatttaataggggtaaaggggaccgccagaanattttatagtgattcacaccatttganaagagagcnacatgaaaaggaatgggagnaagaatctgaaaggnataaacgnaganananaagccaagnaaggacagagacagaaaaagcngggnggaagggaacaaagataaagagagggcacggttatcacatggtgatcgaggaacagatggaaaagcaagcagagatagtaggaatgtagacaagangccagataaacctaanagtgaagactatnagaaggaaaaagaacgagaaaaaa

SEQ ID NO: 697106 - DNA, 790 bp, Homo sapiens
ctaaaggccaactcaacatatgtgatgttatatggccctcggatccttagtatgtgtgatttgcccccggtgacagtgtcttgtctaaaatggtctatgaaagcagggaggaaatacctgccaagaggaagtatgtatgagcattaatcaggggctataactaatattctcctgttcagaataatacttattctacgtgtgaaagcagagagtggatgtgattcccaactactagatattttcatgacccttttattgtatacaaaatgaactaccataacagttactgtggttagacatcaaagtcgtgtgtgcatgacttatgtgctgtatccacttaagacaataggtagaaaaggggatcgtgagaaattatgtaatagggaggtgggaataaaactacttaattcctgtgggcaggttatattgttaagttcaaattgcattgctttaagcctatggttactttgattgctgtgaaagcagaattgaagaaagagtattataccagagtgtagtaggctagggtgatgtagagaactctgtaatagaatgtcatggtggatgttacgctttttcagatccaagcgatatgaaaagccgtgtatatttttgtaaagaacgactatcttaactccaagctttacgatattaataagaagtcgaatggttcctcttggtaaggatattgcttacaagtgctaggaaataactcactgatactggttaaatacttggtttgctaaagaggggcattgaaagtgaaccaaggatattcagaaggtttaga

SEQ ID NO: 697107 - DNA, 1002 bp, Homo sapiens
actaattcaaccactgtggaagacagtgtggtgattcctcaaggatttagaaccagaaatatccattactgcatatagacccaaaggaatagaaatcattctattacaaagatacatgcacatgtatgtttattacagcactattcacaatagcaaagacatggaatcaacccaaatgctcatcagtgatagactggaaaaagagaatgtggaacataaacaccatggaatactatgcagcaataaaaaggaatgagatcctgtcctttctcagggacatggatggagttggaagctgttatcctcagcaaactaatgcaggaacagaaaaccaaccaccacatgttctcacttataagtgggagctgaacaatagaacacatgggcacagggaggggaataacacacactggggccagtcagggggtggggggtcaagctgagggagagcattagaaaaaatagttaatgcattctgggcttaacccatttatgcctagtgttccatttctggaatgctaagcatgtggaagttctttatatcctgctcaaggtcattgccaaggtctgatttttcacattcaacaaattgcaactctggcataaatgggttaatacctaggtgatgagttgataggtgcaggaaacaccatggacatgttatcctatgtaagaaaacctggacatcggtacaacatgtaccctggaacttacaaaatttacatatattgttatatattaatatggaatttaacaattactatgagtttttgcacggtaattgctcaacgcttatgctggaggcaagatcggagtcacatggatccgggcgaagaacgaaaaaaggtagcacaggtaaaaggcgggtaccagggctaaggttaggaggaaccattaacatggccgttaagataggcagcgaaagtgaaagcgtgacaagaaaaaagggcgaacgggaacataagacgaagggagagaacggaatagataggcaacggagat

SEQ ID NO: 697108 - DNA, 601 bp, Homo sapiens
  misc_feature (171)..(171): n is a, c, g, or t
ggcgcggccgcaggattcggatccgcgtgcctcggcacctggtgggccccccctggacgtggacgggcggcggcggtcggggcccccgagactcccgtcgtgcggcacatccccagtcccaagcgcatacgagccaccccgaggaaaagcccggtctggacagacggtcantggctgccagctgcccgttacaatggcctgtccaccatgccctcatccttctgaggtggtccccggattgcatgccttcatgccacaagatgccttggccatgcgagcccttgcgatagggagggccactggctgctggcctcccagggctagagctacatgcacgacatgtcatctaacagtatggagcgactggcggaatgcggaccgtggcctgagtgaacacagttccttcatcgcgtcccagccactgtctacaccgccaaactgtgcccacctgaatgcgagtcctcgactgtttcatggcttataggggtgcagctcgcgacccatgcagcacaacacaggacacgacgcccccggtcccaggcgttcagtagtttgcccaggtgttcttgctggacagacgcttgcctgtggcatcaggttg

SEQ ID NO: 697109 - DNA, 160 bp, Homo sapiens
gaaatgatcagactatgaccaaagagggatcaaacccagcagagtgcaagcagcagttaggcaggatgtatgtggccttaggataacctccactggttacctctgcttcctggaaggatgatttacatcatttgacagcctattttcaagtatttgtggt

SEQ ID NO: 697110 - DNA, 163 bp, Homo sapiens
tagcctggtccggccctttgagatgtgattggatcgtaaggctgtgctcattcatgggttaatggattaatgggttatcacaggaatgggactggtggctttataagaagaggaaaagagaactgagctagcatgcccagcccacaaagagccaccccaggag

SEQ ID NO: 697111 - DNA, 968 bp, Homo sapiens
ttctgtagagctatcatagtgaataactcagttctataagctacctgtgtgtcacagttttatcatagttcataattatctcacgtgcaatcctatttggaggccctgtcagactctgaacaatcccatccatatctgtaattctctgatggcaagaatggtagtggagcattctgagttaagcgagcgcatggacacgtcatcgtactgggtgtcataaactctttatgaatggtaatattatgtaaattgaaatctggccctcaaactatattgcagctttcagcagctatggttcgaaggcctctttggttcaatgtattctgtagatgtctcgaattatgttcttgagtggttaaaacagcaatcatcgacggcttgataatctatctattgggtaaagtcaggaaattgtgagtgccaaagaactaatggtctttgcccctctggaataaaggcacctaagctattgctaattgaattgctgctacgaattagaaattatgctttagaactagaatcggtatttctgtgattcttttgcttcttggtatcttctcttgtatctatgtatctagtattgaggctgctctttcatgtggcttaatcctctctttaatagctgttgtaaacattccttgatgtactggctggttcaggatcagttgcccaactctggtttagggttagattccatccaaggtaatcctagttgggtgttaaatccaagctgtataacacctggctttgggatgtaccacccttcaattccattttggcgaatatcagacaccctgcaattctctacatgatggtcacctaaccacacccaactggctcactgtcccaactgcgttagacccgcccttttgtttcccgaccgcgtgcctctggacccccaacgatttcccgcaacaccccaacacacggttaggcgaccaaaaacgacacacccttcacctaaccgc

SEQ ID NO: 697112 - DNA, 1385 bp, Homo sapiens
agcgggagcgcacggggcagacgctcggttccgctcgtcgtgcctcctcgctggccgcgctccctcccgggtgccggcttctctgagtgcaccagagcgcttgacggctggccctggcgcggcctgcagcacccgggcaggaaactatgacgaagaatcgaacgcgcccgttggtgacactaagccacgaatacgatgtctacgccaaatggtgcctctggtccttgggatcactctctgaagacaagcacaggacgccattccaggaaggctggtgagtagctcgccaccccttcaggatcatcacgagcatccaatgaagaaaaaaggtttctatgagaacagttcatgtatgactgaaagtcagtcattggtacgatgtcattgagaacacgtggcagagtctctgctcgagtcgtgaacgcttaaatgaaggaggccagacgtggggttgctcatctgcattgagctagaaaggcctaccgagcttgcttcgtgttccgctttgagcaacaaggttactttcccatacattgtgtattttacactcgggactgcaaggagtatcgtacctgaggacacttaaggcgagaaatactttggattgaatcttattttgaacatcgaagaacgaaattgtccatcagagcaacctatgacccccagggggtgggtcgtagacatggctctacagagtgttcgcgggaaagtactctacgatttctattcttagatctttcagatttgaaaatgaatacaaatcatgttgttggcaaattgtttgcttttatgaagtaagggtaagtgcctcttaattggtaggaggaaccatagggcattgactagaatcgacagttttctttgtacggcaaaggttgggggttaaccacaccaacgacttagtcggacgaaaaatgataagcttgggcccgtgttcattgttgatttaaacctaaaagggaggggttagttgcgtcgttactttttatcttatcataatcgttcgcccgggcaattgtaaaaaggtggtttttgggggcgtagaggattgcccaagaatcgtgttgtggcgcatttccttcccccggtgggaaatcgaaaggttgcggacaactcctatgggcaattgtgttttccctttttttgcacattccctctaaaaacacacaagcacgttgtgttctcacatatgcttggaaggggacaccattgatatttgccgagcgatgggactttcattcccaggaagattttttcaatccccggtggtcgtgggaaacacaatctttttaacccacggcaaaaggttgtttagcacatctgttgttccatcaccaaattgtttggggcctgtcgttcgagggaagaaccgctggtgtccataa

SEQ ID NO: 697113 - DNA, 203 bp, Homo sapiens
gaagcaagggtctaagcacaaaagtagtatgaccgggggctcagtttggaatatgcagcttctgataacctttaccccaggtaaggaggggtgcctgctggcagttcatggcgctctggtagacaagcatttattcacagctgatgtcccctctagccggatgcatctgctgtggacttcttaagctgttgatgctggacgat

SEQ ID NO: 697114 - DNA, 115 bp, Homo sapiens
  misc_feature (14)..(14): n is a, c, g, or t
  misc_feature (56)..(56): n is a, c, g, or t
  misc_feature (92)..(92): n is a, c, g, or t
  misc_feature (97)..(97): n is a, c, g, or t
  misc_feature (109)..(109): n is a, c, g, or t
tttgtgttctgacnagtcctttcgtccacaaggcctttccttgtgggcctcttggngagcgggaaggtctggtgcgctgtccttattctttnttgcnttctctacttanaggcct

SEQ ID NO: 697115 - DNA, 147 bp, Homo sapiens
ttatctattgtagctgtaggaactcactaacgtctctcatatctattgtaactgtagtaactaactaactctctcatatctattgtagctgtagtaactaaattagtctctcatatctattgtagctgtagtaactaactaactctc

SEQ ID NO: 697116 - DNA, 149 bp, Homo sapiens
agcggctacctgcatgcagaacgaccggcagcagacgcacatgctgtatgtcatgcaggaccacttcagccgcgcggccagcatcatagacgagctcctccaggacaggttcttcacccgggagcccaggatacctaccactacctgcc

SEQ ID NO: 697117 - DNA, 286 bp, Homo sapiens
agcgccctataaagcggtagaatggagttttagtgggaaccaactccacatatggcactttgacagaacctacctgtgtgtagcccacatttgtaccattcagaataggagctttccaatgtctatgtgttccaaaggaggacattcacgtgaccgcttatctgagcaacttcatagttagtttaagtaaggggtaaaaatttctcgtttacaatatttcgcatatacctcgcatacacgctccagatatcttatgtccccgtggagccccatgcgctctcgtgca

SEQ ID NO: 697118 - DNA, 114 bp, Homo sapiens
gtgtccattccagcctttcttcatggccccagtttagccttccgaaatgcgacatggtcagacagtgcccaagcatatatggtccctcgtggcctctcattctcatcgatccag

SEQ ID NO: 697119 - DNA, 201 bp, Homo sapiens
tagatgctgttcttccactaacctcattgcaactcccctccaagtctccgaccactaccttgtatccttttccctctcgctctcatccaacacttcccacgctgcccctactcggatggtatcgcgccgtcccaaccttcgctctctctcccccgctactctctcctcttccatcctatcatctcttccctctgcgtcgac

SEQ ID NO: 697120 - DNA, 219 bp, Homo sapiens
gtccctggacgggtggatttaattagggaaaaagtcgaggcagcagccctcgaggccctcccaaatgtttaggcaggcctcatttcatcacccagcatgtgcaggcctggaaaaacaaaaccaaatttcagggaagtccttggttgatgtatttgggtctcctttggagccctttgccctcctgtcccccagtaaagtaaataaacttccttggctcca

SEQ ID NO: 697121 - DNA, 131 bp, Homo sapiens
gctacggacgcactgcggaaagcattggcgccacggtacatcgccaggtggtcggcgcgtcgaactcagccagaaagcgttcgctgataccttcgtactttcagatacttgcttgcaagacgccgatccaa

SEQ ID NO: 697122 - DNA, 193 bp, Homo sapiens
  misc_feature (125)..(125): n is a, c, g, or t
ttttttcccccccccccccccccaaaaaaaagggggggtgggggggggggccccccccgggaccctttttccgaatttttaaacccccaagggcccccaaaaaggggggttttgggggggggggnccctttttgtttttaaaaaacccgggggggggggtggggggggccccccccccccccccccaggggga

SEQ ID NO: 697123 - DNA, 103 bp, Homo sapiens
ctcgggctcctgtgttggctggcctccgtttttcactgggcatcgtgttttacccgggaaccgtttttccctggccaccgtttttccccggggaccctttttc

SEQ ID NO: 697124 - DNA, 160 bp, Homo sapiens
cagctgcagaagctggaagcgcggggtgcgggagctggagagtgagctggaggccgagcagaagcgcaacgagagtcggtgaagggcatgaggagagcgagcgcgcatcaaggagctcacctaccagacggaggaggacaggaaaacctgctgcggctgc

SEQ ID NO: 697125 - DNA, 376 bp, Homo sapiens
agcgggggcagagagcgagcgcgcaacggcggcgacggcggcgaacccaccgcgcatcctgccaggcctccggatgcccagagcacacagagagcatgaagccttgcgaacgagcgcaaagccagaacacggcaaccacgcaacgacgcgatcgaaatgaagcatgaacataacacgccgctgacccacgcagagacgaccggcgaagaaacggcagaagcacacgcgacgaaactcagaggcgcagcagaagcagcgcgacaccaagaggtaagcacacgtcagcctacacccgggaaacaccacaacaagaacaggagaccggagacacaaaacacaagaaacacacacacacacagtaaagaaacaaaccaag

SEQ ID NO: 697126 - DNA, 313 bp, Homo sapiens
cttgaccgtatttctcacttctgagaagattgtagcagtaattcaggtctttgtggaatctccacactgccttccacaatggttgaactaatttggacgtccaccaacggtgtgtaagtaatttctttgttccgcaaccttgccagcatctgttaattcttgactttttaataatagccattctgactggtgttagatggtatcacattgtggttttgatttgcatttctttaaggatcagtgaggttgagcttttcttcatatgattagccgcatatatatcgtctgttgaaagtgtctgttgatgtcctta

SEQ ID NO: 697127 - DNA, 474 bp, Homo sapiens
  misc_feature (123)..(123): n is a, c, g, or t
  misc_feature (136)..(136): n is a, c, g, or t
acagatagggagcggtgtcttctctctctataggtggcttccactgatgtggctggatctcttcacagcattttcctaggactggcagctgttggtcttcttataaaatttaatgatgttgtnaggagctctgttnatgttgaggttcttgattctcactgtcagttggcgggcagtctagcaggttagaaggtacgtgctgattagagggttaagaaactccgtcccttccaaaggattcagtccaaaagctaacaaatagtcctcagccttggtgaagaggatcttatccaggggattctttgccttcagggaacacactggaagtaactatggatacatgaaaacctagcttgtggccaggactccaagccacattgctgttggcaaacagggaaattcattggcagtcttcttgacagttatatgagggactgcagtcaatgactgaatgtgtgccgagtccgctgcatt

SEQ ID NO: 697128 - DNA, 443 bp, Homo sapiens
gaaggagtgtttcgacaccactacagaaggtgacataaacatacataccagagtgtgctttcaggagcagcacgctgctgaggggatgtgaagctaacctgaccggaacacccatggtacaaagagagcagagaggcagaaatagcctgggtttgttttctcatgtcagtagagatctataaaccgctgggcttttggaagatattttaatagaggatgacttatcaagctaaggctgtgtgctgacaatagtgctgtaagtttatcatatttatgactcccagattttatttgaaggagttgactgaaagactagagatgggctctttccctgctaccatgtaaagttagctttcgcctctggacagagtgtagatttgaagtcaaggctggcgtcttagggctgacgtcgacgcggccgcgaatttagtagtagtaggcgg

SEQ ID NO: 697129 - DNA, 481 bp, Homo sapiens
  misc_feature (277)..(277): n is a, c, g, or t
  misc_feature (321)..(321): n is a, c, g, or t
ggacacaaagatttcaattaagatgttatcgagtctggggcatggtgtctcattcctgtaatcccagcactttggaaagccaaggcaggcagattgcttgaggctggaagttcgagaccagcttggccatcatggtgaaacctgtctctactaaaaatacaaaaattagccacacgtggtgttgcacactggtagttgcagctactcgggaggctgaggcatgagaatcgcttgaacccgaagaggcttgaactcaggatgccaaggttgcagtgangccgagattgcaccactacattccagcctggatggcagagtgangactctgtctcaaaataaaaaagatgctatcaaaggaatcttatagatgattgatggcttagactacagtggtaatgggagaaatagatggattccagagatattttaggagtttgtaaatgactagaatgggtaattttgggggataccaaatttaaga

SEQ ID NO: 697130 - DNA, 276 bp, Homo sapiens
  misc_feature (101)..(101): n is a, c, g, or t
  misc_feature (251)..(251): n is a, c, g, or t
gaccggcactacgatgtgcatagactattgtgagtcagccatctcacccttatagatatctactctctttgaatcagaacggtagaagataagaggttgcnacactacgtatggcgtatacctgagcacggatatacgtcttggtcattgacgaaaacacgtagtattagtttcaactaatcttagcaagacaaaatcttaatgcttgttggaatattacagcaaggtggacctctatacctctggacaantgaaaaagtaaagcaggtttgccat

SEQ ID NO: 697131 - DNA, 256 bp, Homo sapiens
  misc_feature (2)..(2): n is a, c, g, or t
  misc_feature (231)..(231): n is a, c, g, or t
  misc_feature (251)..(251): n is a, c, g, or t
tnctagatccttatcagagagatgatttgcaaacgttttctccaactctgtgggtagccttttcactgtcttgataatgccctttgatgcacaggcgtatttctcaagtgattttattcccacaaggctaaacgttaccatatttctcatacttcacttttctgacaaaatcctgctgaaaactttaacaatattattgaagtttggtttgagccttttcccccaataaancacacagtcctcaaggtttntgatt

SEQ ID NO: 697132 - DNA, 104 bp, Homo sapiens
catgcgcaaagcccttctgtcctaaaattaaattcccctaaaaatctttgaaaaggggcccggtatttaccctatagcccccccctcttcccccttttgggcca

SEQ ID NO: 697133 - DNA, 233 bp, Homo sapiens
ctaagcctgaccagtatcttggaccacaggctggagtacagtggcgtaaactctggtcactgcagcctccatctgccaggctcaagcaatactcctgcctcagactcccgagatagctcggattacaggctaccacatactgttgattgtgatgaaatgccagttgaagcacctgtcctgcgagcttatgggtgctacaagttgaccactgcagcagtaaagatgactctgaa

SEQ ID NO: 697134 - DNA, 763 bp, Homo sapiens
  misc_feature (380)..(380): n is a, c, g, or t
  misc_feature (386)..(386): n is a, c, g, or t
  misc_feature (389)..(389): n is a, c, g, or t
  misc_feature (461)..(461): n is a, c, g, or t
  misc_feature (621)..(621): n is a, c, g, or t
  misc_feature (637)..(637): n is a, c, g, or t
  misc_feature (663)..(663): n is a, c, g, or t
gagagaagggaagccctactacgaggtgcggctggcttctgtgcttggctcagagccttccctggactctgaggtgacttccaagtctgaagagctatgaattccggggaagccctttccaggtgaccctggtgggactacgcgcccatcctccatgaaggtggtgtgagcatgctgtgagaaagcctagatggcctatgtcagtctcaacagcacagccaggaggcacgattggctggcgccagatagtactagaagagcgttcacgccatgggctcacatcggaaggctccacatacgacggggcttcccagcgttcctggggatccagtcgacacaagtgcccctagtcggtcggatgacgtgtacgactcggaggntatcantcngaaggaagcctaccacgtcggacgctccttttggcattccctggagagagacagtcttgaagggtctatccngtgacgcgtgtgggtagacaccaaagagcgcatcgatgctgtccctacatgttctgacgtcggttgctggattggccgcagcagtcgatgcagctacgacttgggcgtggaaggggacgcattgcacgcataggtcactcgcacaaaccatgttcgtagnaacgagtaacatagcnttcacttcgaacctcccttggaactntcaacccatacctcgtgggtactgtatcctccatcgccgttcagcgtgggcatcccgagcgatcacactgtccgggtcaatcgaagcgataccgcacgaa

SEQ ID NO: 697135 - DNA, 142 bp, Homo sapiens
cagccaagcatgaggactgctagttcccaaagtgctctgctttttgtcaaacttatatattaggagagagggttgtagtggccatgaatgatgaatcataaaactgctctctctggtgaacgggccagcatagaaaccactg

SEQ ID NO: 697136 - DNA, 258 bp, Homo sapiens
acctatatccccagtgctttgcggggttgaagcaggaggatcacctaggccaggaattcatgaccagacctgcaacatatcaagaccctatatctaacaacaacaaaaaaattagcttgatatgttgacatgcatctatagtcccagctacttcggaagctgaggcagatcacttgagccctgaagtttgagttacagtgagccattatcataccactgcactccgacctgagtgacaaagtgagaggctgtctctaa

SEQ ID NO: 697137 - DNA, 262 bp, Homo sapiens
tgagttcactcagtggagaaccctggcaagcggcaggaaaaggggaggaaggtgaaaaccctccatttctaggtgaagtcccacggtggggtttcaagtcccaggatcaagttttcgctgtgtctctttttcccgtaaagtggttgaaatctgaagctgcatctgcaagtgtcatcgagtcattgaatctcccagtctcaactgataaaagtttttaaaggttgtctggttcacctttctaaaaacataaacatgaagaata

SEQ ID NO: 697138 - DNA, 215 bp, Homo sapiens
atgcagtggtctaaggaagaagaagcagcagccagaaaaaaagtaaagaaaactcagctgtgcgagttcttcttggagagccagttaagtattaagagagaagcttgttaattcttgggcacacatttacacagggttcactataggattaggttttcacagggtcgtaatttgctctttaggggattttctcacatactctcacattatcacaa

SEQ ID NO: 697139 - DNA, 1361 bp, Homo sapiens
  misc_feature (216)..(216): n is a, c, g, or t
  misc_feature (573)..(573): n is a, c, g, or t
tccagcccgggtacgggacccgggcagccgcaaaaatgtggatgcctaaaaaagaaccgggatgggccatttatgagaactccttttaaagggaggggaggtcatggggggccaaagaagggatgtccacatggctctaagcacccgggagctgggcaagacaaagatatgtggcccaactcttacagtggtcgcatgagaagggcacatggacangttcttctcacaagtgtccccggagggtctaacctgtgagaaggagaaccaggttgggctcgggagagaactttttctatcggggatactcttaacacaatggagggggttatcccatgttatctctccgcgggatatatacactcttcacattctgggccccgcggagaaattggtggctctggccacaacccctaagcggcgcgtaaggcgcgtccccagaaaaagtggggcagagggccctcgcgggcctaaaagagggttctgggaagggggtggaggcggacctctggggagagaaatctccccacaagagaggggggggaaaccgctgaggaacaagaagagatacctctnaaacagagagggagggtgggctggtggcccaccccgtgtgtgcgcccagacaagagaaaaaggcccagagggctgtgggggcgctgtggggttccaagaaaaaccagaattttcccaatggttaaaaagaggggggggggattataggggccctgtggggaaactgtgtgcgtctcagggcacaccctctacatgttacaaaatattgggggagaaggggaatcacttttttagggctatttgggatatataaaactttttaacagggggcaaaaagaaaaaccccttttaaaaagaaacaaacacaaaagagacaagacaaaacagacgacgcaagacaagagacaaaacaaacctcgccgggggagggaaaattaaaaagggggggggggggcggagagaaaaaacaagggagtatcatacaaaaaaaggggggccaaggggtgcgacacaacatgtgagtggtactccgtcgcaaccccccagagttcttgtgggacgacacaaggggggggagaacaacgtcgggggggcacccccacaaaggggggagggggacaaaaaaaactgcaaaagaacggggggtaccgatcagagaagctagcatcagacaccaatactaacgaagagcaaagagacaagacagagaagacaaagcgagaaggaaaaagacaagagcgcggagagagcggccaacaccaaacaagcgaaagacaacagacagcagagacaagacacaaacagaagaaacacaaacaacacaaacagcaaaacacacagtcgaacga

SEQ ID NO: 697140 - DNA, 439 bp, Homo sapiens
agcggcgcccttttttttggcagcggggggaggtgttaattttggagtatgggggacatatttttttttttggaggcgggtctgaccgtcgccagccgggagtgtaggggcgcgatctgggctcacggcaagctccgcctccggggttcacaccattctccggcctcagcctcctgagtagcggggactacaggcgcccgccaccacgccgggctaagttttggcattttaagtagagacggggtttcaccaggttagccaggagggtctcaatctccggacctcgtgatcggcccaccttttctctttagagctactaaaatgaataattatattaatagatttttaaatattaaaatatttttctatccgggagtaaaccccactttgggctctatagggttttcctgggtaaattttaaacggggttttcaaaaaa

SEQ ID NO: 697141 - DNA, 412 bp, Homo sapiens
  misc_feature (257)..(257): n is a, c, g, or t
gttgaggaaaagttaataataatattattatatcattactctgtgaagctgggagtgggatgaagacagaacctgggaaaattttatccaccaccacatggcacacaaaagggtgggcacacaccacgcccaactaatttttgtatttttcgcagacagaggattttgccttgttgtccaggctggtctcagactcctgacctcaggtgatccgcccacctctgcctcccaaagtgctgggattacgggcgtgcacncatgccctggcaacctgttacattttttgcagagtaattctcaggctctgtcagcattgctttcctaagtcgttctctgcccaaatccctctgcctgctttctttttatccaaatgtaacctgttcactggagcctcccagagacttaggggaag

SEQ ID NO: 697142 - DNA, 821 bp, Homo sapiens
ggcaagagggctagatttcctcatttgttatgagactagatggtaccagtagatcagctgcctagcgagggcaggtttcttctttgcatctgtgtggcttgcattccagtctggcctgtcgctttccagctgccttttgtctagcctgctatggggggccagattatcttgataagagcaggtgatcttggggactagctgggttggcaggaaaagagctaggatggatctcttgggacaggttcccccaggtagtatatacgcaaggagccaggattgtgctgtgctgccaaggcaaacagtagatgcctgttctgagttggcagacgagggccttggtcacctcttgacatccaggcaggtctcgtgaagatgggggcacatagccacgtggggaaagcagaagctccattcgtcaccgtctatttggagcttcagtgctttatgtcagtatgaggaagacagcaacatacaaactgaagtgcgcttgccgtcctttcaaaggacaactgtcgggaagggagagccgagtagcgaggtaaggaggggagcactggcacgggcagagacgttcttgactcctctcttccctggtgtgtggtgatccaggggaatgacaagaaatggaccctggattggggctctccttggacttaggaatctaacgtttacctttccagaaagttctccacaggcaaggaccagctgcccattctgagcccagggcagcctcttccagcattaatggtctaacctgggtgtcagggaaacaagcagacctttcacaatgggccggctgctctattcatggacaagtaatg

SEQ ID NO: 697143 - DNA, 802 bp, Homo sapiens
ggttacaggcgaggggaggctgtgtgctgtcagggtccagagcagtggtcctgcggtgatggagtctcatctctctcctgctctcgtctgtggctatccactgtgtccctcttgtgagcgcatctgtcccaagtcagttgcaggttttggtcactggctgatgatgatgcaaggtggtccatggcgcggcaaaggaacggcgcaggctgcagaaggttactggggtgttgccacgtaacgccagctaggagctcattgctgggacactgtgcccagccgtgtcgggctctcccacaggtagaaagaagatcagctccattgtgggacgaatcgatgaaacggatgtatgtacaccacttgatctcagcattttcagcttccagccaccagtgtcttctgtgcgtgcgcagcggcgatgtggagcgtcccggcacagcgtccgtcggcatggggtgcgggagcatgcgtatggctggtgtagagcatggacttcccctcgcgcgtgacgggctctccgctgtgatcagactgtcacagggttctccaatgttccaccatgaggaggttcagttctgtttgtagttgcgtccctacccgatttgagtacagttgggttgcgactaagttgagagtaaaaattaagtgtcgggtcaatgttatagattgtcatgaattgttagaccatggcagcctatattctagtgtgtggctaccagcatcacagtgcaggggtacggaacaggttgcacagaccaaatagtagattaagtcggatcgttgagactaaacgaatacaacacca

SEQ ID NO: 697144 - DNA, 136 bp, Homo sapiens
aaggcaattttataactttatttgatctgacgatcagcgattagaattaatccacatattcagtcagcatagtttggaaaaaggcatcaggtagacaggtaccccaagtacatagattatgtgcagatttttcagc

SEQ ID NO: 697145 - DNA, 458 bp, Homo sapiens
  misc_feature (31)..(31): n is a, c, g, or t
  misc_feature (112)..(112): n is a, c, g, or t
gcattctcagaaagttaggcatcctaccctntaggattgaattgggaccctttccttgtaacatatttctggtgacccagaagggactaatagtgcagaaacgttgacccancggctacctttgcgtaagtgttggggtcctgtaacatatttctggcaaaccacagaaaggatgatactgaagaaaccccccaaaccccaaaggaatagactgcagcactgattggacgactttgggtaagtgatggggtacccgagtaacaaatgggattgggttagaggcccaacttaggggagttggagtttctcctaagacagagtgagttagaggcccctcttaataaaaggcaaggacacttgactgacctcaggttagaggttactccatcctactctatggagtagctgtcctttcaccactttactttcttaataaacttgtttttgctttgcaaaaa

SEQ ID NO: 697146 - DNA, 253 bp, Homo sapiens
cattaatatcatagtctcctcacaacatgtctaagaggtaggcacggtattgttcccattttgcagatgaggaaactgaggttcaagagagggcacttggcttgcccaaagtcacacagcggggaagtggcagaggaaagtcaggttgggtgaaccccagtaaacttgtctcagaggctgggtgatgaccgggcttcctggcttctctggaataaacctttgccaccatgtgcttcatgttggttgggtaccg

SEQ ID NO: 697147 - DNA, 174 bp, Homo sapiens
  misc_feature (19)..(19): n is a, c, g, or t
  misc_feature (62)..(62): n is a, c, g, or t
tgcgccgtgggaccccttnggtccgcgtgcaccgggacggccccgcgctcacgcccgcagangcccgccctgcaggagcgctcgtactctccgaccgccgccattcgccgccccctctccctttcagagctcgttctgccgccgcagcaataaagctcctttgccgcgaaaaaa

SEQ ID NO: 697148 - DNA, 155 bp, Homo sapiens
tagtagtccacaatcttgtacctgatgccgatattcaacgctatcggaatgagtttgaaaaaatctgcagacaggaggtgaaaccattaggattaacagtcatgagagatgtgaccatttcgaaatccgaatatgctccggaagaagaaaatgat

SEQ ID NO: 697149 - DNA, 127 bp, Homo sapiens
agcctattttttcacatccttcaatacgtatccttatttccagcacctatcacaagacttacatttaatttgatgtctcagatcacatgcttgttaaatgactattagcgatggaacagggggatct

SEQ ID NO: 697150 - DNA, 178 bp, Homo sapiens
gttaatacagagggacattgttttcaggagtgttgtcagcaccgaggagggagttgtatccttgtggtgtgtgccctgtggaatttgcatggcaacataagttgtatttcttcatgactcactgccataggaagagcagccaaaacataccctcttctgtaacccaaatctcagcatg

SEQ ID NO: 697151 - DNA, 708 bp, Homo sapiens
  misc_feature (3)..(3): n is a, c, g, or t
  misc_feature (173)..(173): n is a, c, g, or t
  misc_feature (215)..(215): n is a, c, g, or t
  misc_feature (416)..(416): n is a, c, g, or t
  misc_feature (431)..(431): n is a, c, g, or t
  misc_feature (468)..(468): n is a, c, g, or t
  misc_feature (518)..(518): n is a, c, g, or t
  misc_feature (520)..(520): n is a, c, g, or t
  misc_feature (538)..(538): n is a, c, g, or t
  misc_feature (585)..(585): n is a, c, g, or t
  misc_feature (610)..(610): n is a, c, g, or t
  misc_feature (675)..(675): n is a, c, g, or t
  misc_feature (694)..(694): n is a, c, g, or t
atnctgcagaaagagcaatcgcattaaatcttagttcatcagggtggcgctccaaaaacttcttgcaaacttctatggcatcctctaataaagtttcatcactagtttcaccatggttaattggaaatggcttccgcccatttaattcatagagatgcccatctacatgaacnaatgcaataaaatgaagacctactttctcatctatacttggngcctcagtttgaccttcatgggcactggtcttatgagttactgggatggcatcatagttctccagggatctggctcgttcttcagggctcattgacaaaaattcctccaggaattttttcaaggttgaaccagaatcaaagtgcattttgtctttattgtttgcaatagcatgaattagttcaattgttccacaggcattnctgaatgtttgcttnaagaaaaatactgatgaggtgacaacttgtccctganaatttattttttcttcctcttctgttctgaatacttcaaacttttctgtnanaggaaagagaagtgagantgcacagactggtcttggtaccatgctaaggagttcaggatccattncataaacatcaacgaattgccagtnaggatgtagaactaattgtttaagaaactggttggtgaactcgggatttgcctccagcggcaccnagccttgaccctccatggncgcggtgcccggcc

SEQ ID NO: 697152 - DNA, 353 bp, Homo sapiens
tacatcttcatagagtgtgtattcaaatacattaaaaacttttaatgtgttattctcttaaattatatagacaacaaaatgtgaagttacgaaccaaagatacagtaatactagctcttagacttacaacttttgatgtattagtctactaaatcatgcaaaaaatggaattgtacactattactgcaataatgctagcttttataattgcctatgtatttattttactcagatatttatttcttttaatgagttactttataatgattttgtttgtttgtttgttttgttttgttttgttttttccatttcaacgtgcaggtctccttgagcattttttgcagggtcgacgc

SEQ ID NO: 697153 - DNA, 835 bp, Homo sapiens
gttctagatcgcgagcggcgcccttatttttttttttggggtgcacttatttattcttcactaatagtaaaatagtttgatttttacctgacagtgttggtcaaatttaaaatcatgaatattcaattttatacaaacatttatatttatatatatatagattggtgtatgttatttgccaaagcacagatataaattacggggctttaatatttaggtgcaaggaataaataaggtgcacacaaaaaaaaaaaacaaaaaaaaaaaaaaaagaaaaaaaaaaaaacaaaaaacaaagaaaaaaaaaaaacaaaccaagagagaaaaatacacaacaacacaaataacaactcacacaacaacagagccgaacaccaaccacaatacacgatacacaagagggcgacaacaacaaggagggcgcccacaaaataacaggaccatcacagagagacagacgacgagcccaacagagaagcacagagtcaccacaacgacgcacaccgcgagagagagcaggctcgggggggagcgaacaatcttgagagggaacgccgagtcgaaccacacgaggggggggcgcaaagatacagccgagcagcagcttgtgcaccgggcgtcggcacgaggagccccatcagctagcgagttcaacgaagaagtgcaaaaaatggggagcgtgctgatccaaccatgggtggtcaactaccgacagcaggatcaatcggaggagaggtaggcaggagcgagggttgctaaacgcagaagatattaagacaaactcgcaccgcagaggcatcagcatgacacccgttccaccagcccaagatcagcg

SEQ ID NO: 697154 - DNA, 338 bp, Homo sapiens
  misc_feature (316)..(316): n is a, c, g, or t
ccggagatgccagtccacgacacaccacattgattcgcggcagcagtgccgtcgtcaaggtggttgtacgacgctttcgctcaaccgcgtgtcggtggttgagcagaatacccgggttgatttagctggttcacagggtgcgaaacacaaggtcgacatcggttttgaatcctactctgccgatttttactaccagaacagtcgggtaacagcagtctatacagcggaatcgataaagctcgggcgttgatgccaccgcaggtactgtccgccgttaacactagcaagtctggccgggtcgcgggctgatcgcgtntactgcgtacacctatgagcat

SEQ ID NO: 697155 - DNA, 599 bp, Homo sapiens
ccattgctcagaatactgtgtcgttcaccaattctcatgaggagagggaacatgctgagaaatctgatgaagctgcagaaccaacgaggtggccgaatcttccttcaggatatccagaaaccagactgtgatgactgggacgagctggcgctgaatgcaatggagtgtgcattacaatttggaaaaataatcgctgaatcacgtcactactggaactgcacaaacctggcctacgtgacataaaatgacccccattttgtgtgacttcacttgagagcacattatccatgaagtgagacaggatgaaagccatcaaagtacttgcggtgaccacggtgaccaactctgcgcaagactgggagcgcccagaatcatggcttggcgtgaatatctctttgatcaagcacaccctgggagacagtgataatgaaagctaagcctcgggctcactttcccacatagccagatggggtgacttacctggtcaccaaggcagtgcaagacgagtgcgtccgcttccgatctagtatctaaaaaaggcgtgcctatacagtccacgtttgttcattagaatcgtgccatcgcttatctccgcctgc

SEQ ID NO: 697156 - DNA, 125 bp, Homo sapiens
gtaggcagtgtgaaatacctcacctgggtgtgccaccaaggagctgcaggccccggctccagtgaaggctggtgctgctgctgccctgtacaggacggctctgcatcttcctcccagaagcccag

SEQ ID NO: 697157 - DNA, 306 bp, Homo sapiens
  misc_feature (303)..(303): n is a, c, g, or t
ctgctattagccttcccttaagcatatttcctgcctagttattcacaccaaggttaaaagctctcccataatgcaaagtaatttctgatcccctacaagtaaaaaacattaggtaacacaatgcaaatcagagcaatgccttggattttgagagggatttgcttgccttcaattcctggggttccatgaggaaaacagatttttcccaaaatggagcctgtggtgctccctcagttttttctaaggaagcccaggctgttagaaatgatcttaggtcctctcaatgtgggcatcaagagtggnaag

SEQ ID NO: 697158 - DNA, 202 bp, Homo sapiens
  misc_feature (16)..(16): n is a, c, g, or t
  misc_feature (140)..(140): n is a, c, g, or t
tacgtaaatgaaacanctcaagtggtagtgactccagcagactcaattacattttaaggaacactgcctctcctttttttttcctcctcgccttctcttcttttttcctctcttcttcttttcttttttaattcttcccnaaaaccatcgtgattcgtcttctcatgcagattagctcgacttcactgccaggtttcctctg

SEQ ID NO: 697159 - DNA, 730 bp, Homo sapiens
ggtcactccggaggatgcggctgcaaaatgtatcgacgtgcagatgtagctgcgaagattgctgtccgtgcgcgttgctgcggccgtggtccgcgcccttcctcgccgggcctgactgagtctccacatgatgctttgtgttcatctttcattgctttgctaatggaacattccagtgccgtctagcaacttcagtcgttcagatagatgactgggacatgctgcagatgtgcatctattccttgattgagcgtattctatgcgcagctgataccgtcatgatcgatcgttgaagaaaacatgggcggtgtcgtctaatgtattggctgattcggtattgcccgcgtacatggcgcatgaggaagtgtctcataggacataaggaaagattggtagagatcatcgtatcggagtcgttagtaggtggtattgtgcattgatgctttggtaagctgaacaaatgtaggatgtgtagtcgggtgaggagacgtgagtaaagactcagatttaacggaaaggtgaagattatatgctagacagtaagcgatccgggaagacccattgtggcgtgacgctccccagcttagtggagtgcgctgatagcgttcagtagttgcaattcgaatgtacccaatgattgacagtgccttacttgtacgctcaactggctcaaaagggatatcgaaacacggcctactgcaccctcgtgcccgaacgaactgtgggaata

SEQ ID NO: 697160 - DNA, 760 bp, Homo sapiens
  misc_feature (386)..(386): n is a, c, g, or t
cgctttgcgtcgcgacgctgtcctacccgcactatgaacatgcttctcgtgaagtggatctcttgaatccctctctagcaagagcagactaggaaacacaggtaagaaccgtgctgtctgaaaataaccaaattgcctcacttgcagtgggatgtgatgactgcctgagggatgcctaatatacattgaccacagtctgtgagccagtgatcgaacgggtcagctagtgggtgctgtaggttgcagcgcagtgacgctcatgctgatgccttacaggtaggtgcacgtccaggcttgaccgatgaagaggatgtacgcaattccggtcgtcaagcagcactaaaaagcaactcttgagtcaaggatgcagtgcggacaaccgattntcaaattaaacgactattttggcacttccaagttatagagaaccacgcggccccaagtaaaggaaacgtttgagtgcggggggcataggcgcgtccccaaaaggaagtatccgagaggaccaagtggcaggagggccgcgggagccccccaccaagtttaaaaaaaccccgctgcgctgacaacacggtatgccgttcagaggaaaccacgtgccaaagtggcaagtccggcgggcgcccattccaccgcgatttaaacaaaccgcgcggggccgaaagccgagcctgttgtccaacaatatccacgggacggtggagagaagggcaacacggggatcttacaacagagggccaacgcacccgatataaatacg

SEQ ID NO: 697161 - DNA, 107 bp, Homo sapiens
agctcggtaccgattacgctctagacgggcaggatgatcattgagcccaggagttcaaggttacagtgagggtaataatgactggtgggtgattgtagatattgggg

SEQ ID NO: 697162 - DNA, 150 bp, Homo sapiens
ataacaggactacaagctctattcctacagctacctcgggctcgggtgatgtcggacgcctgggatactgggcggcgtgtaggggagctgttaagggatggaaaggagttggacagcccttgctatgtaatcccagtttcaaacggagag

SEQ ID NO: 697163 - DNA, 243 bp, Homo sapiens
  misc_feature (103)..(103): n is a, c, g, or t
cggcccctttttacccctggggggtcccccggccccccctggggtgggctccttgggacgtggggaagttatttttttttttggtgtttggcccgttgggcgncggtttaggccttaactggggacccccggccttcctgttcccccttggttgcttttttggcccgatgccccagttgggctcccgggccgggttgggggggcccggggttcccctttttttatttaagttgatttccccca

SEQ ID NO: 697164 - DNA, 231 bp, Homo sapiens
cagacaaatcccaataaatatgctgatctaccacagcatgaataaatcacagaatataacgccaaaaggaacgggcacataacagattatccaagatccaaactcactaaacagacagggagggagacctgcccaaagtcacatgactaaaaggagacggggtggactaggaataacagatgtactgactatctacgggtcatatcatttaatgttgccttacggagaaga

SEQ ID NO: 697165 - DNA, 173 bp, Homo sapiens
tggttcacaatgcccagaacctcatgcagtctgtgaaggagtctgtgcgggaacctgaagctgaatcaatcaaaattggaacagatgctggatatacactgcgttggcttagaaagactccctggtaccagtaggcacctagctgggcctgactggcactgaatcctctacta

SEQ ID NO: 697166 - DNA, 269 bp, Homo sapiens
  misc_feature (79)..(79): n is a, c, g, or t
  misc_feature (260)..(260): n is a, c, g, or t
  misc_feature (268)..(268): n is a, c, g, or t
cttcctcaaagggggatatgagaccttcttccagggttgcatggatgtaaaactcgtttcactcgtttcaaagtgaganagctctcatcagccagtgtggaaagctagtagtgctaaacatcaactacaggccagcttatgatcagggtggtccagttgaaatcctttcctccctctaccttggaggtgcctaccatgcatccaagtgcaagttcctcatcaagctatacatcacagccagctgaatgtccccttgtggncctggctnt

SEQ ID NO: 697167 - DNA, 495 bp, Homo sapiens
catgtggatggagtaaatacctggttataaattcatgtacagcctttgttatggaagcagtaactgtaaactgtcaccctaacaaattttattagctgatcaattttaaggtagtgatctgtactggcagaattgaatacagacaatcccatcaccagggaaaccacatttagggtataaagtgaatttaccctttgtgtgaacagagtgattagtttttaaaaggtccttaattaattttcctgtgtactttttggatagatgatgacaagtaaccataaaatgtatttttagtagcaatttgccatctctgaaaataagtcagtttcaaacatcggttttcaaaaaatgttaatgtggaattagttaatagcagtcatttccaaatgtttttaaagcaatagagtgggttgtttgtgagtaaaaatattagatacttactgtgtaagaacaggtgaagttggtgttttatgagagcagatttactttagaagg

SEQ ID NO: 697168 - DNA, 166 bp, Homo sapiens
ccctacttccccctatatacaaaaataaaaatggttcaaagccctaaatataagagctaaaactgtacaactcttggactaaacccttgccttaagtctttatcccctgggattaggcaaaggtttattgaatgtgactccaaaaaggattagactgacccgaata

SEQ ID NO: 697169 - DNA, 151 bp, Homo sapiens
cgcgttccaaatgtttgtaaaatggagaataagaacatgcctttgagtcttaccccacagagtctgagactattcacaagtgagtttacttatttcaaagttggtcgcaggtttcccaaagactagactatagtcgcacgtggtcgacgcg

SEQ ID NO: 697170 - DNA, 166 bp, Homo sapiens
ccatcgccagccgtttgcgtcaagcgtctggccaacacgctgttaggctgcatgatgaaacgatatctcattatcgcagtcgctgctggtcggtactcgtctgtcactgcgataacgatgcgttccaccgcgcggcaaagcgaaggcgcgccggcctatccgccgg

SEQ ID NO: 697171 - DNA, 121 bp, Homo sapiens
cgtggtgcactagatagatggacgtcggcaactcccggcacctgggtgtcaggagcccagagtgggacaccccccacaggtctctatggtcactctgccgtctaccacggccacccctgct

SEQ ID NO: 697172 - DNA, 412 bp, Homo sapiens
tgtgatgtgatccactaattgtatccagttagaatttgatcctgagtgcctttccaagaaacatgaggctcccgacccattcactcctaatctaaaggtggacatgttgagtgaaattaacattgctcccggattctcaccaatttcactggagtaatgccacctccagttcaaaaaggatttggattctatcttaaaactcgatcacagtcactttctgtctgatctgcggagaccctacaggtatccaatgaaccttgggattggtacaacctccagctcatcaatgcactggtgttttatgttggggcttaggccattgcgacaatcccaacaaggggggcacaacttcaatgggcccatcattacttagcaaatgggtatttccagatttggtttggcttggcaatga

SEQ ID NO: 697173 - DNA, 634 bp, Homo sapiens
  misc_feature (286)..(286): n is a, c, g, or t
atgccacatgcagcgcaagtaggtctaccaagacgctacttcccctatcatagaagagcttatcacctttcatgatcacgccctcataatcattttccttatcgtgcttccgctagtccttgtatgccgcttttccctaagcattgcacagacaacaagtaagtaagtactaagcatctgcaagaggctcaggcaactagagaatcgtctgacatgtatcctgccggccatctatcctagtcttcatcgccgtcccatccctacgcatcctttacataacagacgnaggtcaacgatccctcccttaccatcaaatcaatgggccaccaatggtactggaacctacgagtacaccgactacggcggactaatcttcagatcctacatacttcccccattattcctagaaccaggcgactgcgactcctgtgacgttgacaatcgagtagtactcccgatgtgaagcccccattcgtataataattacattcacaagagcgtctgggcactcatgagctgtccccaattagggtttaaaaaaacgagttgcaaattcccggacgtctaaaacaaaccatttcaccgttacacgaccggggtaatactaacggtcaatctctgaaatctgtggagc

SEQ ID NO: 697174 - DNA, 484 bp, Homo sapiens
  misc_feature (275)..(275): n is a, c, g, or t
  misc_feature (284)..(284): n is a, c, g, or t
ctgtaatcccggctacttgggaggctgagacaggagaattgcttgaacctgggaggcagagattgtggtgagccgagatcacaccattgcactccagcctgggcaacaagagtgaaactctgtctcagaaaaaaaaaaaaaaaagaagaagaagaagaagaagaagaagagggccaggctagaatttgtcattctttctttcattaacaattgctattaagttggagacctattatgattctccacttcagcagatttggaaaacttgaggcacntgggttgcnttaaggaattttgctttaagattggaacaggccagggacgttggttctaaccttaaggccggtcttaactcccgtgcctcgtgtgaaattttaacctttgttgcactgttcccacagccttcgtgttttacattcactgtgaagattggcactttgaaaccttcacgttttatttcattgcaattgcttccacattgggc

SEQ ID NO: 697175 - DNA, 91 bp, Homo sapiens
  misc_feature (68)..(68): n is a, c, g, or t
  misc_feature (73)..(73): n is a, c, g, or t
ttttatactaatcatttttcaagaggcatattagtatgttattaaatacttgcttttagtatactagnatttnaaagggctacaggaattt

SEQ ID NO: 697176 - DNA, 287 bp, Homo sapiens
agaagtatataactgtcccttttctccacaacctcgaccagtactttttagtcatgaaagaacatcatttccaataaatagaatcgaacaaatttttaaaaactaaactagtgaaaaattagcaagaaccctgctcagacaagtgaaagtattatggagagataaataattatacaagtcagataacaaagaatacatattattcaatttatttaaggatttctatggcaaatttgaactttagaatcagatgtcagagtagtggttacccttcatgaggaaggaga

SEQ ID NO: 697177 - DNA, 168 bp, Homo sapiens
  misc_feature (64)..(64): n is a, c, g, or t
  misc_feature (73)..(73): n is a, c, g, or t
  misc_feature (154)..(154): n is a, c, g, or t
ttcttagtattatgtacggtgatgactcagacttactttcgaggtaagaatacatttagtcaantaccttcanaaataaaaatattttccagagcagttacttcagatcagatcaagccaagtttcttttttctttttttttttggaaatgganaaggcccaggtttg

SEQ ID NO: 697178 - DNA, 123 bp, Homo sapiens
cgttctcccccgaccccccccaccacaaccacagctcactccgtggcgctaacgcggggagcagtgcacgcatgtctggctcacaccactcttgtgaatacggaagccatggcgtggactgtg

SEQ ID NO: 697179 - DNA, 134 bp, Homo sapiens
  misc_feature (21)..(21): n is a, c, g, or t
gtccagaaggacggagactgnaagcagggtgtagtgaatttcccatatgatgatttcattcaatgtgtcatgagtgtttaaatcaagaggaagctgcatgaatgtaatcaacattccaactggagctctccttt

SEQ ID NO: 697180 - DNA, 355 bp, Homo sapiens
taagggctggcagagtccagtttcagaaaatacgcctggagccagagcagttgactcgagtgccgaccctgcgtcctcactcccacctgttactgctgggagtcaagtcagctaggaaggaagcaggaccttttttccaaccacaagtgggggcccatggaactgaatctttactccttggtgccccgcttttgtcgtgcgttgccctgctccgtttttcccaaaaagccctgggttcatcaaggccccccacgatttcctgagtgccctgggaaatttgggtataggtcaggcttggcagccttgatccccggagagtactaatggtaacaagtcaaataaaagggcatccagt

SEQ ID NO: 697181 - DNA, 107 bp, Homo sapiens
acggatcggtcacttcgccgtgcacagcagctggatgcgcatttctccagcgcttcagcgccttggtgcacttgcccagcaggtcggtcacgccggcgtcggacgtg

SEQ ID NO: 697182 - DNA, 140 bp, Homo sapiens
atcgtccagctgcccggcaagaagcacgtcaaaccactgacggcgttctgccgcgcttaatgtgttctgctggcgtgcttcattgtatagcgtatctgcctgggaccattgtttcttttagattgcccgttgcagcagat

SEQ ID NO: 697183 - DNA, 468 bp, Homo sapiens
gtgtgtacgagaagtgcaaacgtgcctgaaaggacctggaaacagtacttaactgacaccaggtaagagactgtcagtacagctgagtctaaggggaaactggcacttagggtgtgtcagctgagatagctatgtgtaaggtcctcccccttctaccctgcagactttacttctatttttcatacctattccacatgaaagcccctatgtcccaacaccaaatgtcttagctgaaggaatacccatttctcttaatgcaaggcagtcggcaagaggtagtggaagaaacctcatctctgtaattacaagagatctattccggacgccacatattggacactctaaatacaacatcacctggcagaacatactggtatgactacggaagtgagaacgtattatgtcacacaatctttggacaactactatcattggggtactgcacttactcggtacacacggggtacc

SEQ ID NO: 697184 - DNA, 124 bp, Homo sapiens
aggttacgaatgtttagagtttgctagagttgtttagagttgtgtaaggagtatgacggtgcaggcacgtagagtaagagtacatagcaacgcgaaatggcaacaccgagggccacccgagagc

SEQ ID NO: 697185 - DNA, 443 bp, Homo sapiens
caagacttaactgaagatatatgtacaccgagtaactgaccaagatgttccttgctgaagggctcataaactcacctgcctcttgccgtctttactgtaccatcgggactgtagagcaagctgagaactggatggctgcccgggagccttcttgaataccgaagacaaaggagactcactgcgacagcgtagaggctctgatcaaaaaacatgaagactttagacaaagcgattaacgtccaggaagagaagattgttgctctgccaggcctttgccgaccagctcatcgctgccggccattatgccacaggcgagacatttctagccggcgcaatgaggtgtaggacaggtggcgacgtctggaagcccagatgattgagacaaggtcaaagctaggagaatctcaaaccctccaacagttcagtcgggatgtggatgagat

SEQ ID NO: 697186 - DNA, 1749 bp, Homo sapiens
  misc_feature (317)..(317): n is a, c, g, or t
  misc_feature (355)..(355): n is a, c, g, or t
  misc_feature (631)..(631): n is a, c, g, or t
  misc_feature (638)..(638): n is a, c, g, or t
  misc_feature (679)..(679): n is a, c, g, or t
  misc_feature (1213)..(1213): n is a, c, g, or t
agtgtatctgtgattgtgtatgttgtgatattgtgtgtcgatgcttactatgttagttgatgatttatgatgtgtattgtagtgtctgtatagtgagatgtgatgtttgttgtcgttgataggttgtctggttgtatggtttggtgcttgcttttgtgattgatcttatgtcttgattcagtgtcggtatggatgatgtagtgtaatggttgtgtatgtgtcgttggttgtgttgttcggtttcgcgtctgtgtagtttctgatgtattgtatggttgtgtgtagtttgccccgggctcgccggcagccggcgcggnggggggtgtgttttcaaaccacggaaagctgtcctgtnttgtagtggtgacgcccgcgtgtccgtcgagtcttgtctgctcctctggggcgggacggcgctcctctgatccagcacacgccgcgtgtgtgttgttcggcgcagccgccccccgcctatatgatggaagcaggacgcactcgcccgggggcggctcgcgcgggattttcctacagctccttcttctcgggggcttgttttgttgagccccctgtatgggcgcccccgcgggggccctcggggggtactccacgcgatgtgtgtcgtcaacccccnccggggnggacccaggtccgtttattggtgccgccccacttgttaggncccccctttatattttgtagggggtgcgacgcaccgctaatttgatggggcaacccccatgagtggtggtggtgaccacacacaagagaagaggccccagggtcgcggtggggtaccaccccgggggtcctctcggggagaattttctctccccgccggggggagatatatttctcgtgtgctggaagacctcccacacggcggcgtctctcacggggagaacatcttgtggggttttatagggtggccccccgccgctcgtgtgtggcggtggccgttctcgtgtgggttggagagatgctttatgagagatccccgggtgagtcgccgcacacagcacacacattgtgggacacctgggagaggacgccgagcgcccccacaaagaagatggccgcttattcgcccgagaattctcccgtggggagagatctctctgtagagagagagagagaggagaagagaggagaaagagagagagagagagaaatattataggtgggagagtcccccctctgtagcacacccccaacntggagagagagagcgcacaatttgcgagagcaaccactctgtgagagagaaaatagtgttgaaaaaagggcccccgcgcgagagacgcgcgctataagagcgctctcttgttggatatagagaggcgctggtatattcctctctctgagtgtacacccatacacacgcagaagaagagagattttccccgcgagaggagagctttcttgagactttttgcacatcgcgagggggagaccacctggcggtggggcccacacacaagactttttaacacacacaccttgtagaaatataaatggtggtggagacattaaatttcaccccccgctttttcacatacacattcgtgggcaccccgaatatttcctctaatggtgtttggagagtaccacacttgttttttatatttgtgtgaaactcgtaaagttcacacacacaaaccccactgggtttggcttataggctggtaagcttttatatgtgaaatttccacacatgagttccattttaaaaaaaattttttgactttgcca

SEQ ID NO: 697187 - DNA, 517 bp, Homo sapiens
ggcccttccaccttttgtgggcactcaagttcggacctctgggatcggcgattcccctctggccagggctggttttaatgctctccgtgggcgggcttcggttgagtttggtccgcttttcctttctgctcctcaggggagcattgcttccttctctcgcagtgaccatgacgaaattagcgcagtggctttggggactagcgatcctgggctccacctgggtggccctgaccacgggagccttgggcctggagctgcccttgtcctgccaggaagtcctgtggccactgcccgcctacttgctggtgtccgccggctgctatgccctgggcactgtgggctatcgtgtggccacttttcatgactgcgaggacgccgcacgcgagctgcagagccagatacaggaggcccgagccgacttagcccgcagggggctgcgcttctgacagcctaaccccattcctgtgcggacagcccttcctcccatttcccattaaagagccagtttattttctaa

SEQ ID NO: 697188 - DNA, 241 bp, Homo sapiens
catcatttagtcaagatgattgttttggtgataaatatgaataatttgcttgcctctggacttctaaggcttcctgaaattacatgcaaacattggtgcagtctcatgtactggttattgtattgtgggctggctattttgggtcgaggaggtgcatatgcttcatcagcttctctaggggatttttcagacgtacacggagaggctctggctagtatatgacagagctacagcgagcagc

SEQ ID NO: 697189 - DNA, 497 bp, Homo sapiens
ggggttgacctgagaccgctgtgctatcatcgtctacttgtgcatgatgtctcaaagaatgcccataataagaaagtatcaagtcacaaatgaaaaagcagccctttgtagcaaatataatcaaaaagaatcatattcgacacagggtctcgctctgtggcccaggctggagtgcagcagtgcaatctcagctcactgcaacctccatcccccagggtcaagcagtctgcccacctcagcctcactgagcagctggaactacttagcgtatgacaccacgccagggtaatttggtatttgaagtagagacggggtttctccatgtgggtctgggtggtctcgatctcccaagctcaggtgatccacctgcctaggcctcccaaagctctgggattacaggcatgagccatcggtggccagccgaggaagtgacttcaatgtcgagaggtaagggaaggaaaggagtaaggcagggaagagggggatgacaagcattc

SEQ ID NO: 697190 - DNA, 460 bp, Homo sapiens
  misc_feature (56)..(56): n is a, c, g, or t
gaactacaactcccagaaggccgcgcggaagcggaacgtgaaccagggaggacttncggccgccaacatccgggccgcgcggggaaggggagacgtggggtagagtgaccatgacgaaattagcgcagtggctttggggactagcgatcctgggctccacctgggtggccctgaccacgggagccttgggcctggagctgcccttgtcctgccaggaagtcctgtggccactgcccgcctacttgctggtgtccgccggctgctatgccctgggcactgtgggctatcgtgtggccacttttcatgactgcgaggacgccgcacgcgagctgcagagccagatacaggaggcccgagccgacttagcccgcagggggctgcgcttctgacagcctaaccccattcctgtgcggacagcccttcctcccatttcccattaaagagccagtttattttctaa

SEQ ID NO: 697191 - DNA, 388 bp, Homo sapiens
gactcgttgtaacagcagcgagcccattaattaacagctgtccaataggtaacacctctttccgtcgtcgctcctgacgtagccaaccatctgtgcgtcagtctcaagagaagccagcaacattaatagtgatagcccccaccctcctatcgccctgtattacattatgtgtttcacctcagcgtcttcatggtgcgcagcgccgccacctcacatcattatgtgtatacttcccccgacaatactccctcacacacactctattctctctcttctcttttcaccccgccctctattgaactagtgtattacaccaccctcactgtgtcccactccatggcgctctcctctctccgccccccatacaattagatacacaacaatatac

SEQ ID NO: 697192 - DNA, 486 bp, Homo sapiens
  misc_feature (56)..(56): n is a, c, g, or t
gaactacaactcccagaaggccgcgcggaagcggaacgtgaaccagggaggacttncggccgccaacatccgggccgcgcggggaaggggagacgtggggtagaggggagcattgcttccttctctcgcagtgaccatgacgaaattagcgcagtggctttggggactagcgatcctgggctccacctgggtggccctgaccacgggagccttgggcctggagctgcccttgtcctgccaggaagtcctgtggccactgcccgcctacttgctggtgtccgccggctgctatgccctgggcactgtgggctatcgtgtggccacttttcatgactgcgaggacgccgcacgcgagctgcagagccagatacaggaggcccgagccgacttagcccgcagggggctgcgcttctgacagcctaaccccattcctgtgcggacagcccttcctcccatttcccattaaagagccagtttattttctaa

SEQ ID NO: 697193 - DNA, 150 bp, Homo sapiens
ctcctcctcgatattttaatgagaatattgtggtagacctgaacagcggcttcaatctggaagagctggaaacgaacaatgcccagcgcctacgatccatcaagggccctcatctggccaatagcatccttttccagccttccgctctga

SEQ ID NO: 697194 - DNA, 752 bp, Homo sapiens
attcctgttttcagttagtggattcatcctgctggtattacttatagctccctccatgtcaaagttgggcctgagaaaagctcatacatgcctcatgtgaagtgtccaccctctctgaaaatcattctcattgttcaaaacagcaatcgacatatctgtgttaacttttaacggtgactttgggaggaggggagttgggaaatgtaaaatgttatagattgttgtctatttcctgctgaaagtaaatgtttttaaaaagtatcatataaagctgatatacaaatcggttggggggagatcctttcctacccaagagtcataaatatatgctttacgtgcctagtggaaatgttatagtgttgcctttcacattcgtctttagtctgtcctgaactgatttcgtgaaaattatgagttagaaattcaacttaacatttgtgcatattcgaagtggtgtctctgtactattgactgagaagttcatcctttccccagtgattgtaacactgactctttcatacaattagattttgtgtatgtagtgtgggtcttggatggtttctatactgactgaagatcaatgttgtactaatcttgtaggcggtacagtacagtccgtgattactgcaatttaggaaaaaggtctgataataaccagatgctccaaattttgtcactaattgtaaccaattcacctctgttccgtatccaccccaagtgtgcttctggagaggtgggtattttagcaacgg

SEQ ID NO: 697195 - DNA, 823 bp, Homo sapiens
  misc_feature (56)..(56): n is a, c, g, or t
  misc_feature (823)..(823): n is a, c, g, or t
gaactacaactcccagaaggccgcgcggaagcggaacgtgaaccagggaggacttncggccgccaacatccgggccgcgcggggaaggggagacgtggggtagagtgaccatgacgaaattagcgcagtggctttggggactagcgatcctgggctccacctgggtggccctgaccacgggagccttgggcctggagctgcccttgtcctgccaggaagtcctgtggccactgcccgcctacttgctggtgtccgccggctgctatgccctgggcactgtgggctatcgtgtggccacttttcatgactgcgaggacgccgcacgcgagctgcagagccagatacaggaggcccgagccgacttagcccgcagggggctgcgcttctgacagcctaaccccattcctgtgcggacagcccttcctcccatttcccattaaagagccagtttattttctaaaaaaaaaaaaaaaaaaaaaaaaaaaaaaaaggggggggggggccaaaagtttcccccggaggggggcccagaggtttagcgcgcgatacccgagagtatcctgtgtggtccaagggggggccccataataggggagtcgatataaataagcacaaggacagcgggcgccgagcgtattataacacagagctcgtagacttggggaaacactttgggtaccattgaggagactcttgggagaagagaacctttaattcgcgggggggggagaccaataattggggcgcaaaattaccttaaaggaagattttaaaaccgtcataagggtaaattttaacaatttcaaggtgttaaacgggggan

SEQ ID NO: 697196 - DNA, 553 bp, Homo sapiens
  misc_feature (56)..(56): n is a, c, g, or t
gaactacaactcccagaaggccgcgcggaagcggaacgtgaaccagggaggacttncggccgccaacatccgggccgcgcggggaaggggagacgtggggtagagtgaccatgacgaaattagcgcagtggctttggggactagcgatcctgggctccacctgggtggccctgaccacgggagccttgggcctggagctgcccttgtcctgccaggaagtcctgtggccactgcccgcctacttgctggtgtccgccggctgctatgccctgggcactgtgggctatcgtgtggccacttttcatgactgcgaggacgccgcacgcgagctgcagagccagatacaggaggcccgagccgacttagcccgcagggggctgcgcttctgacagcctaaccccattcctgtgcggacagcccttcctcccatttcccattaaagagccagtttattttctaacttcgtttagtttgagtatggaaaacgggtattggggattttatgtactaacggtcgagaagtgaatgtgaaagaacccccttcttgaggcca

SEQ ID NO: 697197 - DNA, 443 bp, Homo sapiens
  misc_feature (358)..(358): n is a, c, g, or t
  misc_feature (443)..(443): n is a, c, g, or t
ctccacacaagactctttgctgctgtgcctatgcgctgtggttgggtggcaataggaggggactgtggtaggggcggaggcacctgctgtcactgacctccatttccccaagtctcttgtcccggcattgcctttcaggtggtgtgggacactgggagaaggtctccaagggagggtgcagcctcttgcctgcaccctccctgcttgcacacttccccatctttgatccttctgagctccacctctggtggctcctcctaggaaaccagctcgtgggctgggaatgggggagagaagggaaaagatccccaagaacccctggggtgggatctgagctcccacctcccttcccacctantgtactttcccccttcctggcttccaaaacctgcttccttcagtttgtaaagtcggtgataatatttttgggggcttcccttttn

SEQ ID NO: 697198 - DNA, 883 bp, Homo sapiens
ggaggataagatgacaaattgagcccaaagaaatttttggttactacagaggtaaccaaagatttccagtgatagtgcttttgtgagctagtttataaaagtagatatttttaaaataaatgattacaggattaggggacaaaagtagaaccatgggttgacccaactgtctaccccaagcattggaattaatttagaaaaaagccagcagatgcatgtaacatcttgaaaaagcttatgcaagtcttcccaaaacacaaaggaaaaatataacacaggacaaattactccttgaatgtctgatgagatatgaatagccacaacaataaaactgtgtgctaagattaacgtctgagtagctttaaagtatttttagttcttttaatctgaaatggtttagactatcttcagagaaacttctcaactgttttcttactggaaatagttgaaaagctttataaggccaaggttacccaggcagttgatttatatcttctttaagagagacagagcgagagaagaaacgaagtaacagcaaacatttgtcaagcaaagggctgagagctttgcagagaaataacagatacatttgactatagagatcttccaccttcgtttctagaaatcaggtttgcttggtgtaccttggagaagtaggcgctttcaaatggtcctcccacaagtctcagcagccaaccaaagccaatgattctcagccaactaacccaaggagttctttaaagttaaccaggacctctccacaaaatctcatacaaagtcctgtaacaagaagccacagaaatctcataaaataaaatgcagtaaattaaatgtaagaccagtagcagcccttgagtgttataacaggaattaaataaccaaa

SEQ ID NO: 697199 - DNA, 1694 bp, Homo sapiens
  misc_feature (174)..(174): n is a, c, g, or t
gaccaccgtcagtgcatccacggcttacatcgagctggagggctcgagcgatacgtgacatgcgagtctgcctaggtgaccagaagactcgtggtgcgcatggtaccagaagatggcgtgtcaccgtgtccagttgtgcctgcagcctggggcatatgtctctgattgtacagncatgttgtgggtgcatgacgtcttcgggtcattcacgtcctcgctcgctcgcacaccgtgtttactgactccctccgagaccatgttgcagggtgagtgacaggacccatatagtgtcgtgggccgtcgtaggtggtaccgtttggtcttgtcgatgacgatgactcgcgtttcacgtccacgagaatacactcatcgatcggccaagggcatggatgaatgggatgcattgcgctaagggaagatagagttatgtctgtacgtcaagtagatcgactggtccgtattcctgcgtgtgggagcacgctgtatatacgccatgaccgcgcagttccatctaacaattggaattggttcctggttggtgcgaacaagccgcggatgggtggacatatggccatgtgcacaaatttctgtaccttgttgaacccgaacattctcataccctatgagaggtccatttaacttgaaatttgcccagggcgcgaaggtattaaagaaggatgccaacgctctgttccgcttgtcaatcccaggttcgtccccagaagagtggcacactggggcactgtgtgccataccacatttgaggttagaactccttagatcaccgaaagactttttccactcttctaaagaagaggacccatccaattgtgagtctgtttgcaactcaaattttacgttcagatacggccattggggacacatttgctcatcttatggagcgcgcaggaacttccgagacggttgtggaccaatatacccccccaatctatttccaaaaggagttatgggtttccataacgacgtgtggcctcttacaacattaagcttcctgtgggaaatccctagaatcccttttgggataagcctgcctaccgttgggaccacatttcgacagttttcgagcagcgaactagttcctacaccgaggcccacccaatgttcaaagagggcaactgataaggggattacaaaggttataaccccggtttagagttaatacagaaggcttgggagggtggaattacgagtagcagaaaggcaaaaggggaggtttaagagagccggtagcggaaagaggaccgccttagaaatgtgtaatcaaattgtgaagtgagctaatgtgaacgtgagataggggtataggactatagaggtgtaccattgaagcgtgtaatgtatacgttgcagcttcgcaattggacaattgtgagaggcgtttcacccagattccaatgaatttgttattgagagttgtacacataaaatcgcgctttgtggaaatgaggaggtatagagtgttgaggggacgatagggataattgagtccgatatgacaattgagaacaaagttaagcttacagtggaggcgacacatctttggactaaacgatagagtctaagagagaagaagttcaaagatagataatttgtctcgaagaaaacaaggaatcgagctgtgtgagatggaagaaatctagtagtattctgtagaaaacagtgaatgcttgagg

SEQ ID NO: 697200 - DNA, 751 bp, Homo sapiens
  misc_feature (470)..(470): n is a, c, g, or t
  misc_feature (551)..(551): n is a, c, g, or t
tggtgtaagggcccaaacggctgcaaacagaggggtgatagcccctaagcttagtgttaaagttgggaattagggggctatttcctggctagggggtgaaagcgggatggatgtaaagaagattcctggctaacaactatatagtggcttgatgtgggatgaagggctggaaactggggtgtagggcgccttctaatgggctggaggggatgtctagggtgtgggagcacctaatattgggcgctgagatttggcctggctagctgagctaagagagagaggccatagttagtgtgggggtagaggctgtggattatagcggttataaaaggggcataattgggtggggggctcctcagtgagttgtggagtgtgtaggaataacactcagtgcataagggcggaggattgaacaccgattttcgccgaatacggtgtgggtaataaagagattgcgcttgagatatggngctggctggtgtgtgatgggctatatctgcgcgtcccaggggctgttattccactcaatctggtatgagagcaaaagaaanggggagtattataattcccataaaggccccctctatcaaagccgcgatgtagaaaccacagttgtggaaataaggggttgtgtgaaacgcgggggtaacacttaaaaaattttaggtattgtggggaactttcaggggaacacgaatgaggtagcaatttttttggggagaacccttggaataaaaggggagggggcaaa

SEQ ID NO: 697201 - DNA, 235 bp, Homo sapiens
cacacaggcgcaagctgtctttgtaaaaaatagctgagactctagttgtaaataaatagctgagatgctgggcgcagtggctggggcctgtaatcccagcactttgggaggccaaggtggatggatcacccgaggttaggagttcgagaccagccttgccaacactgtgaaaccctgtctctactaaaaatacaaaaattagctgggcatggaggcacacacccctgtgcgcaag

SEQ ID NO: 697202 - DNA, 188 bp, Homo sapiens
cacgaggcggagcggaggtgcagctcggcttcctccggcacccctccccctcgggcgccagtcccaaccttccgccgggcgggccgacccccccgtactatcccctgcggcgcgagcccggggtggctccaagcgtcccccatcagctccccatcatgggcagccatagctccaaggctccccggggc

SEQ ID NO: 697203 - DNA, 917 bp, Homo sapiens
gcttccttcccatctcgctcttgggtcatgcctggccagcagaaagcagctccataggggaggagagccacgcaggatctcacagctgcagtctaatagtaacacagaggattcagcagtggccaccatgggttctgtgaattccagaggtcacaaggcggaagcccaggctggtgatgatgggcctggcactcgcgccgggcaagaccacgctcctttacaagctgcaagggccaccagctgctggagaccctgcccactgttggtttcaacgctggagcctctgacagctcctgggacacgctgtcactgacctctctggcgaaccgttgcgaggggcaggcccccgcatcagagcccagcctggaacggactatctggacaggcacagatctccctcgtgctacgctgactggcacagccacagatgaagcccgacttacccgagctcaagccggctgagctcacagaagtcctgaacgaccccaacatggcctggcgtccccttcttggtgctggccacaaagcaggaggcacctgatgccacttccgcctgcttaccgcatccagacaccaggctgacgtctacgagaagaataccacggaccaacatgcacgggagctccgagggcatgacgagcccctcacccggcgccacggcgcatgccggaggcacctgcagtacgcctgctgcagccctccctgcacatcctcgccaagcccagcaacgctgccctcgacaagggcggcacgagccccccagggagcgctagaaccagccggcacaccggcggacgaagacacatggaacccaggacaggagcgcggcgcgatccgcgaggcgccaatccccaacacacggcgagaagcccagcgggaccgcgggagacaaactcgacgacgacagacacaccgaa

SEQ ID NO: 697204 - DNA, 1582 bp, Homo sapiens
  misc_feature (845)..(845): n is a, c, g, or t
  misc_feature (976)..(976): n is a, c, g, or t
  misc_feature (1039)..(1039): n is a, c, g, or t
  misc_feature (1305)..(1305): n is a, c, g, or t
tgtgtggaccacaatcataatattctttcccggggcttttccatcgcatctgtgttcacctaggtcgtgggatttctccccctctttgttgtcgtcctcgtgcttcctctgggtgttgtctcagtagtttctgtcgcacctcctctccggggtcacaacatgatttttccggttgtgaatcacccgggtggctatacacattcatcgggggcattacattggtccaacaccttgtgcaacaccaaaattgttggatgttatgcatcccatcgggggttttctacaccaagttttctggggcccacccttaccacatgtttggttgcatccctcgccaataagtgggcgttttctttatcatccggggtaccctttcacagcacagaatgtggcctgctgactaccacgttttggcccgtctgcacaaatttggggggttgtataaactctttgtagtgggagacttatgagaacaaatatgttgttggctcgcccccctggggggcagcaaatatatagcgcacacacaccaccgcagcgttgcaacatggtcctttatggctccccctccttctccggtagaaaatcctctgggggcgatattattacgccgccctcgtctcgggatcgatataaggagcaaaattttggtgtcccctcttgtgaaagagcctccttgttgtatttccctggagatagtttcaacgccaccctgtgggaattttgttaaggaaaaccatcttgtgttttgccctcgagatggctttgaaaccccctctgtgaacattggaaagatgtttaaagcctgggtgtgccccccccctgggggtaaaaattcgcgttgnaaatataagcccccctcgggagacacaatatgtctcttcttggagaggtgtttcacacccgctcctctaaggttacacgcttgtgtggcctcctctgggtgccacacttttctcgcttggggctataaagngtgataagagacacggtggccctcttgctcgcgagaagacacacacagtgtctctgtgtgtgnctcttgtgtggagagttctctgttgtgggcccacaccacagcctctcttgagttctcgtggacacaggggtgattaaaacagtgtgtctcacagggctctgagagtgtttctcgggagttttctctctatagagaggctcggcacaagagaccccacacttggttttttgtgtcttggcgggttctcgttcacgggttgtgaaaagttccacaagtccgctaggagcccacgtgtttcctctttcttaagctcgaatgttctcttngggccacagagaacacccgctggggctcgttaactctggctcttagaagtttggagaagtcggtttggcacatttaacgccccgtataaatgtaattcactttcttaaatttaatgtaaaggttttttgttgtaacgcacaatttctcgagatttctttgaaagaagatgaccacaccacaaattttggtttttctaactgcttaagtgagaaccattaggcccccagccaacacgtccattgtgtaagggaaaataaaagtgctgccgtaacccca

SEQ ID NO: 697205 - DNA, 1536 bp, Homo sapiens
gatggacccatttcgccaattgaagccgcctaatcaaaattattttgaacggctcattcgattcgactgtcgccacctcaggtccaattgatctccggggtgtatcgaatacttcgagagtcactgcttgcgacggtcgatgcgctgcatgccgtccatgtgtctcccaatcgtggagatagtatcccttagtccgagtgactcgataatgtctaccgagtacgtcctcaaaatcgctcttctgacatctgtattcggtcacacattcgactccgagcacagtgccagttaattgagtcttgttggatcgacgctaaatcttacgagcagcctgaatggggcgacgcgtcacaatagtatactctctgatgctcaggcatatgtataccgtaaaagcatatctgtttgctggagagctctcgaataagagacgggaataggtatgtgcttcgtaacttaccaaatataaacggatgaggaacttcagttctgagataactttgatctccttctcaatgccttatgcgacatcggttctatgtgttacaaaagagtcctgtgttctaatcaagaggacattaaattgatcgcgttacactcggtttagacaagaggtctaatgatatatatggatatactgaggagtggggggcccatacagtaggcctaggtttatccacagaaaatcttatataggtaattcccggagcaccatgttcgtaatcgagcataaggacgtggccagtgcaccacttccctgtattccacgatggaaaattcactcgaggggaagtgacttattcttacatagcaattgaccaatggtttgacaaacctcttgtcaatcaaggggaattagcgcttcactacgcattttgccgagggttcaatttccttgggctcccggtatcaggtataggtttcgcaacgacttaattatgtacaacggcaaattatcagcagttcctacacgtgaaatttggttttgcgacactagaatcaaacgcgggaacttcaatgatgggatgccccgcatagaggaaagtggaatccgttccctcaatgtttccaggccatgtacgaactttaactttaatacagggagcatttttagggtaagaagaatctcacaaaaggcacagaccatattagggccattaacttatcttcaattacggtatactggtcctataaattgactatattataccaagcttaattaacatttcacgcatgagaacgcttcctttaaaggttgagaactcggagaagcatgggtagagtagggcagctaacagagcagaaaactgcgcagtttagagaaacgcgccgatgcatcgccgagatctaaagagccgcagaaatggtaaatgacatcataccgatatcttagccggcataaacagcaaagttagtcacatagtccgagatcgctgtaaacagtacatataggagggagaggcacaatggcacctatataagtatagtcaccaaccgggagtacataaggaagagtaacccacagccacaccagaa

SEQ ID NO: 697206 - DNA, 604 bp, Homo sapiens
  misc_feature (37)..(37): n is a, c, g, or t
  misc_feature (78)..(81): n is a, c, g, or t
  misc_feature (87)..(87): n is a, c, g, or t
  misc_feature (113)..(117): n is a, c, g, or t
  misc_feature (135)..(136): n is a, c, g, or t
  misc_feature (138)..(138): n is a, c, g, or t
  misc_feature (146)..(146): n is a, c, g, or t
  misc_feature (166)..(166): n is a, c, g, or t
  misc_feature (169)..(169): n is a, c, g, or t
  misc_feature (171)..(171): n is a, c, g, or t
  misc_feature (173)..(173): n is a, c, g, or t
  misc_feature (175)..(175): n is a, c, g, or t
  misc_feature (203)..(203): n is a, c, g, or t
  misc_feature (210)..(210): n is a, c, g, or t
  misc_feature (219)..(219): n is a, c, g, or t
  misc_feature (221)..(221): n is a, c, g, or t
  misc_feature (223)..(223): n is a, c, g, or t
  misc_feature (227)..(227): n is a, c, g, or t
  misc_feature (235)..(235): n is a, c, g, or t
  misc_feature (248)..(248): n is a, c, g, or t
  misc_feature (256)..(257): n is a, c, g, or t
  misc_feature (259)..(259): n is a, c, g, or t
  misc_feature (272)..(272): n is a, c, g, or t
  misc_feature (289)..(289): n is a, c, g, or t
  misc_feature (296)..(296): n is a, c, g, or t
  misc_feature (307)..(307): n is a, c, g, or t
  misc_feature (309)..(309): n is a, c, g, or t
  misc_feature (313)..(313): n is a, c, g, or t
  misc_feature (317)..(317): n is a, c, g, or t
  misc_feature (324)..(324): n is a, c, g, or t
  misc_feature (373)..(373): n is a, c, g, or t
  misc_feature (381)..(381): n is a, c, g, or t
  misc_feature (388)..(388): n is a, c, g, or t
  misc_feature (421)..(421): n is a, c, g, or t
  misc_feature (474)..(474): n is a, c, g, or t
  misc_feature (512)..(512): n is a, c, g, or t
  misc_feature (514)..(514): n is a, c, g, or t
  misc_feature (519)..(520): n is a, c, g, or t
  misc_feature (575)..(575): n is a, c, g, or t
gccgttacagccctcctctccaaggctcagggctganaatggttagcatatcgaatgatcagtaaaaacatgtaaaannnngaaggntagggaaaaaggtgcattcccctaannnnngggggttggaatttcagnngngagggggnaggggggggaggtgccaggnggntntncntttccctctgtgttatctttcataacanttccaancttggtgtntncnatgngctccacntactcagcggagnccacgggnngngccccgtgggcgngactgagcagtgacctngcctgcnccgttcctcantngccnatcncattgcnttgactgaggggaccctgcttgtgctcctggggggcaggactgggggtnctagctcnttgcttntttggttccattcagagaacagttgtgcttganggactcatccccactccccaaactccaagctcctgctggtgggctgaaggcantgacagagtccctgggacacccccaggtagccaccttntnttgtnntctggtgggtccctccctgggcacatcgtcccatcctcagctcaagccccaggtntaggaatagggacagtgaagaaagtgtat

SEQ ID NO: 697207 - DNA, 723 bp, Homo sapiens
  misc_feature (218)..(218): n is a, c, g, or t
gggcgcagcctaacttttcacaagatggacccttcatttcaagcttaggctggcgttacttttgctgtctagtcaggactaatcacggtgtttcagtgcggagtgccaagagtcctatcctgacgtcaggctctgggtgtcaacctctgacttattctgcagatgctctgtgtgtgtgtgtgtgtgtgtgtgtgtgtgtgtgtgtgtgtgtgtgcggngagagggtgcgtccacgagggcttgatatatcggcagtgtgggaaatgcgacgctattttctcatcgatcatcatctctgatacagatcatgtcgtcgtgtagtgtcagacgagacgacagtgtcctctgccatcaggtaggaggttatatcacgacaagagtgttttttacagtagtatcgctgcgttaccatatcatacatctctgtgccgttgtcagcctgttgaaaggcgttgggtctgctcaccaggacttggatgcttctcagggcaccttaagagggacgctggttagtcgtaggggcagagagtatctacttgggcactctcttccaagaaagaccgttgtctccattctcattagacaatgcttcgtgtgtgtgttctggaatatcttctatatggaatgcttgtcgcactgtcccacgcgagtggctcgcatgagcacctgaggaccacacttggcgagaccaaatcatgtcctacaccagtgtgccttacaatc

SEQ ID NO: 697208 - DNA, 1038 bp, Homo sapiens
gcacacagtccctcacaatcagagatgctgagatgggaccgctagattggctgtcaggaaatgctatagatatatggcgtgtgtggatccgagtgttgcgtggttgtccgaggaacgtggccatggcctaatcactcgtgattaaatcgatagaagcctcgagtggtgaaagtggctaacgccgacagcgagcttggacgctccgaaggcagttatgcggtgatgcacttgcgtcagatatctcccaatggttctctgcctcgagcaagctcctcgtgttgttgaccctctcagccgtatgagcgactttacgatttgacaacacttcaacgacaagcaagcgactctccatgaaatacatggctccaggcgtatggttgagggttgatggcacactgtatgacaggcggtgatgccatagtggttggcagggcagaaaatggagcgtatgggataagctatcgagtagaagaagcagtgttcttcacctgcctgtcatctgtgcactgtgtccatgcaatcatttctctcagggttgcattgaagactcattgtcgacgcctgcgaagtgctctttcctctgtaacacggtcgacatttgtataccttatcctgctgataatactgcaatccttgaatgtacctggcacatggttgtatgtccgtgaggattttacaggtgctgtgggaaatttattggtccaaagtctgtacaaagactaaattttggtaaagggaaaatatttcccaccatttgaaaggaggagcacgacgcgctggcgtctgttgcacgtgtttgggaagttctgaaatccactcagtgcttgttgtcgggacatgaggcgctgaaagttgttgtactgcccttcatggcccgtctttttattccactgtgtaccatgttggttctggccttttggctgccttgtggcctaaggacttccgatgttcttatgatcatttttttcccttacctcggttgttgagtatttccttgtagcgccagtttccaagagggggggcgcgctctggggactc

SEQ ID NO: 697209 - DNA, 605 bp, Homo sapiens
gcagtgggaacacagcaaactgacaatgggactaattaaagagcttctgcacagaaaagacactatcatcagagtgaacaggcacctagagaatgggcagaaaatttaggcaatctatacatctgacaaagggctaatatccagaatctacaaggaacttaaaacaaatttacaagaaaaaaaacccatccaaaagtgggcaaagaatatgaacagacacttctgaaaagaaggacatttatgtggcccacagtcatatgaaaaataactcatcatcactggtcattagagaaatgtaaatcaaaatcacaatgagataccatctcatgccagttagaatggcaatcattaaaaagtcaggaaacaacaggtgctggagaggatgtggagaaataggaacgcttttacactgttggtgggactgtaaactagttcaaccattgtggaagacagtgtggcagttcctcaaggatctagaactagaaataccatttgacccagccatcccattactgggtatatacccgaagcattataaatcatgctactataaagacacatgcacacgtatgttcatgggcacacggtctctcaggggatcctct

SEQ ID NO: 697210 - DNA, 299 bp, Homo sapiens
  misc_feature (64)..(64): n is a, c, g, or t
  misc_feature (76)..(76): n is a, c, g, or t
  misc_feature (82)..(82): n is a, c, g, or t
  misc_feature (91)..(91): n is a, c, g, or t
  misc_feature (127)..(127): n is a, c, g, or t
  misc_feature (142)..(142): n is a, c, g, or t
  misc_feature (182)..(182): n is a, c, g, or t
  misc_feature (190)..(190): n is a, c, g, or t
  misc_feature (197)..(197): n is a, c, g, or t
  misc_feature (202)..(202): n is a, c, g, or t
  misc_feature (205)..(205): n is a, c, g, or t
gagccggctccggcatgtgctgtaggccagcgtgaaaaggagatgcagagatgttacagagacntacaatgctcanagatgncaatttccnaagaaagagaggtgaaggcagctcaggcagtggaancatcaacctctcaanagcacaatgtactgaatgtcctgaagctattggggaaaanaaaagatnaaaaggncaatncanttaagtgggaaacacctgggctgggagatgcctgtgcttcttcctagctccgctggcgatactagcacatagccgggtaccgaactgaacgtgt

SEQ ID NO: 697211 - DNA, 225 bp, Homo sapiens
tcagctcgggcctccttttattcaagcagtcgtaggctcactggtcatccgcggaggaggcgcccgtcgggcccaggtcgcagccatacatcctctgtatgatgtgagacccggcctcgctctggttgtagtagccgcgcagtttccgcaggttcactcggtcagtctgtgcctggcgcttgtagttctgtgtctcccggtccccgactgcttggattacaagga

SEQ ID NO: 697212 - DNA, 260 bp, Homo sapiens
  misc_feature (9)..(9): n is a, c, g, or t
  misc_feature (24)..(24): n is a, c, g, or t
  misc_feature (100)..(100): n is a, c, g, or t
  misc_feature (103)..(103): n is a, c, g, or t
  misc_feature (115)..(115): n is a, c, g, or t
  misc_feature (192)..(192): n is a, c, g, or t
  misc_feature (218)..(218): n is a, c, g, or t
gaatgaagnccgtttacactcatngttattattgataggtgaggacttactaccgccatttagttgttttttgttgttgttgtcattttgttagttctcnctncctttttttttntcttcttgtcttcctttcttatataagcaattttctggtaatgttttaatttctgtcttttaatttttttgtgcccntgttaaaggtttttgctttgtagttnccattgaagcaaaaaccttttaacagggacacaaaaaaaaaa

SEQ ID NO: 697213 - DNA, 303 bp, Homo sapiens
  misc_feature (94)..(94): n is a, c, g, or t
  misc_feature (113)..(113): n is a, c, g, or t
gggattggcgagcgtgagcggcagaaggccctgcttcttcaggttcgtttcgtggatacgcgcgaaggatttcacgatcacggccacgccgccnaggaaacgcgggctcatgnccgcgtgctcgcgggaggatccttcgccgtagttttcgtcgcccaccacgacccaggttttgcccgccgccttgtactcgcgcgcgaccttcggcgtttccgcttcggaacccgtgaaggcgttcttcactttgcccggcgtgccgctgaacgcgttcacggcgccaaggaacatgttgttcgagatgtt

SEQ ID NO: 697214 - DNA, 121 bp, Homo sapiens
tctccctctctcacgctggtttgtcatagtttcacaattaccttaaacagatcccagactgggcatggtggctgacgcctgtaatcccagcactttggggggctgaggcgggcggaacacc

SEQ ID NO: 697215 - DNA, 771 bp, Homo sapiens
tggggacggagtcttactggggtcacccaggcgggagtggcaggggcacagtctcggctcacggcaacctcagcctcccgggttcaagcaattactccggttctcagtctcccgagcagctgggattacagggtgcccgccacaatggcccagctaattttctggtatttttagttagagacagggtttcaccacgtgggccaggcgggtcttgaactcctgacctcaggtgatctggtccccactctgctctggcttttctaagtcattggtcttactcaccgaaagtgtctggtcatttcctggtgtttcactggtgggcaataatggcctactgatatgtacaggggttgggcgctctggttacccgatggctttccagctggtggtctgggttcccattcattgctggcctccagcaacggataacgtatacggcagcacctccttatttggagtgcaaaggtccggtggtaatagaggtagatgattctggggggggggccggggtcatggcgtatggtgtcgggtaacatgtcatccgacgtcggccgtccacaagtgttctgcgctaagaatggaccctcagctgctgacaggcacgaggatccagctaagtagggccaagtgttgcagccgagagagggttgtgcagaaaaacctgtgctctcccaggagcaggggacagcgacacaggggccacgcggcacacaacgattatcaccagggcacgggagagggtatcaccaccacaaaccggagaagggaata

SEQ ID NO: 697216 - DNA, 922 bp, Homo sapiens
  misc_feature (193)..(193): n is a, c, g, or t
aggctggcgctcttggttctgggggttagttctccctgtagttgggcgtcctacaacgacctgtcacatttgcgggcattctggtcgtgtccagcgactcccgtcctttgtgacaaggtaccttctccgggtggtcctcgcccccttggggccaatctccccgccaagggggctttaacctcagtccgcgggncttctacggtggttctcccgcctctaacggttgttggcccaaacccagcggggtaccagcccggctctccccccaggaggattggcgagcacaattaaccgttcggtgggtaccaccacccctgtaacgacctggtaactcccccccgcgccctccccccaagcggttttgtgatgtcccctccccccactccgcgttcttcaattgtccccgagataaccctacggcgtctgtcttcccccacgcgttacatatgataatatcctttttctaatcgcctgcgccctcatttttggtgttacccacaccagcctcccgcgccaatttcgccccactataacttcttaaagagaaaattagaatagtccatttttgataaccagcatcttcatcactattgcacagtactaagccaccacaaggagtccattattacatgtacccatgcagatattaccgatactttttcccactcgctcccgcacctccaaatatgagcgccacctctcttctcctctgttgacttctggagtaatctattgtaccacactcctcgcaacacacatctctctatctcgtctttcttttccatacataggtaaagctcacgcaccattcttttcaccacacaatacaaccagtcgccccagtaggttggtaacataccccactaacagggacgatctcctcgcccctccccaaaaaaaaattttgaacaacccacataac

SEQ ID NO: 697217 - DNA, 224 bp, Homo sapiens
gtgttgtccctctacgccgtctgggcggcgcactgtcattgtcatggactctggagacgggtcacccacacggtggcccatctacgagggctacgccctcccccatgccatcctgcgtctggacctggttggccgtgacctgaccgactacctcatgaagatcctcactgagcgagtgttactgtttcaccaccacggccgagcgggaaaatcgtgcgcgacat

SEQ ID NO: 697218 - DNA, 394 bp, Homo sapiens
gggcacgagggaggacagagggttaaatccatgaagtttgtggatggcttgatgatccacaggggagcccttgttaattattacgttgacactgttgtgcgccaggtgttgttcagacagggtgtgttgggcatcaaggtgaagatcatgttgccttgggacccaattggtaagattggccttaaaaagcccctgcttgaccaggtgagcattgtggaacccaaaaatgagatattgccccccccccccatttaagaacaaaagggtgggaagccagagccgcttgccatgccccagccagtccccacagaataacagggtttctttggcagttgtattttggagtttggatgttgttttttaaagccctttaataaaattttgtacaaagcca

SEQ ID NO: 697219 - DNA, 412 bp, Homo sapiens
agaccaggagtgaacaccaggaggtgggttcctggggatcccattgtctttatggtgtcgagctgaatccatgagcagagcctctcattgggtcaaggcttcttcatggtcttcaggaacctcttagagctttcttcacagagatgtggaatttttgaaagtttaattctaagtatatttagctcttcatgtccatgggtttcaaatccatgaatttgatcaactacagatagaaaatatttaccaaaaacaaaacaaagcaaaacagtaaaaaataagaacacagctgggtgtggtggctcacacctgtaatcctggctgcttgggagactggggcaggatggtcacttgagcccaggagttcaagttcagcctgggcaacatagcaagaccccatatctaaaagaaatat

SEQ ID NO: 697220 - DNA, 510 bp, Homo sapiens
tctcataggcctctcactgttgcttttacagaacctggagcaggttgaaaacaggcttcaggaacttgaggaaacaaatagaacatgccagaatgtatggaattcccgtagtagtggccgtgaatgcattcaagtacgtgtagagtgtaagcgaacaggatgaatgtggaaaatctcctggagctagattgtacagcactgcattaagcttaatatagtaattcagttactgctatcggttctagcctgtggttttagcctgcactgtgacaggcattgcatacgtcactgcgggctcaccacctcagccactgagggtcccaaagtcagattcagctcctatgggcccttttcctttccactgggggaagtacacacacaagcctgcaagtcaatgttcctttttcatctttcagaggccttttatgctaacagaaggtcataggcctatagtgttccatccatgaactagatctggtgggatgtcgactagacaaagaatcgggcata

SEQ ID NO: 697221 - DNA, 416 bp, Homo sapiens
  misc_feature (21)..(21): n is a, c, g, or t
  misc_feature (51)..(51): n is a, c, g, or t
  misc_feature (59)..(59): n is a, c, g, or t
  misc_feature (76)..(76): n is a, c, g, or t
  misc_feature (120)..(120): n is a, c, g, or t
  misc_feature (125)..(125): n is a, c, g, or t
  misc_feature (253)..(253): n is a, c, g, or t
  misc_feature (403)..(403): n is a, c, g, or t
gaattaaggggaaaaggaccnccggaccaggggacccctggaataccaggnccccgganaaccctccaaggaccanccccacgggacctaagaacctttccaaaaattttaaatggaacnggccngataccctccatgaaattccagacaaagaagaaaaaaactccctgttattggacctaaataatcaaaagcataatgttttccataattttcctatttgaaaatgtgcctgattctttgaatgttttantctccagatttatgaactttttttcttgagcaattggtaaagtatacttttgtaaacaaaaattgaaacatttgcttttgctctctatctgagtgccccagaattgggaaactattcatgagtattcatatgtttatggtaataaagttncctgcacaagttc

SEQ ID NO: 697222 - DNA, 80 bp, Homo sapiens
aattcaagcttctaacgatgtacggggacatgccactgcactccggcctgggcaacacagcaagactccacctcaaaaaa

SEQ ID NO: 697223 - DNA, 325 bp, Homo sapiens
  misc_feature (30)..(30): n is a, c, g, or t
  misc_feature (44)..(44): n is a, c, g, or t
  misc_feature (51)..(51): n is a, c, g, or t
  misc_feature (191)..(191): n is a, c, g, or t
  misc_feature (197)..(197): n is a, c, g, or t
  misc_feature (201)..(201): n is a, c, g, or t
  misc_feature (207)..(207): n is a, c, g, or t
  misc_feature (210)..(210): n is a, c, g, or t
  misc_feature (231)..(231): n is a, c, g, or t
aacagcccacttcactgcttttctaaactncccaaaaacccacntgtaggntactgcattaagtcagcatctcagaaacagtggtgtgagtaactgagtcaaattgtcaagtactttggatatacatagtgtcgagctttagattggtatgaaattaaacagcaatgcaaatagatttaattcctaattanttttangatngaaaancangttcattttcctacttaaccnggtgttcaacataaagctgatgttgtgtccgttttgtattttatcttttgttaaagatacataaatgacaatacttaactgtgagtggtttgta

SEQ ID NO: 697224 - DNA, 140 bp, Homo sapiens
  misc_feature (41)..(41): n is a, c, g, or t
  misc_feature (101)..(101): n is a, c, g, or t
  misc_feature (118)..(118): n is a, c, g, or t
gacatcctgcagcccaaaggagatgatgtggcccggatcanctggtacctccgtgacatcatcactcgataccaggcgaccttcaacgtcatcgagaggtnccccaagcccgtgattnctgccgtccatgggtgctgcat

SEQ ID NO: 697225 - DNA, 1251 bp, Homo sapiens
  misc_feature (247)..(247): n is a, c, g, or t
  misc_feature (293)..(293): n is a, c, g, or t
tggaccgctgtatcgatggatttcgtgccctctatctctcttcgtcctatagttacatgctgatctttgattcaatgactccctatcagggctggccggcccgtattcatggcccgtcggtattccatcctagaggatatggagtagtgtaaagacgcagagcgcttctgacgccttcactcctgttatccccacgtgcttgttctctctctggctgttgctcgctggccggtgcttgcttcgcgantggctcacgcctgacagcttgtcatgtgtattgcatgtcatgaganggctcagaaacggtgtgagtctacctcgtgtcgagatgctgacaggacaatagacaactcttgtaatgaccatgtttcctagtgtgtgagcatcgaggtgtggctgtgcgtaggagccctcgagcgaatggctacagcttgaggcaggaattgaagccaattggagtttgcgggcttagccaggggagtctgcatccattgactggtcgcctttgtgggctacgtcgctccacacgaaaatgcaatcctaaggggagcatctcagttggcgaacatggctagtatttggccttccctaggggggttataatgtcctcacagccaatatggttgatacttcctaggggggctgccttaaaccaaagaaaagtgagcccccttcgtggaggcacccacggggtatgttctcgcaaaggccactaggacattctttgacacataccattccttgacgtggcctcgttgtccttttgtcaccttggggggctgtgtatgtcaatcacacgctctagtggcattccattggtcaccactataacgttctaaaggcgttcaccttgtgttgttagaactctcgcttgttggaaatttcgaaaaatcatctcgttggcctaaagcgttgtcgcaactcggcgcgtttttagaccatcgcccggaaggtttccccacaatgggcggttactgcacgacattaacgggcccccgtgtggcaccgatactaaaatttgctaacacgacgacgtctatttgcggggactttttaccgacaccgccatagaggcggcaaaggatatcctctgctcaacggcacgaaagtttgcgttacttcctgttaggtgccgtgtggttgttgacacgcaacatgctgttgcggtttattctacacactttttcagaatggagcaacactttacaccctgttggcaacacacactatcaggacatttcattttccaca

SEQ ID NO: 697226 - DNA, 231 bp, Homo sapiens
cggacccacatccattccagcgtacgagagttatacttcatcagttgaaagtaggaaaacacgtaatcacatcataatcatcaatacttaactccatagatctacagtcgcacggttgcatgtctttataccgtatagagaataaccataagaaaatactacgtcaccaagtaatattccactgggagtaggcgaccagacaatacgaactgcaagtatgttaagatctat

SEQ ID NO: 697227 - DNA, 116 bp, Homo sapiens
ttcgtttcgctcaatggcctttaataacgggaggaggagagtgagacaggaggtgagggagaaagagaagggaagggaggaaagaacaggaggtgaaacatttcttggcaagagtt

SEQ ID NO: 697228 - DNA, 1266 bp, Homo sapiens
tgtttgcaacactagtgtctggatgtggagtgtgatgggtgtgtgctgtatgtgctgccatgccatgtgtctgtgcacatccctgtctgttggtctccatggccactgtgtgacttgggacccttgtgtgggaatgcctgcccatgtcgggctgtgtggaggctgatcagtgacgtgtgagagtaggcttccctatctgacctgactcacccactccctgacctgcccctatacctatgtattaatacctacctactggtctccaccaaggcttcgtatagccaccacaacccatgacctaggcagatgcacgcataaccccataccaaccacacagccagagagacggccacacgaacccaatacagaggaagagaatacaagaaacaaagaacggaccagagagccacgcagcacacctcaaacataaaagagagacagagcaaaagcgaaccaacctggagaaagctcacaaccgagagacacacacacaaacaacgaacaatcacacaaaaaaaacgaccacaagcacacaaacagagaacaaccgaaacaacaaaaaaagacacacccaccctgcaatgacatacccactgggacacccaccgcggacaccggccacgggccagcaccaaggccgcggacagagccccgagcacaccccagcacgaacgccacgcagcccagaagagaccacacggccgcacggcaaaccacaccagccgccacagcccgaccacaccagcgaagacacacaaagaaggaccagaaaaacgccacaacaacaaaaacgtcataaaaaagacacaacaaagacaaaagactacagagcagaagacaaacaaagacaggtactaagaactaacgtgagacccagaacctcgccctgagcaaactggaatcgcccaaagacaataagacaggtaatgaacgacagcccgcaccgccatgcaaggaacacgcacaaaagaaagatgccgctccgacccacggacacccgcacttgcacacaacatcggcgtgacgcgcctcacccccaagatggcgtgcataaaggaaagagaagaccatcacaggagcaccacccatcacgcccgttcgcgccgggatccaacccgcgtcggaggcaccacccgagaccatacgccaaaaggcgcaagtgcaccacaacgcccccgcaacaggcgacagcgccatgacatcacccgcgagacggcaacgacgcacacgcacacgcccacgacgccacccagcgccccctcctgt

SEQ ID NO: 697229 - DNA, 131 bp, Homo sapiens
tgtagaggatcccaggagtcaagacagccgaggcacatatgagactcacctccacaaaactttttcaaaattagctgggcatgctggcacatccctgcagtcccagccactcagggggctgaggcgggacg

SEQ ID NO: 697230 - DNA, 459 bp, Homo sapiens
aaagtgtcaaggagcctttttgcaacctcctataatattgaaacagattctgtgccctttaaaggagataaggtaactaagatctggggagcgctttacaatctgtatgcaaaaggcctttcacacaaaggccatgtttcatcttgcgacaacaagtcttataacaactacgatatatctgttcccatttccccaatataattgaaacggacagcgccgaatagatatctcctatagggctcttcaacactgtggtcaacctctagtaaatgatgttgacatgtcgccagtgtgatcattccattttggcctgcctttgaatcgcagattgtcatttagcaaaaacttcgtggacagatgatgtcagcttcggttcagagagcaggattactaaggtccccaaagtctctctcttacggactctcacaaacatggtaccatccctaatgaagtcaaacg

SEQ ID NO: 697231 - DNA, 954 bp, Homo sapiens
gataagaaagggagtgggattggcgcctacggtgggcgatagtgggacgcgccgagccggacggctgcaggatgatgcggttcatgctattattcagccggcagggaaaactgcggctgctaaaatggtacctggccattcggacaaggaacggaagaagatggtggcgagctcaatgcaggttgtcctggctcgaaagcccagatgtgctgttcctgggattgtagggaccttaatgttggctataagagatatgtagcctctatttcatgctgttccgatcgagggctcaatgaccaatgaggtctatctacatctggagtctgatccagcgatatgtgaagctgttagacgaatactttggagttgtgtgcgagcttggacattatctttaactttgagaagggctacttcatccgtggatgagttttggatggggggggatgtccaggaacacttcacaagaaggagtgtgtgaaaagcccatcgagcaggattgaagctattgcaagaggaggatgaagtcgccacggagtgtgctgcaggaggattgggtttggcatagtcccatggtgggccagggttgtggtgatggggtctggaagatgttggggggaacggttgtttgtacttggcgaaggccaagtcttggtgggaatcggggcccgtcttgatggctagcgttacggaagtgaatgtggattagctcaacaaatttagttcgttttgtccagaaaggggtggagaacgttccccaagaagagttttaacaggaagaagaagtttggaaagaggaggaaagataataaggtgtggagtattaggaaaagaattacaaagaagagtaaaaagttaaaacgaagtgcaacgatgagaaaaataagacgaaagaaaggagaagaaatgaagagagcaaaaaaaagggaaaatatataaagagttatattatcatga

SEQ ID NO: 697232 - DNA, 449 bp, Homo sapiens
gggcggccctccctttcatcagtcttcccgcgtccgccgattcctcctccttgagtcgccgctgtccattggctggcgtcagcaaaaatggctcaccacacacttccctagcacatgcagcaagcatcatggttcgcaccaagttccaacatcatgacgcacgcagcacaaggcagcattctcacgcagcagcatgcaccgggcctgtggcaggtgcctcccgccaggagaacaggagccagcagatgatccatccgtgacattgcagagagccagagagaacatccagaaatccctggctggaagactcagagcacccggggacctaccagcggcaaccaagcggaagaccacggatgagctcgtcgatccggattgccagtctggaagtggagaaccagagtctgcgtggacgtggatacaggagactgcagaaggccatctccaag

SEQ ID NO: 697233 - DNA, 1468 bp, Homo sapiens
agctcttcatatctctttacgtagttcaagtaaatgtagaagcagtatctcgaagaatggcaaatttagccttttgtatttggatagttgcttctagcctgatccttcttcagtagtttattactgggtgatataattttgagtttgccaaatttctaattaaaggagctctagtaccatgttcttggaaacttatccagtcacctgttacaaataaaaagcattcagaatctctagtccctgaagccgaaagaatggaacccagtctttgtttaatcacagctctaaacagaaaacagttaatatttttcttgctgtcaaatataacaactggcctgatcaacctgatggtagatacattacacagcagtaccttgtgggccttatttgtggtcaatctctatatgttttccaactgtttaattgtatatgtactatatttgcaagataagactgtacaattttggtgatcagcaggagtaggatatataagtatttgggcaatatttaatgaggaatattaattgtaaagaaattgtgcttttggcaacagtgttaaccatattttattataaaatagtttcagtcatctaaacagcagtgatgcttaattatttttttttttgagacagagtcttgctctgttacccaggctggagtgtagtggtgccatctcagctcactgcaacctccacctcccgggttcaagcaattctcctgcctcagcctcctgagtagctggcactgtaggcatgtaccaccatgcccagctaatttttatatttttagtagagatggggttttgccatattggccaggctggtctcaaactcctgaactcaagtgataacacccaccttggcctcccaaagtgctgggattacaggtgtgagccaccacactgggccaatgcttaatattttaatgtatctcaacaataaaaccaagaagaaacaaagccttttgacttgttagaatgtattaagtagtattttaaagaaactttatagttgtgacattgaaagactgttggggtggggggaggaaaatttttactttccatcttaatgtaaccttatgctattctgtatttttactgtatattgcttttacaataaatataaaatgaaatgtttatgttgaaaaaaaaaaaaaaaaaaaaaaaaaaaaaaaaaaaaaaaaaaaaaaaaaaaaaagggggggggggggcaaaaaatatctcccgagggggcccaaattgacgtcacacccttttttgtgcacaaaggggccccaaaagggaggccgataaaacgaaggacgggcggccggggacaaaagcgctgtcggcggaaaccgcgccctgggaactgggggagggacccacttggcgggccacccgggcacacccccaaaagatagagccgggcacaaacctcgcggtaggggtcacagcgcacgcgcgcgcaaatcgccgactataaaatca

SEQ ID NO: 697234 - DNA, 361 bp, Homo sapiens
tgtgctgtacggccggagtatgggcgatgtcggaccaggctgtcggtgccactctggggcagtcccactagtgattgggtgaaggtgtgtggcaacagcatgctggagcggtaggcaagctcccgcgagatcggccctgagccgcactcagtcctcaccgctgccgcagatgtccccaggccctgcagcagctggtcatgcgaacaacatgcagccagcagttcctggacgaagcagaagcatgcagcagctacagcgtgggcaagatcctcaccaagacaggggagctgcccaggcagccacaacaccaccctgaggagacagaggaggagctgacggagcagacaggaggtcttgctgc

SEQ ID NO: 697235 - DNA, 595 bp, Homo sapiens
tctgggcacgtaaacagcattacaaacttattctatctgtctaaaacgcatacaatgcaatgcaaataatgctaatgtaatcaggaactaagatgttcagcataagataaatggggtacaaaaattaaaatcaaagaaataaaaactctgaaatcttaaaaattaattgaaaacaattaatttttcaacttcatttttctcttaaaaagctcatattccctagctttgtacttttaaagaactataggcactgaaaacacagggcagtgagcactcttggtgtctagtttagtggtctcttaatgccatttcccattaaaatgaaccaaggcctagcggggtgcggtgcctcgtgcctgtaatcccagcactttcggaagctgaggtaggcagataacttgaggtcaggagttcaagactacagtgagctgtgcttgaaccactgcactctagccaggcgacagagatggtgtttagttgggttgagtttttttaataaagcaaacccaaagatcccctttattcctcaataattagtatgtgcctctaagaaatcattcttatcacaccttaaacatgaagaattcttttatag

SEQ ID NO: 697236 - DNA, 109 bp, Homo sapiens
acggccgtgtattactgtgcgagaaggcccggcgcgaagcagcgggcatattgtagtggtggtagctgcccctactactactacggtatggacgtctggggccaaggga

SEQ ID NO: 697237 - DNA, 908 bp, Homo sapiens
  misc_feature (27)..(27): n is a, c, g, or t
  misc_feature (77)..(77): n is a, c, g, or t
  misc_feature (228)..(228): n is a, c, g, or t
  misc_feature (233)..(233): n is a, c, g, or t
  misc_feature (238)..(238): n is a, c, g, or t
  misc_feature (242)..(242): n is a, c, g, or t
  misc_feature (257)..(257): n is a, c, g, or t
  misc_feature (261)..(261): n is a, c, g, or t
  misc_feature (269)..(269): n is a, c, g, or t
  misc_feature (276)..(276): n is a, c, g, or t
  misc_feature (287)..(287): n is a, c, g, or t
  misc_feature (361)..(361): n is a, c, g, or t
  misc_feature (417)..(417): n is a, c, g, or t
  misc_feature (454)..(454): n is a, c, g, or t
  misc_feature (467)..(467): n is a, c, g, or t
  misc_feature (621)..(623): n is a, c, g, or t
  misc_feature (638)..(639): n is a, c, g, or t
  misc_feature (644)..(644): n is a, c, g, or t
  misc_feature (648)..(648): n is a, c, g, or t
  misc_feature (657)..(657): n is a, c, g, or t
  misc_feature (665)..(665): n is a, c, g, or t
  misc_feature (699)..(699): n is a, c, g, or t
  misc_feature (701)..(701): n is a, c, g, or t
  misc_feature (718)..(718): n is a, c, g, or t
  misc_feature (736)..(736): n is a, c, g, or t
  misc_feature (747)..(747): n is a, c, g, or t
  misc_feature (757)..(757): n is a, c, g, or t
  misc_feature (787)..(787): n is a, c, g, or t
  misc_feature (791)..(791): n is a, c, g, or t
  misc_feature (804)..(804): n is a, c, g, or t
  misc_feature (807)..(807): n is a, c, g, or t
  misc_feature (814)..(814): n is a, c, g, or t
  misc_feature (888)..(888): n is a, c, g, or t
tttttttctctctaacaagcactcaangggcaaggatatgataaatatttaggtacacccctccccaccaagagatnggggggtgaagagctgggcacgcatctgacatttcttcctctattcctataaaaataaaaggaagcagaaatctgcttcaatgagttaacaagtcacctacactccaaaataacccatgcacactgtttctggggagggagatggccaggngaggngagtngggncacatgatggggganattnactctgcnacctgcngcacccctgtnctggggaggggtggccagtgccacagtggactctgagatgaaagggtgtttcttccactggcctttggcctgtnaccagcctcctccgcggtggcaggcagtacaagagtgatggcaatgtgactggaanagaaatagtttctaccaggcacacaaaagctcctgtnagctccgtagttncatcctgcaaagggcctcagtgggaaccaggtctgcagacccgagtgggcagagagacgggtggagagcaggtgccccagatggtcccgcaggcgtcaccgtctggtttggagaccttaagggagttgtgcttcaaacttctctcccagggtcnnnggtggagaataaggnntttgnactnaaagtcctnccaagcanagcccaagtcttggtacacaatctggttttaccncnttttaacaaaagacaangtcttctcttcctttcanaaaaattcatnaacattaaantcttttcttcgggatttcttctttcccgcngccnctcccattttgtnccnaaagaangcgtctttccccgaggtctaggttcccacaattggccccagaaaaagcatgttcctgtgggggttgtgccgggnccaaaaaaagcaaggtctgt

SEQ ID NO: 697238 - DNA, 266 bp, Homo sapiens
gtcaataaacaggtagcataattggggaaatgcgtatattagaaaggagagcaaagtgatattctttggtaaaaaaatgaagttcaatgactcttatttttctcactcctggttttttttttagacggagtctggctctatcaccaggctggagtgcagtggtgggatctcagctcactgcaacctgattccctggttcaagcgattctcttgactgagcctaccgagtagctgggactacaggcacgcgccaccacacccagcta

SEQ ID NO: 697239 - DNA, 397 bp, Homo sapiens
cctggtatagctggggccaacccggccttaaggtttaactggggtgaaccaatgccctggcccctaaacatgttcaacaggaaccgtgtggatacatcccccccccctgttttttggcatgtcatgtgtatgcagcttttcggtttcctggctttcatgatattcatgtgctgggtgggggacgggtaccctgtctaccagcctgtggggccaaaccagtatccttccaataatttgtacctggaacgaggcggtgatccctccaaagaaccagagcggggggttccctatgagatttgagggggctttgtgggcttttgggtcctctaactaggactccccccttcctaaaaatttacccttaatgaaatccctaataaaacccagggctgggtta

SEQ ID NO: 697240 - DNA, 212 bp, Homo sapiens
ccatgtggagtcttcttcttcctcctcagccccgtactcctacctcctccaccacttcttactttcgctctttccgggcttgcctactcctccaccttctccttcttctccttcaggtccttggcgctcaactcggccgctgcctccaggcttatctccgacatggtgccgggtgtccggggccggggctggcggggggaagcaaggaggct

SEQ ID NO: 697241 - DNA, 1047 bp, Homo sapiens
ttgatgccagcaagttagtgttggcagtgtgaacagtgctacttcacaggcttagttctgttgtctttaagttaccaatgtgtcatgttatacgtataaggatctgttctttttgggcaaggtagttaaattcttattcattcaacgtgaatggttggaaaaatgtagttaaatttacgtctttacgttaattccttagtaatgtttcatagctacaattctggtttctcaggacaacatttattatgctactgggagcaacaagtgaagaaaggaagctatactttggtgaccagacgctgtgagccctgtagtcattgcaagcatctacggttattcaggtaatattaccagaatatagaggttggtaacgttccgggcaagtgtgtcacatgccattgtgaagatccgttggcccgaattcacagaagatactaagtcgacctcatgccagtttacgaactctgtacttcatcctgctgtgtgctatcggatagaaatctctaagagctacattacaagatttgttcaaacaggaagtgatcaacgagtaagcagggcaccaagtgtaaaggcatgttgctagctgtctgtggaacagatttacccatttgtgtttgaaagcaggaaagaaattttataattcaccacttaattggttagtatctctgagatctgagcaccttttaaacatggcatgcacattggactcaaaaggaaaactggaccaacgaataaattgaaggaaagtagactcttttattcattctacggctagcagtgtaagctccagtgccctcttggattgtttattccaagaccttggtgtaactatgaaaaggaagtttacaagagcatgatattgtctgcttttacataaaggacagtctatttatgttcgcagtaattctgcatgtcccgataagcagagctgtcacagtgtgcactacctgagattgttttaagtgtcggtcattgttatgtgttttccatatttgagctaatgtgttttatttgtgaatagtcttttaatttgtgtaggcgata

SEQ ID NO: 697242 - DNA, 637 bp, Homo sapiens
  misc_feature (621)..(621): n is a, c, g, or t
aggacactaaagcaagccaagtggacagtatgaggggattcccatggtgggattcatttccctgccacttcgattgggtcagtaacccagatgacctacaggggcacagtgttgacccggaacccctcgtgactcaacatctgcctgccatgtttgggctctcacatgacatccgatgactaggtgacgtcggtggaggacatcgctgctcctttcagcagtcgactgcctgaccagacactcaagtcgtcgtgagtgcttgagatgactgggacaaatcgctccatcagatacatccctcagggtgatagacaccactgtgtactgatgttgggccaggatagaccggcgtgtgcccttcaagcagggcatgtagtattaccgtgccctaaagacccggaatgtcccctgttcggctcctgctctatcccaaaagcacctacgcattataagaggtggaggtcgagtcagacagcttcatgaatgctgtgctcacggctacgcacacacttgcgcagactgaacccctgccattcagcatgatcatgatcagcctgtgccacacttcgctcttgaggagctcaacggtctggcagggcagcaggaggctttataactccnagtccacagtatgctg

SEQ ID NO: 697243 - DNA, 866 bp, Homo sapiens
  misc_feature (866)..(866): n is a, c, g, or t
gatttttctcaatggtgatttgccgacagaagcataggtgtcgatgaaaactatcccctgataagtcgcaatatgggagaggagtagattcattggtcaacattgtctgttcattggcatctacgtagatttcggggacatgttgatgcagtagcgtggtacatcatgatgtattaaagtgcggtggctattcgtatgaaaatgacacgcagttgaaaaaagtttgtaagaacggagtgcttgttgaggagtgggtaaagggtgcatccgtttcaaatggtaattgtcccatagtgggaattcctatgttgtaattaaagaaacttgggcaaacatggcttgggggacgacggttagaaaacccgatttgagttaaattctacgtcaattatcggaggtaattgcatacactgtgatggaggacactagtgtttgatgaaactcaaaggtctaaacgcttcaccctaaagtgtttgaaatcattaactccaaattgggattggcgcgcccgaaggggtaccaacgatcaaggaatcatttatgatacgaaaagtagattcaattgttattttcaccgtaagagggatagctatacgttaccaaggagtcttttggaatctcggggacgatggtctcctcatttgatttatgttaattggacttggacttgcgggtgggataaggggatccgaaaactattttggaattaaagcttagggggtaaattcatccttctaggatttgaaaagtttgtggcggccagggaggtcctcggtgagagggaagagccaaattgggcttctgcttatccgtttggggcttttctatagcgaagtagcaatggggtgtgttggttaggaaaagan

SEQ ID NO: 697244 - DNA, 158 bp, Homo sapiens
catgccgtatgaccgtgtgcaagtgccttctcctgatttgggcatctgtcttcttgctctgtaacatcaatggggctgggcgtggatgatctctcatgcgtcttccaaccgtctatggtctaatgacggacttccccactccagcactgcctcaaact

SEQ ID NO: 697245 - DNA, 993 bp, Homo sapiens
  misc_feature (195)..(195): n is a, c, g, or t
gtgcgccggcgcacccactgagggtctgaacgatcaccggcctgggatgatgagcactgtcctgggcatcgatgaagatcccacaatattgaaggcctcgacccccagtgatgacggggacccgacggaacatgcccggtcggtgggtcctctcgtgcgaaacatacacaaagaagtggcatccactatgaaatnatgagaggcgatcagaatgatcggaagacacaaggactggaacaaagcagatgtggggtgagacaggtgtccgaagatctatgggtcagacagaagtgctgctaaacacgcagcgagaggaggacgtgggacgaggaactgctgtatactcatggacaatgcccccggtgggcaacacgaaactatctgtcatacattatgcgatagcgggatctcttcaacacccaatccagagagattcatccctgaagtatgcattcaggaaagccacacaggagggtaatttccgacctatgttgttcatggaactcgctacaaaaggaaatggaaggtggactatggctgcgacttgcacaagccaaatcaatcaggccgtggggccacaattttttaactccagatctcagtggagaccaggagcacttctgattcaccaggaccagtctcagacctataccggacaacggcaagttcttagagaacctcaactcgacaacacgtgtgccacaaggctagtcctcagaggcgatgacgtcgggcacgacgatgactatacaatgggaggtccatatcaagggggacgggtaagagaaaccacgtggaggaagacaaccatcgcacgcacgagactggacgagaacacacaacaacaaaccaatacaggagccaccggcacgtacaaacgcagcgagacagaacagatacaaagcacaaagggacaacccacatacacaacagagccacaacgacggaagcacacaaagcagacaacaaacgacacaacgcagaacaaagcaa

SEQ ID NO: 697246 - DNA, 561 bp, Homo sapiens
gattcctgaagctgacagcattcgggccgagatgtctcgctccgtggccttagctgtgctcgcgcgtgactctctctttctgcgcctggagggctatccgagacgatacatccgaaagattcaggtttactcactgtcatccacgcaggaagaactggcaagagtcaaaatttccctggaattgcatatgtgtctggagtctcatccatccgacattgaagttgacttacgtgaacgaatggcagagcagacagttgagaaagtggagcagttcagacgttgtcttatcagcaaggacgtggtcgttgtctactcgtcttgtactacactgaagttcaccgcccatcgtgaagatcagatgagtatgcctgccgtgtgaaccatgtgactttgtcacagcccaagatagttaagtgggatcgagacatgtaagcagcatcatggaggtttgaagatgccgccattggattggatgaattccaaattctgcttgcttgctttgtaatattgatatgcttatacacttacactttatgcacaaaagtgtagggttataataat

SEQ ID NO: 697247 - DNA, 110 bp, Homo sapiens
gactttaaactggtattttttcttttgaatctcgctcagccctcacctctggtatccattgttcctcatctaattcttttcgagcctctgcccccttctgtcgtcttctc

SEQ ID NO: 697248 - DNA, 199 bp, Homo sapiens
tgacctcctcaagcctcccaaagtgctgggattacaggcatgagcacatgagcctggccctagcccacatgcttttataacaaacctttttcgtattgtggtaaaatatacataacaaagacttactgtttaaccagttatttatttgtttgtttatttgtttttgtagagacggggtctcaccatgttgcccgggaca

SEQ ID NO: 697249 - DNA, 228 bp, Homo sapiens
atagccctgctacagctgactctattggtccttacaatcatttctctactgtaagtcgcttagagtgcaactttcgcttaactagtacttagactgtatctattagtgtcctacagcaggagatgaagatttaaactatcacttcctgtatccctatcttcccaatatagttacatcatagtcaatgtttacttccttctgaccatgtaaactctgttcatagctgag

SEQ ID NO: 697250 - DNA, 108 bp, Homo sapiens
ttctatctgctacgacttacccactttacaggaacactcttggttcggtggttacaactaacaaaaatggccgcctgctcattggtacctcacaaatctgacactcac

SEQ ID NO: 697251 - DNA, 125 bp, Homo sapiens
ggagcataacacagagctagtcgtccaacccagcagtcgtctttgtcacccgaaagaaccgccaagtgtgtgccacccgagagaagaaatgggttcgggagtacatcaactcttatggagataga

SEQ ID NO: 697252 - DNA, 238 bp, Homo sapiens
  misc_feature (147)..(147): n is a, c, g, or t
ttgggtggattgcttgaagtccaggagtaggggactagtctaggtaacatgatgaaaccctgtgtctacaaaaaatacaaaaaaattaaataggcatggtagtgcgtgtctgtagtcgcagctactcaggagactgaagtgggaganttgcctgaggcaccggagtgtcgaggctgcagtgagccatgattgtgccattgtactccagccttggcaatggcgtgagaccctgtcttta

SEQ ID NO: 697253 - DNA, 383 bp, Homo sapiens
tccccatttggtttggggatttttggttttggttaggtttagggttaccacaaagaggaatttatttttcagcagcctaaaactgttgtgttttttttatgggtttaaaaaccccctgtcattgataactccccttttcccttcccttttcccgggttggtgatcacttttttaagcctgtgtattcaagggggtttgtttcccccccgtttccagggggtcgaggcaaagggccggggcagcttttctttcagtcattgtttccccccctttaaaattcagacaaaaaaactttgctttaaaaattttatgtgtgggaaccccagtttctggctgcccttttcctggggatgtgttaattcctttattaatattgcagggga

SEQ ID NO: 697254 - DNA, 759 bp, Homo sapiens
ggtaacagctcccctcatcaattggttaccctgaagtatagttcatataggaatagctgcataaatgctgccttttcccctttatcacttttagaataatgagtcctgtgtaattttaaactgaagtaagtcagtatagagtgattctatacctgtggctttgaggtctagaataagagtgtttgctactaggagaaaggtgtttcggtttgtttggttttgtttggttgagacggagtctcgctctgtcacccaggctgagtgcagtggcgcagtctcagctcactgtaacctccacctcccgggttcaggggattctcctgcctcagcctcctgagtagctggtaatacacgcccggctaatttttgtattttaagtagagttggggttttactgtgttggccaggatggtctcgatctcctgacctcgtgatccgcctgcctcggctcccaaatgtgctgggattacaggcgtgggccacacgccggttgtttgttttttaaaagagatggggccgggtgagtggtcagcctattaatctctgtacttgtggaggcctagatgggcggatcaattaaccctcagggaattaaagacagtttgggaataatggggatacggggtctctacaaaaaaatagagacgaggagagagggtggagtgtggaagttggaggtgggaggatcacctggccagggagtcgaggctgtgtgggaatgattgggcatgaattcagtagggaagataagaccgttcg

SEQ ID NO: 697255 - DNA, 957 bp, Homo sapiens
ggagagagagagagaactagtctcgagttttatatattttttcttttttctggggccctaaggggggtcacgagggggggctctagggtcacccaaaaaaacgaacaggtacacaggaataacccgaacaacagacaataacgaagatagcaaccgaagaaaatgagaagtgagacaagaaagaaagaaacagacagaaacgacacagcaaccgtgaaaaacacaaacagggaccaaaacagacacacagacaacgcaataaggaaaaagaaaacacgaagaggcagcaaacagagagacacagacacacaacagacgactagagagagacagacacgcagcgacaacgacgagacgaggaaccgagacaaaggcacaagagacgaagcgacgaacgggggagaggaaggagaggggcgaccgagcggggagcgcaggccgtggcggcggcgcgggcaggagccggcggagaagggaagggagcacgcgggcgagggcgacgagaagcggcgggcagggcaggcggggggggggcgacagagggaggagggacagggcggagcgggagcgagaggggcgaagggcggggggggggtacgtgccggcgagcggagaaggtcgcaagtagcgtccgaagagacgagaaccgagggaagcaggacacacgggagagcacacagaggacgaaacaggtaacgacgcagcaagcgaacaacagggcacaggggcagaaaagcagcaggaacgaaacgcaataggagaaaatacgagaagaccccgcgagcgagcggaggaggagtcgagaggtagagctgcagccggtgaccggaagcggggtcgagacatgacgcgctagagccgacagcgacaggggacagcacaaggagcagagccgcgcgtgggaggcacacagaggaagagagccgagagccagacaccacgaggcaagatgccaat

SEQ ID NO: 697256 - DNA, 342 bp, Homo sapiens
tgaagaggtaggagccgatggagcccttctcgaacatcgcgcggtagttatcgcgcgtccagctggcgtcggggatcagcgcggtcgggctgcccaggtcggcgaagatagtctcgctcggcttgaagccggcggcgaacatgaacagcatcgggtaggcgaacacgacgccggccagcaccatcaacgcgacatgcagcagccgaccggccacccgcgcccattcggcggatcggctcatgatcccaacctttccacgaccttcttctgaccgaaggagaacagcagcacgaacaggaagaagaacagagtcatcgcggagccgtaggcaatgtcctgttc

SEQ ID NO: 697257 - DNA, 332 bp, Homo sapiens
ttcccatgaagatcgaaaaggggccctgcttccaatttcccttttccattccccgaggtactccaggggttaaaaaaatgcttttggtctgtgggtccagtgttgtttgtcatccctttaagggttccccctttcaagtgacaatcctttccttggccctgccatagggcagagcatgtttggcatagcagcctgacttttatgccctaatcttgagttggggaaatatatgccccggggtcaaaaagatgtttttatttttggcggtatataaaagaagtttttttgttttttttgttttcctttttggggcaataaagtttgttttggca

SEQ ID NO: 697258 - DNA, 320 bp, Homo sapiens
caaatgggacaattttaattcaaccacaagtcaaattgaaagaagttaaaagaatgtttatgcaaacacatgagaaaagaagggtgcctatgaaaatgggggttggggagagaattatgtggattaaaaaaagagggaaaagcaagggaaatttctggtaaaacataatggaggtgttagaaaatagcgtatttgtcccacttgtcctgtgtttaaaaaatattctttttttatttcccttaaaggtttagttttttaataacatttatatttttttgcttgtgattttcaatatatttttttccttgattttgttccaa

SEQ ID NO: 697259 - DNA, 204 bp, Homo sapiens
tgagattatcgattacagaacaggctcctctagagcgataggaaacactgccaggacctttgagttttaagctgtgactcgtagtgttctgtcagagcagatctgatgatttaactgtcgaggcttaccgctaagcatagcagtgtatctaatcccagcttgggactcagctatcgtgtgttcagatatgctaaagccactttc

SEQ ID NO: 697260 - DNA, 141 bp, Homo sapiens
tatagggggcctgactgcacccggttcttataggtctgttttttgagattagacccttcatcatattcttcttcttcttcttcctcttctttcttctccaatcccgtgatgaggctgaagctttggtacatcatccactgt

SEQ ID NO: 697261 - DNA, 374 bp, Homo sapiens
ctgaggaatgtgtgcatatggcaatacaaatattcatagcgctatgcgtgtctgtgaatgaccatacaaatggtgatacaaatactgatttaggagttataaatcatttaattttaatattagaaacagaacctcactcttgagaccaggatgactgaagtagaagaggaataatctcggatacacctgaagtctcagccatccgtgggtcaggcatatctccgtgcctcagcctcctcagatagctgggacatacaggcgcccatcaccacgccgggctatattttttccgtgcatttttaagataaacgagtgggtttcaccatgtgtacgccaggagggactcgatctccgtgacctcgagatccgccgtg

SEQ ID NO: 697262 - DNA, 451 bp, Homo sapiens
ctgtaagtcaacatatacgccgttgatcggcaatggtaactgtgcagaatagtggatgctgacgcatacgctactggtgctggctgggccatgggccaagaatccgtgcgtggaacctctgagcatcctattcataacgatgcttcatctctctaacccacttgtgaggctcagcacgcgctctggagcacatcgttctcgctgaccaactgctgtgtctgccggtgtcaggcttacattgccttatcatcggtggtatgctgtgcttgccaccggatcctacgcgtgacgtccgatgtgtacctcccgagctgagctgaattctgtgacgactcgtatcggcgacgactgcgactgtgccgtgatgttctacgggtgccaagctggacgaccaccgtacgcacctgtctatacgcagacgtcgccggatgtgtcttgatatgccaggacg

SEQ ID NO: 697263 - DNA, 1047 bp, Homo sapiens
ggtttgtcttgtgggtagtatgatcggtgtggccgtggtatcaagtttctgatctgtggtggtcctcgggtccccttgaatttggttttcatgataatcgcttccaactgttctttgtagcctgcttgaagaattaatcgaacgtagggagcaattgccacaagatgtgacgtgttgtaggaagcaccaggctagtgtgttggtaggctagtgtctgtcggccatattcggttgataaccaggagccttgcagtgcagaaaattcattaatctggaacgttctttctgaatgttggcatgatctaatagctacgagcaccatgtggggagttcctcctctggacagaagcctggagcccagtgctgcacttgagaccgcgttgggggatctgtatgggtttggcgttaccccgccattggccgccatcaagtgcacgccagatgatatttgctctgctaaaaggcctccttcagtgagcaaggcatcaacgagatttctcagggtagctctcttttggcgcgtggctccacggcacctgtatggaggcggggctttccctactcatcgtttgagagagagtccttgggacggcacgggatggctgagcttcccgtggtggatgactacttgacctcagtgatgtggagcattgatgacttagggaaagatgagttgtgagagccacaacagaggcttcagaccattatcgttttacttgggagccagtggatttgttccagcagatgaagggacattctctacactcagatgactctatccagtggcctctttgaagctcaagagagtagtagcttgtattggtcactttgagaaacactgcaacagtgaacttttgcatctcagagaattaacagtgctaaattctatgaagttgttgtagaccggtgaattgagtcgtattctgtcacagtaacacttatgaagaaaagcttggactagtcgaaacatttttctctctgactgctgcttgaatgttcaatggaggctgtttcttatgtatgggttttaccaactgtgtcccttaa

SEQ ID NO: 697264 - DNA, 245 bp, Homo sapiens
  misc_feature (23)..(23): n is a, c, g, or t
  misc_feature (60)..(60): n is a, c, g, or t
  misc_feature (224)..(224): n is a, c, g, or t
ctctggccatgtagacaaatttnctgacttcatggtgaaagacgtaaaaaatggagaatnttttcgtgctgaccatctattaaaagctcatttacagaaattgatgtctgataagaagtgttctgtcgaaaagaaatcagaaatggaaagtgttttggcccagcttgataactatggacagcaagaacttgcggatctttttgtgtactataatgtaaaatctnccattactggaaatgatctat

SEQ ID NO: 697265 - DNA, 406 bp, Homo sapiens
agattgcaggaattgttcttaataatggcagatcaaactacacatgggggaatttgcacgttttgataaggccaagctgaagatatcggtgtcgcaggatatgtaccccctcccgtccaaaggctccattgagcaggagaaggggagtgtattttcttatgttcgtggagttttcctacccccgtcctttttaaagccccatttgtaatgtggaggaagagccccctgcaagatggacacgagccccaagttgcattgtgaacttgggcattccgcgcatatgccaccggcctgtgggtttttgaagggccccccccccaatcggactgccaaattttccggtttgccccgggatattatagaaaattatttgtatgaataatgaaaataaaacccccctcgtggc

SEQ ID NO: 697266 - DNA, 418 bp, Homo sapiens
agcatcgaggagcagctgtggtggctatcagccacaggggcagcagccacaataggcagatggatcagcacaatgaatggccgttgaccttttcagctagtgggaaggtgtaatccgtctctacagacaaggccaggactcgtttgtacccatcgtataatagaatgaggttctggtgcaacagttgggtagccaatctgcagacagacactggcaacattgcggacaccctccaggaagcgagaatgcagagtttcctctgtgatatcaagcacttcagggttgtagatgctgccattgtcgaacacctgctggatgaccagcccaaaggagaagggggagatgttgagcatgttcagcagcgtggcttcgctggctcccactttgtctccagtcttgatcagctgcacatcactca

SEQ ID NO: 697267 - DNA, 372 bp, Homo sapiens
catgtctcgatcccagtagacggtcttgggctcggccatactggcatgcttaactctgcaggcgtatgtatcagtctcagtgggggtgaattcagtgtgagccaggaattagaagacccagtccttgtcaaaggacatatctgacatctccactttaggaatttttttcccgttcttcagcatttggatttcaatgtgaggcgggtggaactgtgttacgtagcagttcagtatgttcggcttcccattctccggtgggtggcgtgagtatacttgaatttgaggggttttctggatagcatacaggccggtcagtgagacaagcaccagaaagaccagggtcaccgagcgagccatgctgacgactgaagc

SEQ ID NO: 697268 - DNA, 345 bp, Homo sapiens
acggttgcgagaagacgacagaattcataggaggggttacttctacttctcaaagctgggttcaggtggccatttgttttcgtccttggtgtttctgaatgtgcccatgtgcctttccttaccctttttttgggcgtgagtgtgtggttgcatccagctggctttgccttcaacatctcaaaggtgtcttcacttattgtcctttgtgtctgcttggcatatctgtcacatgcctttagttgcatctcaagaatgtacttcactattcgaaaggcgatcatattgagaaattttaatagaattaaatatctaaaagcattatgtctcaccagttgagtctaagaa

SEQ ID NO: 697269 - DNA, 376 bp, Homo sapiens
  misc_feature (71)..(71): n is a, c, g, or t
  misc_feature (83)..(83): n is a, c, g, or t
  misc_feature (89)..(89): n is a, c, g, or t
  misc_feature (97)..(97): n is a, c, g, or t
  misc_feature (168)..(168): n is a, c, g, or t
  misc_feature (209)..(209): n is a, c, g, or t
  misc_feature (235)..(235): n is a, c, g, or t
  misc_feature (259)..(259): n is a, c, g, or t
  misc_feature (299)..(300): n is a, c, g, or t
  misc_feature (303)..(303): n is a, c, g, or t
cagctgtgtactgctggaagcttgtgcactgtgctcgccaggcccgtgacgctcctacagggactatgcgnaattgtggtcanatattnaggagttnatgcgaacatatcatacacagtacggagctgcctgtggactgggcaccccatcttccacactgtctgaggntgagaagcagcagcaggcagggcagctcagcctggtaccancccatgtgtaggcagaccaagccctngaggctctggaaccaggagcagangggcagcaatgtttggggacagtgactgcactggcacctnnagnatgacttggagagggtgggacagagggtcctgtgacccatggagcagtggccgtggcctgcagggccaaccaa

SEQ ID NO: 697270 - DNA, 133 bp, Homo sapiens
acttagcaggtggggcagcagcagcaatctcttctcccaaccatccaaccatctgggtcagcattgaactcttcaatctctgcactcaaagctgttaagatagttaagcgtgcataagtgcccgccaatcgaa

SEQ ID NO: 697271 - DNA, 963 bp, Homo sapiens
  misc_feature (298)..(298): n is a, c, g, or t
gatccctcaacccacacattgaatgtattgttccctgagagcaattgtagatagaggagtgggtgggaagtctgaagtcagggcattgtttctgcgtatctgaggaggctggtttttgatatgtgggagctagtggtcgttaacgcatttaccccctatttggtggactctggttcccccatcttaagtgctgagtcaggggcctaaccgggcagctttaactatttgtttgttgtaggtgctagaatagaagaccagaaaatgaaatggtggagtttgaggctggatagacagtttngaaaggtaagtattgaaaaacacttgaatttgggtcagtacaaagggacatgcagagactttgaatcatcaaaactccagcatgcattgtcttacggatgtttagataggtgtgtttggacaacactctgggttcttgtaatgatgttgatcaaatgtctgagctgaaaataacttgtagacaatttttaacactgaagaaccttgtggaggcaactaagaatagtcgaatgatgtttagcatatttgtaagaggtattttcttttaattctagttaactggttgcatgcttgttcatttggctggcttgcttgggtaagaagccattgggggccttgaattccctccagtcatttgcagtatttactgcatacatttagcttttgaacatgcatgtgctaccatcagtactaaatggtgccttaaatttttttcaggtacaaataatggtttgaataaagaaaggtattaatgggtcacctcaagtgaaggcactgcaaacacaatgattggtcattctgaatttccggtccttcattctgaatttcaaaggctcctgtgacaagtggacatgcagtgactgcacctttgtttctgaggtgcctggatggaggctcaaatagaagatggtgtcagatatattgtgttaaaattttaccattaaa

SEQ ID NO: 697272 - DNA, 874 bp, Homo sapiens
  misc_feature (768)..(768): n is a, c, g, or t
  misc_feature (770)..(770): n is a, c, g, or t
  misc_feature (773)..(773): n is a, c, g, or t
  misc_feature (775)..(775): n is a, c, g, or t
  misc_feature (778)..(778): n is a, c, g, or t
  misc_feature (783)..(783): n is a, c, g, or t
  misc_feature (785)..(785): n is a, c, g, or t
aatacactatccccatgataagcataacttgcattccatttcctctaataagggtgtctccacagtggattaaatgcctcagccagatgcacaatagactagtcatcattttcacaagctccagttaaaccacacgagtaagggcataggaggtcaaagggggctgctgatgatgaagaaaccgggctgccaggaggaaggcaaataagagcaagagtgttttccactagtaggtcaccttacagatactgacatatctgtctcctggctaggcactccttcctctccaccactccaggaaagatggtccacccggtgtgggatccaaccacagcttacagacacaacaaaaacttcccgtgagagcttgagactgccgaaaacacatctagttttgctttattcttgctacttggaactacagcctgggaacagatacactgaattactgcgacagccagagagaaaatcatgaaataggaggagggaggaagaagagtcaactgggaaaagggaaaggaaattaaatgaacagagaatcaattatatgtgagcctgtctctgcttcatatgttatacaatttaagcaccaagtgtcattgtcctcatttcacatatgagttgacggaagcttagaaaagcctagcaacaggaccaaatgctttgactctactttgcaaactctttccacataatcatggcaggatccgcatgatcctgaactggagaaacaatatagtcaactaatgctctgtatgtgtctcagananacngntcngggtncnactggtacatgcaatgtacccacagacaggccatgaggcctaaatctgttcgatgtcgggctgcgagatggtgatgccggaaggtccag

SEQ ID NO: 697273 - DNA, 1048 bp, Homo sapiens
  misc_feature (383)..(383): n is a, c, g, or t
tgagcaggaatggcagtgtggacctctgtgatgggacatcttggtgggatctcacagccagttctgtggcaaaggaggatgaaggcttacgaggtgagtactgaatagtaatgagaagttaggttgaaaggacagtgccacaatgatgacatcatatttgctactcttgacagctggggtgacgatagctttaaaccaccatgattataactgaggcacacaaaataatgatttgggggctacttacagagtaagcagtttttacataaagattccccccccccaggactcgtcaggaagctggataacagagcgagcgcaatgtgctagaatagaagaccagaaaatgaaatggtggagtttgaggctggatagacagtttngaaaggtaagtattgaaaaacacttgaatttgggtcagtacaaagggacatgcagagactttgaatcatcaaaactccagcatgcattgtcttacggatgtttagataggtgtgtttggacaacactctgggttcttgtaatgatgttgatcaaatgtctgagctgaaaataacttgtagacaatttttaacactgaagaaccttgtggaggcaactaagaatagtcgaatgatgtttagcatatttgtaagaggtattttcttttaattctagttaactggttgcatgcttgttcatttggctggcttgcttgggtaagaagccattgggggccttgaattccctccagtcatttgcagtatttactgcatacatttagcttttgaacatgcatgtgctaccatcagtactaaatggtgccttaaatttttttcaggtacaaataatggtttgaataaagaaaggtattaatgggtcacctcaagtgaaggcactgcaaacacaatgattggtcattctgaatttccggtccttcattctgaatttcaaaggctcctgtgacaagtggacatgcagtgactgcacctttgtttctgaggtgcctggatggaggctcaaatagaagatggtgtcagatatattgtgttaaaattttaccattaaa

SEQ ID NO: 697274 - DNA, 615 bp, Homo sapiens
  misc_feature (509)..(509): n is a, c, g, or t
  misc_feature (511)..(511): n is a, c, g, or t
  misc_feature (514)..(514): n is a, c, g, or t
  misc_feature (516)..(516): n is a, c, g, or t
  misc_feature (519)..(519): n is a, c, g, or t
  misc_feature (524)..(524): n is a, c, g, or t
  misc_feature (526)..(526): n is a, c, g, or t
tgagcctgtctctgcttcatatgttatacaatttaagcaccaagtgtcattgtcctcatttcacatatgagttgacggaagtttagaaaagcccagcaacaggaccaaatgctttgactgtacttggcaaactctttccacataatcatggcaggatccgcatgatctgggaacagatacactgaattactgcgacagccagagagaaaatcatgaaataggaggagggaggaagaagagtcaactgggaaaagggaaaggaaattaaatgaacagagaatcaattatatgtgagcctgtctctgcttcatatgttatacaatttaagcaccaagtgtcattgtcctcatttcacatatgagttgacggaagcttagaaaagcctagcaacaggaccaaatgctttgactctactttgcaaactctttccacataatcatggcaggatccgcatgatcctgaactggagaaacaatatagtcaactaatgctctgtatgtgtctcagananacngntcngggtncnactggtacatgcaatgtacccacagacaggccatgaggcctaaatctgttcgatgtcgggctgcgagatggtgatgccggaaggtccag

SEQ ID NO: 697275 - DNA, 518 bp, Homo sapiens
  misc_feature (153)..(153): n is a, c, g, or t
  misc_feature (336)..(336): n is a, c, g, or t
  misc_feature (363)..(363): n is a, c, g, or t
  misc_feature (390)..(390): n is a, c, g, or t
gtcagcatctattccatctaatgtgatacactgtgtgtgttacctagagaaaatgctgtagatccacacatttgacagaaatgtttatcgatgccataacgtgatgcatttctttccggtgttgttttttgtttatatttttaggaaattttncctaccatcacagatttgttctttaataagcaaactattatttaatctagattttgttttaaaattatcaagtgttagcttttacaaataagaggcttataatgtggccagatattcttagaattcttttaggtctaagtgttttcaaaactttaagaaatacattctattgcaccatttaanatgtttcctttaagttttattaagtcncgagaagttattttttcattgaatccnagtgaattatggatatgtattatcttttatatgaatgtaatagcttgctttcagttcctcacaggtcattgaattatttaaccaatgaaaacattctctgttacttccaagaaatatgtttatcaaaa

SEQ ID NO: 697276 - DNA, 386 bp, Homo sapiens
ttcgtgacagttagactctagaggagtcgtcactacgaaaccccctctataatgtcatgctccaggattaacctggcccatgtgctcatgtgttcatacggttccggtgtggaaaacacgctcgtgaaaaagcagtgagtcctgcaatagggaagcccagagaaggcaccctctgacccttaggcttgaccctgtagcactaccagccttgccctcttcagtctcatcacaactgtgacttaacagttacttgaggaaggagttggtgcattcgccacccgggcctggggatccaggaggacaggccctggatgtagcttttctttcagctgtgttctgcgcctcgaatattatggcttggcattgccaggcagcctgttcagccc

SEQ ID NO: 697277 - DNA, 657 bp, Homo sapiens
  misc_feature (7)..(7): n is a, c, g, or t
  misc_feature (66)..(66): n is a, c, g, or t
  misc_feature (68)..(68): n is a, c, g, or t
  misc_feature (70)..(70): n is a, c, g, or t
  misc_feature (92)..(92): n is a, c, g, or t
  misc_feature (155)..(157): n is a, c, g, or t
  misc_feature (166)..(167): n is a, c, g, or t
  misc_feature (172)..(172): n is a, c, g, or t
  misc_feature (175)..(175): n is a, c, g, or t
  misc_feature (180)..(180): n is a, c, g, or t
  misc_feature (300)..(300): n is a, c, g, or t
  misc_feature (308)..(308): n is a, c, g, or t
  misc_feature (310)..(311): n is a, c, g, or t
  misc_feature (315)..(316): n is a, c, g, or t
  misc_feature (340)..(340): n is a, c, g, or t
  misc_feature (352)..(352): n is a, c, g, or t
  misc_feature (383)..(383): n is a, c, g, or t
  misc_feature (386)..(387): n is a, c, g, or t
  misc_feature (395)..(395): n is a, c, g, or t
  misc_feature (398)..(398): n is a, c, g, or t
  misc_feature (431)..(431): n is a, c, g, or t
  misc_feature (440)..(440): n is a, c, g, or t
  misc_feature (647)..(647): n is a, c, g, or t
aacagtnaagtttaagtaaaacccattgcacagactgttcctttcatcacagacacaaagaaggtnananttagatgctatcaaggaactanccaatcttggaccaagcgtacatgctcccttccttcttactccatggtagagactgctccatnnncctctcctnnacctnttnccacngggagatttaggaggccatccaaggagtgactgagccttggccctcttccatggctacaggaatattgttcctgcaggtactatccagatttcagctctagatgtaactgaaaaaacctnaaactctncnnccanncatctaaggcttatagtgcttganttctgatggggnacaactgcagcgaacagcaccagggaagctngannatgctcantangtgactcgcatcttttctcactcgcccactttntccaacttnggatggcaggccagctgcaccattgggggtggcccacaaagcagtaccagcacatcatcccctggagcgggcaggtgttcccggatcatgtcggcagtcacaaagcccttgctgtaggcccaatcttttgggggatgatccagagtgaaccagagcttaaagcgattggggatagcgggcctgcagttcctctaagtcctcccgcangatgatatcc

SEQ ID NO: 697278 - DNA, 113 bp, Homo sapiens
ctgcggctagacgattagatgtgcgacagggatcgatgttattaaacaagctcggagcccggggtgtgacgcgatgtgttctgcagtgtctgatgtcaagtgagaatcatgag

SEQ ID NO: 697279 - DNA, 181 bp, Homo sapiens
  misc_feature (147)..(147): n is a, c, g, or t
cctggaaggttgaggctgcagtcagctgtgatagcactactaaactccagccttggacaacagatggagaccagtcctagctactcaggaggctcaggtaggaggatccttaagccaggagttcaaggctgcagtgagctgtgatangcctactgtagtcaagcctgggtgacagggtgag

SEQ ID NO: 697280 - DNA, 1118 bp, Homo sapiens
tgtgaccccctggcttcgtgcatgtattgccgtcgcatgacctgtggtgcccgtggtttctccattgcttccacatagggctctggatggggtcctgttgccaattgccccgggaaagaccgttggccaccaaaggtgcgcgcctactgcgcatgtgaggtttccccgaccgtgggatggtactatcggcctgtattatcaccaatgtgtgtctcaaccccctcctgtgtcggcgtccagggatatatacgacatcccgacgtaattggtggactcccttcggtcgcctgtgtatatccaatgcgccaacgggtgtgacccaccatatcccgggtgtcggagtttccgggtccccgctaccagtgtggtccaactcactttggcggttgtcgactggagtttgcctacctgcggagaccctagatataaggggaccattgggctctttcgccggaataggccccgagcccctaacgtacttgtgctccgaggtcccgctattgattgtggatatcccactctggttcctactgggccttgagccagcgttttgggctgggttctaactcgttatcgtacagccgctatcaatctcgatctcttagatccctagtccttcgcaagctctgagccgcgggctctttgctgctagaacagtatgcctcgctgatgcgaggccctagcactacgatgcgcgaggccaaccatacctagcccctggcaccctggcgcgcttgagcgctattgtcatgctttcacgtccaactgttttgcatgtgaccatactacggagaggaacagggcctcgcggactgttctcgctcagatccgctcagctcacccattgtcctccatgtccttcacgcccacctaaataggcccagagaggtccctggagcaacgctgcttgcggaccctaggcttcatccctatgctaaggatagtccacgcaggagcccggtgctaggggaagcatccaccaggcactgactgagcggacaggggagcacggcccgtgggtttgattgtacctactctgttccactggttctaagacgcagagcgttctcacatctcaatcaggatgcttctctccatataccaccgggggtccatga

SEQ ID NO: 697281 - DNA, 447 bp, Homo sapiens
  misc_feature (35)..(35): n is a, c, g, or t
  misc_feature (297)..(297): n is a, c, g, or t
tatgatatttcagtctgtgtccccacccaaatctncatgtgatgtcatcctcaatgctggaggttgggcctggtgggaggtgattgggtgatgggggtgctttctaatggtttagcaccatctccctagtgctgttcttgtgatgagttctcgtgacatctagttgtttaaaagtgtatggtacctctcccatctctcttttccacctgctccagccatgtgaagttctggctccccatttgccttctggcatgactgtaagtttcctgaggcctccccagaagacaagcagattgncagcatcatgcttcctgtacagcttgtggaagtgtgaaccaattaaactctttttctttgtaaattacccagtatcaggtatttttttacagcagtgcaagaatggactaatacagaaaatcggtaccgaggagtgggggaccaggaact

SEQ ID NO: 697282 - DNA, 891 bp, Homo sapiens
gtaaatttcagaatgtgtctctggtacagaatagttgatattaacagaaaaaaaaaaaatctgtagcttcatgaatatgccactctgttaatttcttgttccagacattttaatagagatgggcttgagccatgtggtttgaattgctgccaatagcagaccatatccctatcatgttggtgggctcaactgttttttttttttcccttaattagagatggagttatcgctgtgttgtgctcaggcggggctcttgaactccgtgggctcaagctatcctccgtgcctcggcctcccaaagtacggggattataggtgtgagctactgtgtacccagccttaaccgtgtttccacagttgatatatactctcagtgcgtgtttccagcagggtattataaggggattaaaagttggggttgcatgcctgtaatcccagcatttggggaggccgaggatgggcggatcacgaggtcaggagatcgagaccatcgctgactaaacacagtgaaaccccgtctctaataaaaatacgaaaaattagccaggcgtggttggcgggcgctgtaatcccagctactcgggaagctgaggccggagaatggtgtgaacccatgtgagcccgagatcgtgccattgcacttccaagctgggcaacagagtggagaacttcggttctccaaaaaacacacacaaccgtgggggtgcgcagacaacaatggcggaaaatccacaaaatgtcaattttaaaacacagaaaggcaagggctgcggcaaatcaaacttccactttatttcaggaaaaacagagagaaaaagaaaaagcagaacaaaacaaacaaaagcagcacaaaacaaagcaaaccaaaaaaaagggcggggtcaaaacaag

SEQ ID NO: 697283 - DNA, 128 bp, Homo sapiens
cctgtccccttgaaaccttgagtaccattttccagttggtgatcaaaggcaaccccccacattggtttgatcgtgggtttgttcagtgcgtatgtaacgccgcatgttgggaaccctggttccttcaa

SEQ ID NO: 697284 - DNA, 941 bp, Homo sapiens
  misc_feature (267)..(267): n is a, c, g, or t
taatagcatatcgagatatatcgctggccgtgtacgtcgatgtcgaggcgagaatggtgttttctgcgacgccaccatggtttggttcgcgcatcgatggtcttgggcccccgggtgcccagcaatggggacgggccacaggcgggttagagtaccgggcaaggtgcgaacacgcgttgtggagaaggccctttacattgaaagtcttcctttatagggagttctcctcgaaggccttaggacgggttgggtccggtgacgttaagncagtggtatgaagtggtaaaaaggttcgtactttcaaggcacacagctttggaaacgttgttttacctggaccattgtttcttttcttttttaaggagaaaaagaaatgagttaaaggagctccacacttgacttgatttcatacccaagcctctgatgaccggccctgacctgtagagtggtccgaactgtgtggttggtttgagggagcgaattcggggagaggcacttggtgatataactcttgttttgtttaccgagtacctgctcgggcccggtaaatgctattggaatgtaatcccgtagtgtgtaatataaattccaccactatccaaccacagccaccactaattgtatgaaacttttatatcctaatttaaaagctgtgaaaatagttttcacgcactccaacccgattgtttataaagtttaaaccatttatgctcttatttaaagaagagctttgagctatttttttctgtaccctgtaaaatattgaaactaacataatatgttgaggttgcttgggaatgtacattaaacttaaattttctgaggatcgtgtgtttatgtttgagaatctgtgttttaactttgtaagtaaattctctgcccttgtatttatattttaccaaaatttttcttaaaaggccataaaactgttgaggaaagga

SEQ ID NO: 697285 - DNA, 555 bp, Homo sapiens
ccatggttctcatatacccatgtctgtaaaaagtgacatgagaattttgttgggttacattttattgtatttattagattcgcttatatagatgacttaggcagaaataaagtcatgtctttagaaggtgaacaagccaacttgtgatggcctgccttttgcttttggcagttgggatgagaacaattgactctcccattggttgttagatagttgaaatggtgcgttggtggtcatacttagtgttctaggctgtgaaatcatggagttcttccacttccaacaatgactcatttgttgttgtattctagtacacaatttagcagcttgatgtgtccccattctgatttgatttctactaaagtgcccttgtgtacatttgttttgtgatttaccgaagtgccccttgagtgtataatgactcccccagttagttcatgtaatccttgctttgaccattgttttttatctgtgtttagtagtaactgtgagcagaatcaaatcccattatgccagtgttcggcatatccctttaattaagtacatgccttggac

SEQ ID NO: 697286 - DNA, 332 bp, Homo sapiens
gctccttcagttccaaaatatgtgaacatccaagcttccttagccactatgtaaagaagcaaatacagtttctgagtatggggcacttagcagaacctctaaattattcacacaagtagtaatggggagggatgtttctataaaccaaaaaataaaaaatggtgactcatggaccaaatctggcttgccaatgtgctttgaaagctgagcatttaaaaatatattttgaaatcccttttgcaggacatgttctcctgatttctataatcctgatacttccagtcctcatgacttttaacctaatcactttacacaagtatttgagttgcctg

SEQ ID NO: 697287 - DNA, 161 bp, Homo sapiens
ctgtaggttgagacttacatcatgacagtgctgctgtggccgtgtgatggaagagcttttaggtctgtggtgtagtgtgtgtaacgggtaaagcttcatttctgcagtgctgtgtttcatgttgggactgaggggtctgtcggaagatctcccccaatgtg

SEQ ID NO: 697288 - DNA, 838 bp, Homo sapiens
  misc_feature (529)..(529): n is a, c, g, or t
  misc_feature (616)..(616): n is a, c, g, or t
agcggtcaaggctgcagtgagccaagattgtgccattgcactccagcctgggtgacagagtgagactctgtctcaaaaaaaaaaaaaaaaaaaaaaaaaaaaaaaaaaagggaaaacttacttacgcccgggttaccctgtgaacacaagcgttcgtgatgtggcattcactttaaattaccttcttgagaccaccccagtgtggactgagctcaagatttcccaaacagcttagttagaaaaacagagtgggttccgtgagacgtgctaaccacagattccaggcaagaacaaggaatttatttaccattagggactgaattaacctgattagaagggatgacttatggggttcccgtttaaaattattggctgattcgcctttagcggctccatattttcctgggattattaagggaaccccttttctcttttctctctgaaggcttattcttattaccttcacaacaattttaagggaagacttattgttttggtaacccggaaattaaacccctttattcttttnttcctcccccggttttacttccctccagaatttcaaaacactctatatttattttaaatttccatgggcaaatatagttactcggancaaaggttccaagtgagttcgtgccttcatagcttggaaacctttcccttattgcaacccaagggctttggactgggaaatgcccacttttgaaacattttcccttttaactccggcgtttgaccaaaatactttctaagatcaccagttgactttttatgacccaacgcttacagccctcttagggaaacgggcctggggacctggctacagagttcccag

SEQ ID NO: 697289 - DNA, 130 bp, Homo sapiens
gagatcgcgccactgcactccagcctgggtgacagagcaagactccatctcaaaaacaaacaaacaaaaaactagcgggtgaaatgattcagtgacctaaggacagccattgcactccgggggtaccgag

SEQ ID NO: 697290 - DNA, 291 bp, Homo sapiens
caggagggcatggggcctaggcctgaccactttggccccctgctggagcgaccaggacagtgtgctctctcctagggccagggtcagggcagagggcctcctccctcagtgtcaaggtctagggagcagtggggagaatctgccccaggatgtggccaccgaaggaacaggagtgtgggccagaggtcatcggggcccatggccacatccttcaggctctaagtctcaatgggcattgcatctggtctttgcagttctgtgagccaataaattctttttatagtttaaaaa

SEQ ID NO: 697291 - DNA, 190 bp, Homo sapiens
tttataccaagcatactatagcaaggactaacccctatacctactgctagtatgaagttatctagataatactttgcaaggagatccaaagctatgatccccgataccagactagctaccttagaatcagctagaacagcacacccgtctatatcgcatattagtgagaagattatagtgtagaggccac

SEQ ID NO: 697292 - DNA, 277 bp, Homo sapiens
aaagtttacaatttttttaatttactaaaattttatttaggattttagcatccttgtataaaagggccaaaactcccctactgctagtaagtaaaaagggggcctttctaatccacagacataaagtttcagtcaagtgaaatgggcaagcccaaaaaatttgctgtacagcattgtccctataggccccaataatgttttaaacccttaaaaatttaaaagggtaaaatttcctttaagtgtttttcccccaataaaataaaatataaaaaatcca

SEQ ID NO: 697293 - DNA, 444 bp, Homo sapiens
gttacagcctttctcaccctgatctgaccacacagcccttgcttctcagaacagcaatttctagttcatgggtgtagtcttccacaaaactctgtgaagggcaggggttcttggcctgaggtcagtggaagaccctgcaaggagcccaagaactgagatagccaagaaaaaaacgacagcttttcttgttctcaagctgacgtttgacatttccttccagttatgcatgttgtcaacagaccacattagtattagcaaaacctgtgactgttaccaatttaatcacagatactttcctcctatcacattaccactgttgcagatctctcaaaatagcataatttatgctcaccactgcttcaacattatgatagtgcttagacccactgcgagaactccctaattaatgccttaataaagaagcatgtgtgttgccaaattaaa

SEQ ID NO: 697294 - DNA, 229 bp, Homo sapiens
ccccccttccccaaagccatccctgcattgatatgtcttggctctcccgggtacttttgcccccccccttaatttttaattgggtttcttgtaaaaacagttttggacaatgttatctctgtgggaggaaggaggcaggctgtggtggggctgggtaggggatagtatccctcctgagttcccctgctctagaatctaacccgaaatagaaacctagtttttaaggtga

SEQ ID NO: 697295 - DNA, 229 bp, Homo sapiens
agtggcgtgatcttgcgcttactgccaagctgctgcctccgtgtagttcgtgcgatcctcctgcctcagtctccctagtagctcggattaccagcgtgtggtaccataatcagctgatttttgtatttttagctagatgaccgggttttaccattgttggccagggcgtgatgagcttcacaccgtgtcatcccggccacttttgggaggctgcaggcggttgccctca

SEQ ID NO: 697296 - DNA, 1175 bp, Homo sapiens
  misc_feature (1175)..(1175): n is a, c, g, or t
gagcgtgcctctcgcccgagtggtggtaaacaaggaccgtggagtactggaccgtgcagtgtatggatgagccagtgaagagccctggatcctgtcgtagtaccatgcctggaccgtcgtgtgagcggatagctaacttgtcgtggtctcaatgagagtcacgagtgaaaggcgactggagaagtctctatgacacattagtgtcgcctgtccactaaaagcgaggagggaatgccagaagtaccgtacatgtaattcccctgtacatcgccacgagagagtaggagatgccttaattgatcacaaaaagacgaggggattcgccgaagaaccgcatcttacgctcttggtaccacggagcgatctgagtaaggggatacgcgcgctgttgagttgatcatatcgttgagccttgggtcggaatccgtctaagggccagttgtggtcctcactctggacttcacgagtggcgttgacgtaatgaaaatcgtcattaggtgtacacgcgtatatgtcgcccgtacggggggactcaacaatggtgtacctaggagtgtgcacatgggacgaaaacagatatcgtgcttgtgttgtattgcgttggagacggtctgggttgggcgcatcgtcagcttttcggtatgccacaccaatgatgacgcctgggtttctatctgggaaacattacgctcatgggctgttattataacccaagagctctttttttcctggtgtatagcaccttggtgcttggcttgatagcgccctatttttcgcggacccgcaagtattcgaggcagtagatggacaccggggtctggccgatgaagggtcacacggggcagtcacccttccttttgagagtgtccctcagataaaacctgcctggtgcttgcaacaccctgttccctcgagtggacagccggacatcacttggggagacacgcgtggcataatcaaatcatgggccccaccattcacactacgagcaaacgaggacccaatcatcttgattgagcagacacactcactatgacggccgaccgcgcacccccatgtaaatcactctcatcagacacgacaacgtctcaacacacggcggaccctcgtcttctctactttactgcgagttattatctatctactgttcatctaccacccacacaccaaccgcn

SEQ ID NO: 697297 - DNA, 816 bp, Homo sapiens
agaaaaatgaagccaaacagtagagttgcaagacatggctgtatgagaagaaaaagagctcgaagaaagcagagaaaggaaccgcaagaacagaatgaagaaagtcagggggactgaaaggcaatgtggtgctggcaaaaagtgagcgtggagattggatcacagccgaaggagtacaggtgctgcaatgatgttagctgtggccactggtggactttcgtcgcaagaagcattaagtaaactaaaaactttcataaaaaaaagaaaaaagagactaaagaatgagggggggcgattcataagaaattctaccctcccagagaggagcccaaacggtcacacgcggtgtcaccccacgccattcttggacccagccaccaggtgggcccccaaaatagaagcgagaccgcgatatgtgatacacgcgagaggcacgactgcgacccgcccctgcgttcgaaacaaacagaccaggacgactggggctaacacacgttgtctgaaaagcttggggagagaaatccctctgggcagaaaaaggagcaccatcattatacatccttgagagggggtggcagaccatataaacttgggcggaacaaaaaagaactccgttacaaactaaagacctttgtaaagggcgcactagaacgggggatagaaactctttagacacatctttttgcaacccgtgtgccttataaccggagaggtttagacaaccttagaacgtgacgtaatctcccatctgggcacgtcgtggcacaaagaatgtgtggcatatacgcagaggagatattagcattatatatcaca

SEQ ID NO: 697298 - DNA, 317 bp, Homo sapiens
gtcgacgaaaatatcatcctgagtgaggtaacccagtcacaaaagaacacacatggtatatactcactgctaagtggatatctgccaaaaagatgctaggaatacccacaatacaactcacagaccatatgaaatccaagaggaaagaagatcacaccaaagtgtggatgctacagttctacttagtagggagaagagaataatctctaggaagtagatgagatagggatctgcgagggagagaagagggggtggctaaaattggggttagatataggaggagataggggagaaatacagagcagagaaggtcgacg

SEQ ID NO: 697299 - DNA, 728 bp, Homo sapiens
gggctgcgacagcctgggttgccggcgcccgcccgcccgctggcctcgcggtgtgagagggaagcacccgtgcctgtggctggtggctggcgcctggaaggtccgcacacccgcccggcctgcgccgcttgcccgcggcagccgcgtccctgaaccgcggagtcgtgttttgttgttttgaccctgctgtggctgcctgtgtgtgcgctgctggcctgagtgccttgtgtcggctggtggctgtggtgctgtgtctgctggctgtgagtgcagagtgaagcagggatgcgtggagctcttgcttcgagtgcctgggctgcctgcctatgtgaacttgggccctgtgagccccctgcacctggccgcctgccctgcgtctttcgccgtgcatgcgccctcgctccgcgcagtcagcgagccccgtcgctgaatgtgcgagctagttttggcggccttcaggaccgcctgggtggagctgtcgccttgtcaccgaaccatagagccagtcagctatggacccagctgcaggggtcttgggccagtgattactgagcgaaccacttggagggtgaatgaacgaacagtaatctgcaggagacatggggctcctccggagtcaacaggattcaggtttcttgtcgtagattcttccttgggccattgggacaggtaaaagaaaacgcttgagaaatccttatgagaacgaatacatttccctacgctcagaa

SEQ ID NO: 697300 - DNA, 583 bp, Homo sapiens
  misc_feature (135)..(135): n is a, c, g, or t
  misc_feature (156)..(156): n is a, c, g, or t
  misc_feature (480)..(480): n is a, c, g, or t
  misc_feature (541)..(541): n is a, c, g, or t
  misc_feature (559)..(559): n is a, c, g, or t
  misc_feature (573)..(573): n is a, c, g, or t
cctgatctatcctggtgatggccccactggtcactgttgtctccagtccacgtgcccggctctttgcctgttttcttaggctgggcactcagcaggccggacccctccaattgcatacaggagcctgctgcacancaagaaccactatgaggtgcntggtacttggtgggggagctggagggatcaccatggccactcgaatgaagaggagagttggagcagagaatgtggccattgttgaacccagtgagaggcacttctaccagccaatctggacactagtgggcgcgggtgccaaagagttgtccttgtcagtccgttccacactgagtgtgattccatccggagtgcagtggattcaagatagagtggcggaacttaacccagacgagaactgtatcccgcacagacagtggcaaggagatctcctacagataccttatcatcgctccttggaatccagctggactatgaagaagnttaaaggactacctgaaggctttgcttatcccaaatagggccaattactcagtgaagacanttgagaagacattggagncctgcagggtttcnaaggaggcat

SEQ ID NO: 697301 - DNA, 203 bp, Homo sapiens
aagaacatgggctttcagcagcagacaaatcccacttccaccactgactagctgtgtgaccttggacaagtgacctaatttttctgagcctgtttctcatttgtaaatggtgataatacctacctcatagggttgttgtgaggattaaaatgaggaaatgaatgtaaagcacttagtacagtatatgaaataatgggtattca

SEQ ID NO: 697302 - DNA, 108 bp, Homo sapiens
tccatgtgcagaagatcctcatcgtgggcattgttgctggcctggctgtctggctgtctagctgtctaggagctgtgatggctgttgtgatgtgtaggaggaggtgat

SEQ ID NO: 697303 - DNA, 154 bp, Homo sapiens
actgtccccacggactgacacgacgctcgtcctgctgatgggcactgaatggtgtccacgggttgtttgatcaccacgagatgttcttctatggcctcccaccttcggcgtgctcctgtactgacctcttctgtcccttccccttcaccgctcc

SEQ ID NO: 697304 - DNA, 223 bp, Homo sapiens
ccccccccctttttttttcctccttaaagggcccggggggcgttcccccccccggttttttttttggggccgggggggggtacctttttttccccggggccccttttttccttttggcccttttttggtgcccttttggccgggtttttgcgaaaaaccgggggggggcgggggggggttttccggggttttttttccccccgggccggccccgggggcccca

SEQ ID NO: 697305 - DNA, 621 bp, Homo sapiens
  misc_feature (117)..(117): n is a, c, g, or t
  misc_feature (191)..(191): n is a, c, g, or t
  misc_feature (369)..(369): n is a, c, g, or t
  misc_feature (435)..(435): n is a, c, g, or t
  misc_feature (538)..(538): n is a, c, g, or t
  misc_feature (592)..(592): n is a, c, g, or t
gtcccccgctgttctctgcggccgtctagggatggcgctcctgcctactccggaccatccctgcttggactgaaagcctgggcttcggcggggcgggcgggcagagggcggacggangcgcaggaggggcctggcagcagagaaacggtgcccgcggccagccccgcccctacctgtggaagcccagcacngcctcccgcggataaaaggtgcggagtgtccccgaggtcagcgagtgcgcgctcctcctcgcccgccgctaggtccatcccggcccagccaccatgtccatccacttcagctccccggtattcacctcgcgctcagccgccttctcgggccgcgggcccaggtgcgcatgagctccgncgccccggcggccttggcagcagcagcctctacggcctcggcgcctcacggcgcgcgtggcgtgcngctctgcctatgggggcccggtgggccggcatccgcgaggtcaccattaaccagagctgctggcccgctgcggctggacgcgaccctccctccagcgggtgcnccaggaggagagcgagcagatcaagaccctcaacaacaagtttgctccttcatngacaaggtgcggtttcttggagcagcaga

SEQ ID NO: 697306 - DNA, 131 bp, Homo sapiens
gcgccaggggtcgagcggaacagctgatcgcacggatacagcaggaagaccaggaggggccgcctacgtagcccctagctccagccatcctacccctctagctggggatcctactagtagtcgaccgtgca

SEQ ID NO: 697307 - DNA, 121 bp, Homo sapiens
agaagaaagtggatcagggaagaagaaagcttcatcaaagaaacaaaagacagaaaatgtcttcgtagatgaaccccgttattcatgcaactactatatatatcctttgataggataatgc

SEQ ID NO: 697308 - DNA, 187 bp, Homo sapiens
tctgtccttccagataggccacagcttaggaaggacacatggatcagagagagcctgcagaacagcagcaggccttctgcagctgctaacgggtgctctaggcgatccaggctcatttcaggactcagtttcctcatttttttttttttttttttttttgggtaaaagggttttttgtttttccttt

SEQ ID NO: 697309 - DNA, 488 bp, Homo sapiens
acatcgttgagtccaatattaaaaggtacgtctttaaactttttaagcttagggaaaatttctagagcaatggattttatggatgtggcattggtgaatgtacacttttggtatggtttaaatatgacacgaaatgtgtatctgtatggaaaattggttttatttccacatttagtaaccattctttattggtacctttctaaggtggtgtcatggaagtattacccaaagtcaaggctgtaaaatcatttcaaggacggcggttgaggctaaatagatggacatctaatttaaatacagaacataccttttaaacaaatgcaggaatgttattaatgccctggtctataaatccatctatattagaaaattaagactgggatttactattctacctcagcccttcttgtatatggaacctacaactaccaactcttcagttaccggaggataaagcattgttcccaacaaggtccaaatgtctcggt

SEQ ID NO: 697310 - DNA, 419 bp, Homo sapiens
ccaggcaagccaggggcaaggaaaagcagggcacagggaagggcaagggaaggcaaaggcaacaggaaaagaaaggaaaggaacaggcacacaggaaaggcaaaggaacaggcaacaggaaaggaaaggaagggaagggaagggaagggaacaggcacaagcaacaggacaggcacaccaggaaaggaaaatctgtgacctaattggaattttgaaaaggaatagaggatcatattttaaagactacacactaaataaacagaatatatcaaattatatatcttaaattagcagtaatgagtagcaaacttctattcaccacctgtaacttttctagatgcacctcccaaagttttaaccagatgtctcaattcatttttattaaaaattaacatgcatagtaaaaaaaagacaatttt

SEQ ID NO: 697311 - DNA, 198 bp, Homo sapiens
cgcttcgtctccggtctgtgtgtgtggactgtgtgcggtctgtgggtggtgtgcggtctgtgtgtgtggggtgtgtgcggtcttgtgtgtggtgtgtgcggtctgtgtgtgtgcactctgtctgtgtgcggtctgtgtgtgtggtgtgtggtgtgtgtttgtggtgtgcactctgtgtgtgtgtgacggtaggtgtct

SEQ ID NO: 697312 - DNA, 339 bp, Homo sapiens
gtccgggccgcctttgccatggctgccccgtgggtgtcatcgttccagttgggggagagttttgcgcttacggttgagtactttgcagcccttcggcccaaaacgggccaagacggccgacgtcggaccagcaggggacttgttaagaagttttgattagctgttaggacttggttgttgcagctcttgccattttgccaagtgcgcttacgcatattcggtatctgaaacctctagaacaaagttatcacagaaaccttccaaaggaggatttcaacctcctagctttttcatcctactataagggaaggatttgacagaaatgagtagccagaagct

SEQ ID NO: 697313 - DNA, 485 bp, Homo sapiens
  misc_feature (20)..(20): n is a, c, g, or t
  misc_feature (35)..(35): n is a, c, g, or t
  misc_feature (38)..(38): n is a, c, g, or t
  misc_feature (52)..(52): n is a, c, g, or t
  misc_feature (69)..(69): n is a, c, g, or t
aaaaaatttggaaaactggnctctgactgtgcaanaangggcaaccccaaantcaaggcacatggcaanaaggtgctgaatccccttcggaaaagctgttatgcctcacggatgacctcaaaggcacctttgcctacactgagtgacctgcactgtaacaagctgcacgtggaccctgagaacttcctgctcttaggcaacgtgatattgattgttttggcaacccacttcagcgaggattttaccctacagatacaggcttcttggcagtaactaacaaatgctgtggttaatgctgtagcccacaagacccactgagttccctgtccactatgtttgtacctatggtccactatgtttgtacctatgtcccaaaatctcatctcctttagatgggggaggttggggagaagagcagtatcctgcctgctgattcagttcctgcatgataaaaatagaataaagaaatatgctctctaagaaaa

SEQ ID NO: 697314 - DNA, 674 bp, Homo sapiens
  misc_feature (144)..(144): n is a, c, g, or t
  misc_feature (425)..(425): n is a, c, g, or t
ctttttttgtgaagtgtgcttcctgcaacgagcacgaacatgaacattaaaggatcgccatggaaaggggccctcctgctgctgatggtgtcaaacctgctcctgtgccagagcgtggtccccttgcccatctgtcccggcggngctgtccgatgccaggagacccttcgagacctgtttgaccgcgccgtcgtcctgtaccacatacatacataacctctcctcagaaatgttcagcgaattcgatgaacgggatacccatggtcgtgggctcattaccaaggccatcaacagctgccacactttttcccttgtcaccctcgaagacacggagcaagcccaacagatgaagtaaacagactttctgagcctgatagtcagcatattgcgatcctgggatgagcctctgtatcatcttgtcacangagtacgtggtatgctaagaagccccggaggctatcctatacacagctgtagagagtgggagcatacccaacggcttctagagggcatggagctgatagtcagccatgttcatccctgaaaccaaagaaaatgagatctaccctgtctggtcggactttcattcctgcagaatgctgatgaagagactcgcctttttggtgatatctgttcactgcctacgcaggattacattcgcaattctcgctccg

SEQ ID NO: 697315 - DNA, 465 bp, Homo sapiens
  misc_feature (174)..(174): n is a, c, g, or t
  misc_feature (217)..(217): n is a, c, g, or t
  misc_feature (224)..(224): n is a, c, g, or t
ggcctcgcaaaacgggcgttgcaacgggtcccaagacgacggcgcccgccggccatccggacgcaggcgcgaggcggcaagcgctcgcagcccgtcgccccggccgaccccgacggcagccccggtggagcgcccggcccatcaagatggagcaaaccgctttgagcccagcangtcggtggaccacgcggcagcacctctgagccggagggcaccnaggttanctcccagggccgtcaaggaaagggcagtggacgcctgcgcatgttcgggagcgaactcccccgaagaaggaccagtgaagacgtcaggggcaaggtctcgggggtccggaagggtgatcatcgatccccaagggacccgcagacccttaaaaaaatcacccacaaccctctggaaggtgccttgcaccgatcccttcccaggggcgaggtcggcaaagcaacatggcagagcagtcatagg

SEQ ID NO: 697316 - DNA, 860 bp, Homo sapiens
tggtagtcagctatttaattgggtccttaaaaattttaaaaccccaattggtgaggataaatcccatccgtcaaaccaaacacaaatcgcaggtagcccgtggagctgaggaataccttggattttgggtaaaatttggtgagctccacagcttctctgatcaatctggcgcgtgcccccgttaatctcatattctctcttttcctgggttgtcgaaaatctccacctctccggggtgtcggggctcccgacagcttcttctctctgaagtaagcttcagtaagatgttctggggattttacatggctgatatcgatttggtttcggaaggtggcaactgacaaatctttcgggtggtgtcctccgtagaggacctcgatggggggcaccaggaggtcccagtcacaggtattaggccatctagccgagctgcttcgaggaaaaccacccttcttgcccctgtggcgtccagtgccggatgtacccagagggtcccgggggtaatgctgggctcgcgagttttcctcccgtgctgactgaagggttgttgcgccggctccaaccagctcctcgaggcccattccttcgcgcggggatcacttctctaggcagtttgcgggggaggtttaaccccccggcgtacccgccgtcttggttcacccccacctggtgttccgtagcctgtttcgagagccttctccttcttttcctttcccactggatttaggggggaggaaactcctctcgaaatgcgcttctggaatccttggagctgggttcccgcgcttccttcgcaagagcgggcgcgccaaggggcccccttgggcttagttgggtccctttccctgcccgccactctg

SEQ ID NO: 697317 - DNA, 1296 bp, Homo sapiens
  misc_feature (977)..(978): n is a, c, g, or t
  misc_feature (993)..(993): n is a, c, g, or t
catgctgttaatatcaggtgatttcccccacccttttgtgccacagatttttgagccgggaacgacccctgggccaaaaaccggggaataagttgttgtcttaatggggggcaacccacccgcgtgtgtccaagactcctggggtaaataagaccctcgattggtaatacatacctgctttttccggaatggccaaacaccaacctggcgccacttcaccaagattaaatatatggaaaaatataatggttcctcgggggtaaaagaatttgaggtttcacgggattataaattttatgggaacccacgctggaaattccccccaggggatctatatgttaaaacaccacaaataagcccttttttggtttgtgtgtgcgcctcgtacaccaccagaggggaaatatataatgtttaaaaaggggaatttatatattttcctttggcccctggagagagaagattttcacaacgtttttaataagaaagtttttttcccccttgggggagagaaaaaccttatatgtaatatagaaacaccccccaatgggcccacccacaagcttgggccaccgtaatatttagatgttttgtcgcccccatgtcccagaggtcccatatgtaatcccaaatagtgtccttcccacatatagagttctcttgaaagaattttagatgggagagatatgttagaaaatacctttaaaagatatgttggccccataatatccacatagcccttatctcaggaacacccagatgatattgtcttttctccccacagatctcacaatatatataaagagaaaatatatagtgattccagagagcgcttgtgacacacacacaggcgctttatatttttaaagatataaaaaaataatatttgtgaacacatagggtgttcccctttatatggaaaatataccagtgggtgtatattagtgccatataaacacccaccgcatgccatttannagagaatataatatnggcacccaataaaaagatgtgtggcgtttccagaatacgcccagtgtgttccacaaatatataaatacgtccatattcccacattgtataacgctgtgtctcacgtgcctcttggtgtgataaatatttgcctcttgttcacagtgaagtgttaattatatctgcactttatacttttgttcctcagtgtttttctaataactaatagtgtattttcttaaaatatcacgtggaggataataggataaaataatgctttgagaagaatgtttaatagaaaatttaaataactttttttggcca

SEQ ID NO: 697318 - DNA, 432 bp, Homo sapiens
  misc_feature (275)..(275): n is a, c, g, or t
tgcaatgctggtgtactggccgatcagtatcacaatcgtcgctgagtgggccaggctggttttgaccttctgacctcaggtgatccgcctgccttggcttcccaaagcgctgggattacgaagtcaggagatcaagggattaccggcgtgagccaccatgcctggccacggttttttcaccattatagacgactaaaatggttcatttgcagctctacgttgaacgtcgtgaactaaccgactgacgacttgaaacctaagactatggactttgncacagtatacgacattaaactaaacctcttgactcttgactaaggggttactttgttgggtaacgctacttttttttgtggaaagcgtatttttgatacatagaaaataatcctcccccctttggttattttgggtctaaggtttattaccatcaac

SEQ ID NO: 697319 - DNA, 136 bp, Homo sapiens
gcggccgcctactactactactactgctcgaattcaagcttctaacgatgtacggggacatgggatttggcctttttgattaaattcctgctcccctgcaaataaagcctttttacacatctctcaagtaaaaaaa

SEQ ID NO: 697320 - DNA, 591 bp, Homo sapiens
acatgccgaacggtcgtttgccttaaagctttcgtccgcacgatacctttcggcttcgcctgccccgggttcgctgcgatctcctgaaaccatgccggtgcttttgcgaggttcttgttgcttttgtcgtgcatgaaccacggcgtaccctcgccggtctgatccttcatgtcgacgtgcagcatgtcggggctgctggtgtaagtgatgaaccggcgcgcaccacgcgaatacagttcgcggacgagctggccacgctctgcctcgctcatacccttcatagagatatccgacgctgtgccatcggcatgctcacccgggccgcctggcttcgcagcctctacgcgatgcgacggggagcgatagcccgaattgattgtgaaatcgcgacccatcgccttcgacgtctcggaaaggatcgaggcgaactgcggattgatcttatcctgaccggcatgcacgaagttcagcttgccgccggtgccgattggcgcgtcttccggctcgcggacgaggcgggccagccccttaccgttcgggtacgggacctttgtacccttcccttcatcgccctggagaagatcgaggtga

SEQ ID NO: 697321 - DNA, 486 bp, Homo sapiens
gggtcgtgtgccatggggcacgatctgagtgggccagtgtgggccaacgatgcaggtgctggggttcggccgtgatcctacatcatccgggggtgtcgtggccacgggtgggcgcttcatctcagtggtactttggtgcctactccattgtgagacgggcgtgtttgtgtgcttgtcgtgcgtaggtacctcccggcggcgaagaggaagaagggctccaccatgtgagcgctgagtggacagaagcactatgacctgacggtggtgagagactgcttcgcgtgtcccttgtaccagggaattactatgttctgggccggtcctgtctatctgcctgcctctcgtgatgcccgctcgagtcgttccttgctgggctcgccatccttgggaccggctgtcactggccgttgcgatgcgtgcgatctacctatctggcggctgtgcgtggcgagcagtggacgcccatcgagcccaagaccccgcgga

SEQ ID NO: 697322 - DNA, 554 bp, Homo sapiens
ctttaatacttgcccccccatcattgccggagcaaaaatgcttttgggtgaacccgtggtggaaccgacccttatcgcccccaattattgggtagatctgtcaacgctagtagtaattctcctctgagacgtaaaaatgttcttcaaagaagatgctacttaatgagtgacaccgacggtgcgcgcaacaacctgtaggggtaaaagagaggccttctcacccgccccagagagatgggggctttttccgcgaggcgccaaaacacccaaaaaaggtctttgccgcaagattcagctccagggggggatcgttctgccgcctgtccgaagaaagctcctggcggtggaaaacaacaaccggtcgactagtagtatctcactcctcgtgacaccaagagggtcgttacaaaaacaatatcttgccgcacccgtactaggacgtttctctttatatttttttaacaacttattgggggcggaaaactatattttgagaagctatttttttcccaaataatttaaaaaaacaaaaaaaatttttcccccaaaaaaaa

SEQ ID NO: 697323 - DNA, 154 bp, Homo sapiens
agtttccattttttaaatgggaattttcaatcccctgggcttgtttaacgtttgctttaaaaagtttgagcccctgtttctgtttgaaaatgcatgcatgtttcgatgaatttcccccctgaggaaaaaaataaaactcaaaaagctttgtgta

SEQ ID NO: 697324 - DNA, 124 bp, Homo sapiens
  misc_feature (87)..(87): n is a, c, g, or t
ggcctccatccgtcacgcaatgcttctaacggactcagcagatgcgtagcatttgctgcatgggttaattgagaatagaaatttgcncccttggcaagtgcacacacctcatgctagcctcagt

SEQ ID NO: 697325 - DNA, 194 bp, Homo sapiens
cgagactttttataactacttcagtctcattacgcaagtattggtctggttaggtttttccattttcttcctggtttactcctggtaggtcgtatgtgcgacatttattttaggttgtccaatttattgacatctagctttctattatagtctctaatgatcctttgtatttctattgtacctgttgtaactgg

SEQ ID NO: 697326 - DNA, 352 bp, Homo sapiens
  misc_feature (53)..(53): n is a, c, g, or t
acatctgtgtgggttttctccaactattctggtttcttcccacatccaaagantgtgcatgttaggtgaactggtgtgtctacatggtcccagtatgagtgtggatatgtgtgagtgtgccctgagatgggatggcggccctgtgcagggttggctcctccctgtgccttagctcccggataacttctggtcaccagtaaccttaactgaataaattaatcaaaaaatatcctggttttattaaaccaaggaaggacagctcccctttaattcaaaggttaaaaataaaaggggtttggttttaaaaattggggaaaattttggggcccaaaattaaccgtagggacttgaa

SEQ ID NO: 697327 - DNA, 734 bp, Homo sapiens
  misc_feature (33)..(33): n is a, c, g, or t
  misc_feature (120)..(120): n is a, c, g, or t
  misc_feature (142)..(142): n is a, c, g, or t
  misc_feature (152)..(152): n is a, c, g, or t
  misc_feature (171)..(172): n is a, c, g, or t
  misc_feature (190)..(190): n is a, c, g, or t
  misc_feature (192)..(192): n is a, c, g, or t
  misc_feature (202)..(203): n is a, c, g, or t
  misc_feature (208)..(208): n is a, c, g, or t
  misc_feature (212)..(212): n is a, c, g, or t
  misc_feature (220)..(220): n is a, c, g, or t
  misc_feature (230)..(230): n is a, c, g, or t
  misc_feature (237)..(238): n is a, c, g, or t
  misc_feature (256)..(258): n is a, c, g, or t
  misc_feature (261)..(262): n is a, c, g, or t
  misc_feature (268)..(269): n is a, c, g, or t
  misc_feature (276)..(276): n is a, c, g, or t
  misc_feature (289)..(289): n is a, c, g, or t
  misc_feature (291)..(291): n is a, c, g, or t
  misc_feature (300)..(301): n is a, c, g, or t
  misc_feature (311)..(311): n is a, c, g, or t
  misc_feature (313)..(313): n is a, c, g, or t
  misc_feature (315)..(316): n is a, c, g, or t
  misc_feature (318)..(318): n is a, c, g, or t
  misc_feature (320)..(321): n is a, c, g, or t
  misc_feature (325)..(325): n is a, c, g, or t
  misc_feature (327)..(327): n is a, c, g, or t
  misc_feature (339)..(340): n is a, c, g, or t
  misc_feature (357)..(357): n is a, c, g, or t
  misc_feature (375)..(375): n is a, c, g, or t
  misc_feature (383)..(383): n is a, c, g, or t
  misc_feature (393)..(394): n is a, c, g, or t
  misc_feature (409)..(409): n is a, c, g, or t
  misc_feature (419)..(419): n is a, c, g, or t
  misc_feature (423)..(423): n is a, c, g, or t
  misc_feature (437)..(437): n is a, c, g, or t
  misc_feature (455)..(455): n is a, c, g, or t
  misc_feature (462)..(462): n is a, c, g, or t
  misc_feature (465)..(465): n is a, c, g, or t
  misc_feature (472)..(472): n is a, c, g, or t
  misc_feature (483)..(483): n is a, c, g, or t
  misc_feature (486)..(486): n is a, c, g, or t
  misc_feature (508)..(508): n is a, c, g, or t
  misc_feature (538)..(538): n is a, c, g, or t
  misc_feature (540)..(540): n is a, c, g, or t
  misc_feature (551)..(551): n is a, c, g, or t
  misc_feature (581)..(581): n is a, c, g, or t
  misc_feature (585)..(585): n is a, c, g, or t
  misc_feature (597)..(597): n is a, c, g, or t
  misc_feature (602)..(602): n is a, c, g, or t
  misc_feature (605)..(605): n is a, c, g, or t
  misc_feature (672)..(672): n is a, c, g, or t
  misc_feature (692)..(692): n is a, c, g, or t
atccacaaattaagcaactgtttcttatgaagngcatcattttcctggttggcctgttcatccagtgactttcttatacaattctttaattcttcgattccttctccagtaactgcaganatggggatgatatgttggaacnctacagtccnctctggaatcatgtttttnncaaaaaaatgcagaaaancnttaggattcnngagcnggcncatcaatncaaggaactnatcttgnncatctggcaagcccattnnnccnnctgccnngcccgcnggcctcccctgangnccctctttnnccaattcccncncnntngnnagcngnattaggggttcnngagccgtcctgtgttgngtgtggggggggagctgnattccagntatttcctcnncgaggggtggttgtntggttctttntttntggttggggggttngggggccattcctttgtncctatgngcnccttctntttgtcccggnagntcagctactgatatctgtttgngatcactgtacattatctttccaagttcangntttaatgttgnaaatgcgtaatctgcaattgcaggttttgnatgngaaacacaactnagganagnggattttccagcatttgggagtcctactaggcctacatcagctataagttttagatcaaggtgaatnattcgtttctggcctttcantggtaagaaatttgtaagtgatttaccaccaagacctccttg

SEQ ID NO: 697328 - DNA, 151 bp, Homo sapiens
  misc_feature (43)..(43): n is a, c, g, or t
caacaccctacgtaaaggcgatgagtgtggagaggtacggagngtgatttgtatgttcaaactgtcatcttatttacacgttggtagatatggacagtagtcagattgaggaggagtagattaggcgtatgtagaagtcgaggttatggag

SEQ ID NO: 697329 - DNA, 234 bp, Homo sapiens
acaagatagccagcaggtacgtctacttcattatctgaaggctgacttcatttctttcagaatcctttccagtgtgggagattctgtggttaaagggaatttttcttgataatcttatcaagctaacttatgcctatgattgaaagtatgggctctttccttctgggtggatctccctgacttaagtaggattaagttctatagaaagggatctatcgaagtctaaagaaaggg

SEQ ID NO: 697330 - DNA, 328 bp, Homo sapiens
  misc_feature (2)..(2): n is a, c, g, or t
ancgggtgggggcacaacttgctgctactcacaggcctgcctgcttccgcagagcccaccgtgcccccattgccgtgttactgtccaactgcctgcatcccatggttctctttcaaagaggtccagatcccagggagggcgcagggctaaactccagtcctggttctgtgatcctttacctgggaccttccatgacatctggactaattccttcactgcttgcatctcagtgtctttttttcctcattctgtcacccaggctggagtgcaatggtgtgatcttggctcactgcaatccccacctcctgggttcaagcgatactcttgc

SEQ ID NO: 697331 - DNA, 126 bp, Homo sapiens
ccagtgtatatttgccccttcctgcccaaaatggttcacatacctgactcaggcagagcaatgacaccctggcaaatcattccctccaggttctcacatgtgcctcataccagccccctgttgaag

SEQ ID NO: 697332 - DNA, 912 bp, Homo sapiens
  misc_feature (2)..(2): n is a, c, g, or t
  misc_feature (4)..(4): n is a, c, g, or t
  misc_feature (447)..(447): n is a, c, g, or t
cngnacaaagagcagataaaggggcaagcggagaggcaggagacgacagacgctactgcctcagcgtgcagcttttatccggcttttactcttcacgctctctcatccactatggttcccctctctaggccgcttcgaactggtcccacatgcgcttcaagttagagaaagctgtgttccccgactactgagtctctggccccaaactgcacagcccctcaaaccaagtgggtgcccacgagtctccaccacactttctctctgcatctctggacagccgatggtacacgagtccggataggcccattgtcctgccgtggtgttaaaccacaagtgccaaggcgttgttccacagaaaactctcgcccccataaacccctactaattctgggagcacatttacccacaaaacccccattctatgcaagtgtcccgcacatagacccncttgcatcctcgaagaccacagtccacccgtagaattctttcataatctctgcacaactgagctcgttgcacccctggtttccattcgaattactcggaccacccagcatgttcccgctcaatatagctcgctcatgtgtccggatatacatcaattcatgccactagaaaggtttttttcattgcaaacgtacactcccgttgttgcctgagtgagaacatcttgtgatcagtggcgccctggtgacttccatgagactactcccacttgaaaggtgtactcccctattcctcctccctctggaaaagtgttgaggaacccagtatgccaccctgaggtagagacacccccgagcggtctgaccccggggactcacaaaacattggcgtcacattttgtttcccgccatttccacctcacgccaacaacaaacccaacaacataacggatccccttcagacata

SEQ ID NO: 697333 - DNA, 517 bp, Homo sapiens
ctgagatccaccacgtcccaaacggtaacctgctttactccaactctactgatctaagtgttaatctcacctagaaagtactttcacagaaacagctagaacaatctttggccaaatgtctgggtactgtggccttggcgaattgacacataaagtgagccatcccaggggccgtaagcaatggcgcccccaaaggaaggctccgtgaatgtgcaggagagcaaaatccttgatgtgagacctgagcggaaagttgagcaggtgcagcttcaagaaaggaggctgagaccggcaggcttgtctgtgtggaggagaagcatttgcagatggtgcgtgtacacagagcaacacctgcagaaatgcagggaggtcacaggtgaacgaggtagtgtcatgaaaacctcagtccttcccctatggatgtgtgaacgggatgccacctaaatagaatttctaaagagatgttttccattttcttttttgaaataaaaagaagtatttaaattcacatcgaaaa

SEQ ID NO: 697334 - DNA, 1111 bp, Homo sapiens
agcgtgggtgggtgctgcgcggaggagcgaggcgcttgctggggtcggggctgcgcgacggcggcaggggctgcggggagcgccgcgcaggcctgtgcagttcctagctgatggagtgcgcctgcctgccatttgcctgctctctctggtgagctgcagccccgctctcctggtgccggtgccttctgctgggccacctggcggccgatgggccatggtgctggcatcacctccgtccaaggacctgtgcttggtcctttcgtcaagcctcgatctatcatggtggtgggcaggcttggccatttttagttgcgtattgtgaggaaggccatattgtacttcaagtcagactttactgaatgaactaatgacccactttccttttgagcagatagtgtagcacggcgtcagatcccgttgctgttaggtgactcagtacgctttgtacggaatgcaccatggcacttttgccagtcaactttgggggcctaagtttgggcatggcttgttgcccacagagttcctggagaaacagctccggcgtgctagggaccgtttggcccgacaggagtcgagggtcagatccgagtcacagtggcatccttatgcggtataaaagggtacaccaagggacaccggtcagggtcgaggtacaggtaggggtagacgggagcactagtgggttgtacaccacggaggtccaaacaaggcgctagaggcaaaacaagttcggaaccgcggattcgacagtacacgccaacagggcagcagagccaaggagacaagacagggtagggttaggttaaaagggacaacgccgttagcgcaaaaggtgggggtgaacgaaccgccaacatagcccccctagtggaaaagattgtcccctttagtgcgagtaaggaggccccgggtggggggcgcattaagtttcgggggacactgctctagtttcgagttacacgcacggggacaggggaagctagagtgcgcgatttggacgggaagttgtcggggtcatcgtgccttggagggagacaaggatatccagcacgcgacactagctgttaagccgtgtccctataggaacactgttgggtgtctagtacaacaa

SEQ ID NO: 697335 - DNA, 675 bp, Homo sapiens
ctgcgcgtggttgtctcctgttttgcatgcgggcgtgcatgctttcccccgaggctcgttggtgtggtgtaagcgcgggtgtaacctctggattactatgcgcagtatgggtgcgtgaatgcgcggatttctctccctagtgctctcaagcattgtccggttatggactccaggttgtcatgcagtcctagccagctcatgcggctctctctttctgacattcactctttgtctgacattagctgtgtgcaagtagtggtcctttcatgtgctctttgtgcactgcattcttgcgtgtgtagcctgttgcccttcggggttctctttgagataccgttgtggcatatggtggccctttgagctggtctggggctatgttctacccgtatgtggcacggtcatcacccacgttctcggggattattgtattccgctctagaggttcgtgtctagtgtctctcatattttcaatcgcgccctctcgctcctcgtgcgtctcactgtagcgctcttggctgtgtttataccccttttgtatcaagtgctgtttggtcctcttttgatgtgtgttgatatcttgtatatatatatatctatatatagatatagagagagagagagagagagagagagagagagagagagagagagagagagagagagagagagagagag

SEQ ID NO: 697336 - DNA, 1385 bp, Homo sapiens
ccccttttttttttttgttcaattatcacaatgtttattgatagatacaagttatataaaatcagggcatgaacatgatctttgattaaatttaagttaaacttaattttcaatactattaattaggagggaccaatttcaaatttctcaccatttgtgttttctcacccccaaaaaaaaaaaaaaaaaaaaaaaaaaaaaaaaaaaaaaaaaaaaaaaaaaaaaaaaagagagagggggggcgcgacaccagagagatttcctcccgcggggggcgccccaaaatcacgagcgcccccccctttttgtgatcacaaggggggccccctatatacgggaggcctcttatatatatctatacgccaacagagcgcgaggcggcgcgcggcaaatctatataacacacacgcgcggagagcggcgggaaacacaacgcggagcaatcggcgaagagacacattagggaaagaagagaaccactcattatctctgagcggggggggaggccacaacataggggaggaccaacaactcgcccagccgacccgtatatataaaggacccccaccgacggcgcggaaaatatactacagaagcctgtaagagcagggcgataactcccgagggcgtgacaccccaccacaaccgccacccacttatatacacccggccagacgcgaagcaaagacacgaaaccagtaggcgcggccacagccaggcgggcccatacacaccacacacgcacagcacgaatatcacttatcaatccaccgagggggaccaagacgcagcatcaacagcaaaacaacaccagagcagaaccacccaaaacacacagaacacccaagcgacccccgcccgagaacggacgccaagacgagaggaaacaggaagacgaagggagcgacgaagagcggagaggggacggagagaacggaacgcgaggagcgcggcaggcgcgcaggaccagccaggagagagcagaggagccggagcagagcgagcggaaggcgagggcggaaggcgcggcagagaaagcacaccgcacacggaggcgcgaaggaaggccgagcgaagccccaaagacggaaagcggcggccggacacgcccgagaccgcgggcgaaagcagagcgacgggcaagagcggaacggaccgagacggaagaggcgacgacacaaggcagcagaagacagacagcaagacaaagggggagagccgacaaccgatgcgagaccagcacacgacagcgagcaagacgaaggccgacgcgaaccgacgcggacaagagcaggagggaaaggcgagcgaggagagcgggcgacagagacacagcgcgcgaaagagccagacacggacagcaaaccagccggagcagcaggccg

SEQ ID NO: 697337 - DNA, 134 bp, Homo sapiens
  misc_feature (49)..(49): n is a, c, g, or t
  misc_feature (106)..(106): n is a, c, g, or t
  misc_feature (113)..(113): n is a, c, g, or t
aaaaaaaggtaattttccagggaaccctgcccagattaatactgtgggnggaataagagaatcaagccatcctcaagagataacttcataaccagaattgtctgtnggttagnagctgtcacagataggcaggg

SEQ ID NO: 697338 - DNA, 549 bp, Homo sapiens
  misc_feature (59)..(59): n is a, c, g, or t
  misc_feature (70)..(70): n is a, c, g, or t
  misc_feature (144)..(144): n is a, c, g, or t
  misc_feature (409)..(409): n is a, c, g, or t
  misc_feature (411)..(411): n is a, c, g, or t
  misc_feature (431)..(431): n is a, c, g, or t
gcactgaatgtggctactgctgtatgctacggatatacacggcaaccattgcctcaggncgctgccgtgntggggccagaaaatgcattgctgaccacggtggttggggatgggatgatttttctcagcaacgtcgacgcgccncaggcccttaaagtctcttccagcacagtgtcctgcgcgctgcaactcgaccttccggagcaaacctataatggcaaattctacgaaaccgcttcggcggtctgtcggtgagatggcccgcatgaacgagtggcgtatcgggtgcctcaaaggcttggggctgttgtagagctgccttttactggcagcgccggcaagtgctgcgaactgccgcctgtccctgagccagcccatcatcgattacggcctgcttcgcccaggcgancngctcgaaaatcggggtgctncgctgggaaagcgtatggacgtctgaacgtgatctgcgtggaggctgcggtgattgcgctacgtattccaggcgtgccggccaatgagactgggctacaggttagggccggccaggac

SEQ ID NO: 697339 - DNA, 490 bp, Homo sapiens
ttgccggggcccgatgggtagtatgggatagcaccagccagcttccaccttttttggactcttgtacgttacatggtcggggtgctaaccagaatgaagactgtgggggagggttccctgctcttgaaaaaatgcttgtcaaaagaagtggctcacgcctgtaatccccaccctttgggaggctgacgcagttgcatcacttgaggtcagggggttgagaccatttctgacaacatggtgaaacccccctctttactaatacatttgccgggccgtgtggcccattactttaatcccacctacctgggaggcttaagcacccacaatctcttgaacccactggtgacacagttagactttttcgtccaacaacccctccttagccacatcattccttttccgccccctttgcccagtccactcttaatctgcaccacatttttgtcttgccgccccaattttagcctcctttggcctccccccttttggc

SEQ ID NO: 697340 - DNA, 208 bp, Homo sapiens
  misc_feature (70)..(70): n is a, c, g, or t
ccgagatgcggtcacggcgcccgaaccgtcctcctgctgctcttgggggcagtggcctgaccgagacctnggccgggctcccactccatgaggtatttcttacaccgccatgtcccggcccggccgcgggggaggccccgctttcattgcagtgggctacgtggacgacacccagcttcgtgaggttcgacagacacgccgcgagttc

SEQ ID NO: 697341 - DNA, 111 bp, Homo sapiens
cttgtgtaggctgtaagggcataaaatttaggtttacacactgagggtaagacttagtcagttgcatgtaatgttcatagagtacaaagggatatcaacaaaatgatcttg

SEQ ID NO: 697342 - DNA, 86 bp, Homo sapiens
gaaccaacttcttcattcagctggtgcggccggtgtggcccagcccgaggacaccgtgcagttccggatccccatggaaatgacaa

SEQ ID NO: 697343 - DNA, 376 bp, Homo sapiens
  misc_feature (109)..(109): n is a, c, g, or t
  misc_feature (113)..(113): n is a, c, g, or t
  misc_feature (198)..(198): n is a, c, g, or t
tttttcttctccccccccctgttcagaggggtttttttccccccaaacggggggtttttttattgtgtgtacccccccccccttcccaaaaggggggggggggggccgngggnggtttttttaccaaggcgttttttttttccccccggtttttggggggggccccccccccctgttttttttcctccaaaaagaacngggggcggtttcccccccccgcttttttctttggccgggggggggggttcttttttttcccggggcccccctttcccccttggcccttttttggggccctttttaccccgtttttttccaaaaccggggggggggcggggcgggttttcccgggttttttttcccccccgggccccca

SEQ ID NO: 697344 - DNA, 507 bp, Homo sapiens
  misc_feature (53)..(53): n is a, c, g, or t
  misc_feature (128)..(128): n is a, c, g, or t
  misc_feature (130)..(130): n is a, c, g, or t
  misc_feature (191)..(192): n is a, c, g, or t
  misc_feature (365)..(365): n is a, c, g, or t
  misc_feature (506)..(507): n is a, c, g, or t
agagggggggcgggcgccaccacagagggggcggcccctctcccccccacccnaccccgcggcgtgtgtggtggggcggcgtggggaggggagagaaactctcctctctctcgcgcgcgacatatttntnttatttatatataaatataacaccggccccgccccccaccaaaagagaagagaaatataannaagggagagaaacccccccccccgccgcgggggggggggggtgggttggtgtggccgccccccaccattggggggagaaaaaaacaaaaaagggggggggggggggtgtgtgttgaaaaaacaaccacaccccgcctttataaaaaaaaaaatgttgggggggccccccaaanaaaaagaagggggggtttttttttttttctctcacccccacaaacacaaaaagggagaggggggggggggggggggcggagaaaaaagaaggtggtttgtttttttttttccccccccccacccctcccccttttcttctnn

SEQ ID NO: 697345 - DNA, 902 bp, Homo sapiens
cgcgcgtcggccttcctgaacaccttaggctggtgcgggctgcggcaagaaagcgggtctgtttctttacttcctccacggagctcggcacactatgcgctgccctctggtctcccagaatccacaagcatgcaacgaaatggtgcatacccgagctcaagcctgggccttcgaatccggacacaaaaccctctagcttggcaaagtgaagtatgctgcactttacaaccactgcactacctgactcaggaatcggctctggcaaggctgaacgctacgaggaaccagacctcatcagcccaacatcaaagacaccatcggcaacagcagcgcccgcagccacccaccccagcaccgtgcgacttccatcttcatgtgccagccccctgcggccggaacggatgaccatccagtcacgcacatcatcctcagtagctgagctccttccagcgggcgatgaccgccgttccccgagcaccttcccgtcgtatcttcctgttgtccatcctttctgctctacttatgcttacctgagcctatgcctgtccttgtcgcttgtgttgcctgagagacttcgagagcgcgtccacgatttcctgttgttccccccggtcctctttctgagattctaagttttgcacctaaagctcagtttgccacctggcttgcgaagttctggcgggacgaacgggcctttgacgcttcctcaggttaccggagattgttgccgttgcacgtggtggaagccaaaccttgggcgctaagcttgcccttggtgccggggaccccggccccgggcctttccgatccttggggcccgcggttgccctgtggtcccgcccggctttgctgttgcccgaagggtccttcgccctttgcccctcggctatagtctgtgagac

SEQ ID NO: 697346 - DNA, 1539 bp, Homo sapiens
gcgcttgctcgcgcaaggctctgcctggcgcttcgctctgtctacttcacgacggcagatggctgcgtttcccgaactcctcagcaagtgcctctattgcctcccgtatgcccaaggcttggcagatgcaacttggacacgaatttccgattcacttgcaacactctggcttcccgcgcttcaagacgattctccttgcctcagcccttgcggaggtagtatgggacttaccacgtgttacaaacgactcactgcaagcttggactgcgctccttgtctagcacagcacaaaattacacttatgcctccttcaacagacatcacacaggcacacgaaaacagctgtttaatacacctttagttcatccaagcaagctggaaccttgttcaaaatgagctctaattgagcgtttcgtcccaccaaaggattcctgaaaccgagcaacaagccaaccagacacactggcacatatcacaactgacaacacgagaacaaacaaactttgacacctcacgcccgaggttttaaccgtgacacagccaacaggaaagtctaccaaccacacaccagcacccaccagtgaatggcaacttctcacgtggaactggtttgcccttattcacaccaagggtttgagccacacatttggttccaggaaacgcacacctcccattgggcaaggaattaacatggccacaaaacactttttcaaagcctaagctctactacccacagggcgtttctggccagggggccagcgctaagcacggaggccttggcacaagaagtcctccacttggggacacttccttcccatggttgcccacttcacccaacttatatcctttgcaacagcaacgcaagcaaatctcggcaaggacacaaacccaacaaggaaaccttaacgttggacacaaacaagctggcacatatacacccaaaaacacctggttgtcgcaccaacgacagcttaccatgcggaccgttcccccttccaccaaacaagcacactcccaccgctcccatcccttcgacacgactcattgtgcactagcccttcgaacacaggaccccactccaaaaaccctgccagcccattacacagaaaggacacatcggcccctcaaccaaggaaggccaccaaccacatccgggccaatctgggaccggcaaacccaaatatacggggcaccgaccacaaacatcaggtacaacatcatacttggcaccagataaatccagcatcgaacaacagtggccaggccaccgccacaccaaccccactctccgccacacctacacgctcaacccaaagcacactataccaagcacaaaacagacgactctaggaccgcacacatcaacccaacaaccgaccacgacgccatcccacgaaccccaactaacggagcacagaggaactaacacgcacgcacatgaaacaacaacaaccagctccgagacaaagagcgaggcaaaacaacaaacacgaccatagcaacagccccaaaacatctagcagcacccatcactagaca

SEQ ID NO: 697347 - DNA, 103 bp, Homo sapiens
aaatgagctcgaccgctattatcggcactcgctttttcatcggcacttcgttatcatcggcacccagtgctatgtttgtctctttggccggaggtgccgatga

SEQ ID NO: 697348 - DNA, 456 bp, Homo sapiens
gtgactctgaggatcccgggatgaggaacgtcactttaattttgcacaggaagtaaaacaaaattggggtcaaataaatataattacagtaaaacacatattcttatacatagtaagaaataatgcaacttactattttatagttaaaataatttatatgttatttactcaaatcatacgtactgtataatcaacgttaggagagaaagcatcaggggtggatagtcaatgatctgggattcacagtaatttcagacagactggcgactggtcaatccctaaattccagatttcaataaaagtgatctgctatatgggattaaaaataataaatatgtatgatatgcagtattacttaggagattacccggagatgatccaagaggaagcccctgacagtgggtcaagcactgagttctcgtctcatctcatctcattagatggttactaataacc

SEQ ID NO: 697349 - DNA, 158 bp, Homo sapiens
aggtgggcctaataggaggtattaatcatgagggttctgccatcaggaatggattaatatgattatcaaaggaatgggttaattatctcaaaaatgagttgttataaaaaggagttggtcccctcctgctctcttgctctcaccatctcttgcccttc

SEQ ID NO: 697350 - DNA, 258 bp, Homo sapiens
agtggaggccagcagcagctacaacatggtcatacgagaggacacccagaccacagcgcccgcaggagggggcgtgacacctcttcaagagcatcgggaacaacagatggctgcgcaccatctctgggatccagtaccccaacaagcaagatctgctcgctgagaacgtccttgcgtgggaaatcgaagatcgcaggactcactttcccagcaattagcatcgctcacactcactccatgtaggatgctcactcccgc

SEQ ID NO: 697351 - DNA, 177 bp, Homo sapiens
cggttatcgagtgaagggagtatcactcacctgagctcacatagtctaatagaaaacaaccgaaaccaaataattacaagcactagcttattacaattttactagggtctctattttaccctcctacaagcctacagacgtacttcgagtctcccattcaccattatccgcacggca

SEQ ID NO: 697352 - DNA, 246 bp, Homo sapiens
ctgtaggtgctgtcactgtgatggtagtttctttgctgtgcagaagctctttatttaattagatcccatttgtcaattttagcttttgttgccattgcttttggtgttttagacatgaagtccttgcccatgcctatgtgctgaatggtattgcctaggttttcttctagggtttttttcaatatatggaaattcacatttcgcttgggaacatgaaggggaagatatacaaaaggaaaactagat

SEQ ID NO: 697353 - DNA, 701 bp, Homo sapiens
  misc_feature (129)..(129): n is a, c, g, or t
caagagactgcttatatattcttaactagcttctgggtcctaatgtagacctcactaggtgcataaagatcattaataaacgcatgtacgcagcttgcgtaattggtgccttaatgctctgaatctaantcagaattgcagacctcatgagtccatctgggaagaaagacactgtccgtctgtggcacgtgtgagttactaggcccaggtgggaggagtctgatacaatggaagttctttatgtgtgtcctgtgctctcagaaggagatacctgatgtgttcagaagcaggcgtatgtaaggctatcaacattcacgtatttcgtgtcgcaatctagaacacattattagatttatgcctgtttaatgcataagtggtgcagagataatacacacaccacatcgtgattcgatggctttttcttccataaagttgcataatggcttcttgatggcgtagtgttattggcaacaagagtcctttccagggctccctgaataatctaccatacctgtatccatagcaggtgatgcttgttttgtgatccccactttgaagacgtgtgtatctgtatttaccttaaagtcatactatggttattaaagacagcagtgtttgaacccgagtgtgaacactgtaggaagtatgttggaaaaaaggaggagtgaactgtgcgcattaaggggggaaggctatgggag

SEQ ID NO: 697354 - DNA, 193 bp, Homo sapiens
gtgtgctcggattactgtgtcagccaccgtgtctagtcatggctttgcaatttgctggataaaaaaatgactcttaagggaaactacatgtctttactcaaatatattcttctttcctctggcacattattgaattaaaatagagtatttttcaggggccagcaagagtgtaatcggcgtatgatgaagcttg

SEQ ID NO: 697355 - DNA, 1198 bp, Homo sapiens
  misc_feature (516)..(516): n is a, c, g, or t
ccagtgcgtgttgacgcgtcgttagtctcgtcgttctctcccctctcgcagggtcggtgttgtttaggttgtctttccttttggtgcgccatcgtcggagcgtttgtggcttgtggtgtcttccaagccttggcacccttcactgttcccgtcgccagggtttgtatcgcgccggtgatctgtgggtctccctggggtcccctttttccacagggtctgcccacagtagtggttctccctttttgggggccccaccaccgtgcccaccgccgtgtcggctctttcgcgtcacagtgccctaggcccccgccttccgggccggcacctagggtttgccgcatggcccggtaaccccgggacgcttgctcgcccaggagctcttgcccccccagcagatcttcccagcgaacctgccaatgagggaccctgcgagggcgccgcccgctccctttgctgcgccctgccccctactggacgctgcccctgcaatgctgcccagcccactcccggaggaantccggaggccttgagggtgaccccacccttggccttttgggaactcttcccttgtgtggctgccccccccatgcccgcatagctccctgccttgtcctgaccccctggttctgcttaaagacttccctcttcacgactgctgggacgattcgccccaggctggagactggccccgccttggtggcctcgggattctggcccacataccctcctccctctggggtgatagggaccacagaggccccccgcctcgttgagcactcacagcctcgctttcttcccctctctgcggctttcacctcgctgaggtgttctgtgttctcccctcgggagaagcctcgtgccacgcaccctcttgaggcctctgggcccccacctgagggcttatggcctcctctgcctcagggatgggctcccacccctccccctcgaggatgtgcctcggagttcaccgcccctccttgtttgcctctttggggctcacaagcccttctcctaacctcctcggtgaatggttttccaccacggagaccaccacgcactctttcaccccaagatgggtggcacccacacacctctgctgggaacttggattccccggggcttatcttcttccagtgtggagagggcccgggtccccccctctgctgtagcttatgaaattaactaattggaaattcca

SEQ ID NO: 697356 - DNA, 895 bp, Homo sapiens
ggttagtaccggtgagtccgtggttggcggtccccatctggttgcgaaggctgtgtggtccggagaacccgagcccaaggagtgtggagcgtccccggagcgaggtccacatttccctgtcccctgccacaatgaacttgtccacatccgtgataccctggtgatgaccctggacatgggtgtgttgatctagcagtaacacgaagaagtgggccccgaaagagatgcaatgcacgtggttccccaaatggatggaggagctttagacgcttgatagtacgggatgcgtctttacttctattcgcgggtcgtaatggcagcaggattgtccccgtgagactttagaatgtatggcattctctgacctactcattcttatagccgttataatatctcccagtggactatcaggaagactgctccagcttggtgactcgacaagtatgtctctgaatccttgcacttgtgtcagtgggagaccgcatccgaggtatgtggcttgactccatatctacagtgcgcagtgtgtggagctgggggttgaaagaagtccccctgtgccctggtggagtccggaactgtgctccgtgatgctcgattcagtatcccagaggtggaacgtcctagtgttcgttctcctggacctttcttgctcacgcccggatcttggaatgaaggcattcgaaacctcccaggtctcgacgggaagttcattgtttggctgatgtgccttttccgaagctgtggcactaagggccccaggagttccactagggccaacccctgggttttaaaaccaagtcgcacccaatgactttgttcaacctattaatccagggccccgggccggggatggtcccaaaatcgcttggagcaataagtccgcccccaacaa

SEQ ID NO: 697357 - DNA, 774 bp, Homo sapiens
ggatgaaagagttgtgattggaggacagccttgatgatgccaagtactgtgggcggctctatggcttacgccacaggagtgtgcccagaatgcaagaatgcaggatgtggactctgcccaggagaagatgagctatcctggatgattatcaacgaacgatgctagctagtagataggttgaccagtgctctgccagtggtggagccctgaattccaacagtggtgcttcattgtgctgacggtgctacgtatctgctcccatagtagacacactgcgttcttttggagcaccactgtgacctagcatctgcctggacgtccggaagactttggtcatactgaagacataagatgttggattcttagaacccagaagagaggagctctgcgtcgtcgaatttgtaattaagttctgccctcatagcctctattaactcgcagcactctatctctcgtggattgccgtcacttgtccaatcagcccatccatgggctccatattgacaacattttataaactaatcaaggacccaagatcgtgaaaatcaacacgctaaagtaccccaccttcgttcttctttcaccgtcgtgtagccctggatttgctaccctctccctacttgctgctttctgtaaaagtagggatgaagtctacctcgtacgtggattacactgtaacgcacttccttgaacatctctggaaatcgcttcagacctgaagtctgctggacagtggccttcccaaggggacacaattggcaccatacaaattgg

SEQ ID NO: 697358 - DNA, 282 bp, Homo sapiens
atggagcatccacagattctgcacgtaactacttcttctgtggccactactggagtttctgaagaattggacaatggagcagatgcttcagataaggcagctcatgtagctcatactgatgtagaagagtttccacactgaacagcagatacacccgtatcatctgttaggttcaccacccctccaggtccaatgataacacagtggtgctgcagcatgtatagtcacagtgtcaggactctctgggttagtgtagattaggtactgcatagcaatctgtaa

SEQ ID NO: 697359 - DNA, 109 bp, Homo sapiens
gtatgataagcagtgtgtagcaatagttagagaagtaaatagcttgatctagtgcaagtttatttttaagaatgccttatcgtgttactgttagtaaagttttgttttg

SEQ ID NO: 697360 - DNA, 1354 bp, Homo sapiens
ggagagttcgggggctcaacagtgcctaatccatatggtcgccacacgtcgggcaccgtgggctcgccgtcgtcatggagagcggagggcggccctcgactgtgccatttcagtcctcctgtggcacgcaccgtcgtgtggtcacctgcctggcctcgtgttatctccgctgttaccgggcaagaaaggtcggccgaggtcttcaccgaaagaggcgtcagagtgtgagctaagacatagaacgttcacttatgagagtgaaggactttcaaacggaggtacttctattcaagaacagcatccatgtgagagacattgccgcttgccgttaatcgcttgcttatcatgcacatggcgagctcgtgccgggtctagtttatacagagaaccggctttaggagcgagtctcaggatttgtagttgggatacaactttgcttagaaggcgcgaggtaacaaattctcaggcctgggacttggacgaactttacaggtggatgccaccaataaggaactgagctgtaggcgcaaatcagagactctagccacaacacctttattgggcgcacagtcgcacttggctccgcaaagggattccatttttacagtcccaggaagcgaacacaaggcaaacgaggttagacccgtttgggagcccgtgggttgagccccaagcttggaaagcggacttcgcgcgcccgtttcgcggaatttgcttgggggcttatgaatggccagaaggtttgcattagataagggccccacccctgtgggatacttcaaaggtttggtggacttcgatggaggcggcacattaagggacggaaacctttggtgcgggtagtttgaacgcacacaagtttgtcccaagccccaccgtttcgggaagtaatcgcaagaagttaacccctttttctaggccccggggactttggtgtacacacggtccggtgggccccacaacgttagactcccttttgcaaagcgcaggggggatgagcatggccaggcggcctgcccccaaccgacgtgggggcacgactttcccccaatagaaggcatgaaacgcttcgacagggtggtattgcaaatttgcctgttggcacaagactgggatagagagcgggcgagctccaaacaccacccggtatccacaacccccgtggtggcggcttttgtggagtccctgaaagacaccttgtgaagcttcgcgcaatatggggtaccctgagaaccataggaaacattttacctggacctaccccatggcgatcatatgggccttgtgtacccagagcctctcgaaaaaccaaaatgtgtgtgccaataattggcccacgcggctaaacccaata

SEQ ID NO: 697361 - DNA, 213 bp, Homo sapiens
agtacagccacgatagtctggccaaagacatcagctaagaaaggacaactgggtcctacgtgcttgtgactttccaacgcctgacagaccctgcaagacaaatacaatctggttcttgcctgcctctagtagaaatctccagaacatctcagccctgacacgttaataccctgcatcagtatcagaggctgctggccacacagactcaccaag

SEQ ID NO: 697362 - DNA, 389 bp, Homo sapiens
ggaggagattgcttacagagagggatacccagggagaaggctgtgtgacaacaaagcagactggagtgatgtgtctacaagccaaggaacaccaagaattgctggcaacaccaggagccgagagaaaagcatgaaacagatcctccgctagaggcttcaaagagagcatggccctgctgacaccttgactttggacttcaaactgtgagacagtaaatttctgttgtttcaagccatgcagtttgtggtgctttgtttttcagacttaagagatgaatacaacctgtatttatgcttttatattgatacgtatattataaagcatacaccgaaattgatattgaaaaatgcataaagatcaataaaccaatatttgaaaatttaaaaaa

SEQ ID NO: 697363 - DNA, 1068 bp, Homo sapiens
tacttgcatgtatctcagggttatatggtagcgaggctgggtggcgcccaggccgcgtgtgggggtgcgttcgcgcaggcccgctccctgcccccacctcagctcgtcacctccccgccctctcggcgtggcccctgaggtgcgcggcgcagtgcgcggagcgtggctggccagtgcagtgctggcgcggagcctaggccagtggggcctgggctgactcagtgcgcgtgtgtgtgctgcgctgtgtgtgatgtggagaggggtcggcccagcacagcgtccgggagcggctatgggccggagcagctgctgcccgccgccgttgcgtccgcggggaacggacctgcgcggcccctccgcccttgcgctctcggggcgcccgacgaccttcttgccgtggggcccggccgcggggagggtgcctcgggggaggaactgaactttgacgataaggtttttcacactcgctgtttaaccccacgggcttggcagacgaacaactggacttgttggactacatccggaggtcagccaacaaagccttccggaccttccacggcgatttccaaaggcggaatttcatcaatgccgttcaggaccttccccagaggttagcgcttcaaggactttaacagcgccaattgttgccgaacccagcggccccgcgcgtaaattatagtaatttcaccaggtcggacagacggggggttatcccgcaatgtacgggtcaagggctagggtccttgaaatttcccagagcgtcagggtgattcgtgtacgacacatccgatacttcccccaaaaaaggttgcgctggcgggaatttcaacaagcgggcggttagacgaccaagctttgcaacccccggggcgggaagcgcagtttttttataagcgttggtcctaccgaggaaaacaccttcaagttgcaacttttccaaattttatcccctccaactacccaaggtaggtcacacggacaatttattacccaacattttgaccacacgcaactcttgaagttgaagtaattccctcaagagacaacatgacagcaatgtggacgcaa

SEQ ID NO: 697364 - DNA, 979 bp, Homo sapiens
ggcagtgcaggccattgtacattgatacggacagtgatgtgctggacaaggccagtagcctcatgaggaggcgaacaaggcagctggccatccaggggaccctgagagccagcagcggcttgcccacggtggctccaagcagtgacccaggctctgaaccgctgtgtcagctgcctacctgtgccaggcgcgatgtggataatgtccctgagggcgagtcggacgatgccagcaagcgacctcctgagtgactcgcttcctcctagcactgggacatttcaagaagctcagatgccggttgaatgacaagctgctgctgggctgacatcaggcagcgcacagaactggtgcaggcctctcggggaacccctcaggacctggctcgagcctcaggaccgcatttggacaggagttcagcaccttcctgcgaagcctggtgtggagatggcaggccaggctccgagccaggaggaccgagcccaagttcgtgtccaacttgaagggcatctccatgtcttcaagcacacttcttctggctgcaggcctgccacggaccctgatgccctatctcgagagtcaggtggactgcacggtgcagggcagtcagcgacagcatcaatcagctcatcactatgtgacacccagaggacgccggcagaagagtgtcgataacgcctgcgggaatggagacggtccggaactcctggagaaaccagtccagcataaggacgtgcactacctggggctggacggacacggagactcaaagtgcgggagccatggatggctctccaaacgcagacggcaccgacgagtggcagcgccacagccaagcaggggccccagcccgacggcgccgcgggcccaccagcacaaaacaagaaggacaaatccgcaagagaacagccccgagccgtcccagccaccacggcaccccgacgggtgcacaacaacagacacaaagcacgtgagaatcggc

SEQ ID NO: 697365 - DNA, 628 bp, Homo sapiens
  misc_feature (33)..(33): n is a, c, g, or t
  misc_feature (52)..(52): n is a, c, g, or t
aaattttaactttcctttttaagttgttgtctnatgcaatcttataacccanacattccactgtgaacaagacatataatgcatgtgataactggtggtggttcttgaaatgaggatagtttagtatctttaaaatcagtgacaaccataactggtttattatttacaatgctatgtgtgaaaaaaacacttattctttcaattataggtgaccaaacataaaaatagggtcaacaggcctcctttgtccctaggcatggaagggttcaagggcttccataacaagtagaaaactagatctcacattggccgtcagagtgataaacagctactaacgttcacgtgagtagaaaagccaggatcggaagtcctgcacagcgtaaagcactcagtcatcatccgaaagaaattaacaaaaacctccccgtgcgtgtggaatggttcctaaaatgcaagaacggggacttggcagtaagagcagacatctgttttctcttgtacagaataggttcaacaaccagcagatagccagtcactggcatgtgactgcaaactgctcagagcatggtgaagctctggatggagaggggggattatattcctgctcgtgtgactgcctatttattga

SEQ ID NO: 697366 - DNA, 433 bp, Homo sapiens
gctaaatgtgtgccctttgcccatctcatcacacatcgagagctccggagcgcactatcccgagtctcatcaatacgtgatccatcgggcccagtcctcaatagtctatcggtgctgatacaaacaggtacagactcagtcggtcttccattgctgtcatatagaactgattgccgaaagtcctaagaggatctcaccaggctaaagtcaaggtgctggcggggctgtgtcccttctggaggctcaaggaaagaatcgggtccctgccttttctagcttctaggggctccagcttctaggtttgtggcctccttcctccatcctcaaagccagcaacagcaggtgaagtccttgcccatcgtgcatcactctcccttctgcctccttcaactttttttttatatttagggggaacgagtacaggattcttcca

SEQ ID NO: 697367 - DNA, 238 bp, Homo sapiens
gcagacgagcgtagttttggtttggtgtggttttttgaggacggagttcgactctatggcccaggctggagtgcagtggcagcgatctcgggccacggcagcctctgcctcgctggagtgcaaaggatcctcccatctctgcctcgtgaagtagctgggactacaggcacatgtcaccacacttggctgatgtttatttatctatctatctgtttattttgtggtggagcatgtgaag

SEQ ID NO: 697368 - DNA, 155 bp, Homo sapiens
  misc_feature (148)..(148): n is a, c, g, or t
agtggcatgtgatggtgcatatgaaatgtacttacaacactagaagaaagggctttataggacacagtgggagtcataaaggaagagtcagaagctcttttccatggggccccaaatggaaacaaaaacaaaatacacaaagcgcaancgcaggt

SEQ ID NO: 697369 - DNA, 408 bp, Homo sapiens
  misc_feature (21)..(21): n is a, c, g, or t
  misc_feature (37)..(37): n is a, c, g, or t
  misc_feature (64)..(64): n is a, c, g, or t
  misc_feature (104)..(104): n is a, c, g, or t
  misc_feature (128)..(128): n is a, c, g, or t
  misc_feature (161)..(161): n is a, c, g, or t
  misc_feature (198)..(198): n is a, c, g, or t
  misc_feature (281)..(281): n is a, c, g, or t
caagtatatgaactccatggntctcccaggctttcanaaggggaggggcagagttgggctcccnggctccccagtcccttccctcgcccatgcccaaatcatcncagtgggcctgtgatccccacaangagctctgtgcattttttcttaactgatacatnagtatacatatttatggggtacatgtgacagctggangcatatatacaatgtgtgtgatcaaatcagggtaactgggatatccctcacctcgaacctttatcatttcttatgttggaaanattccaaatcttctcttctaggtattttgaaatacacaataaattactgttaactagagtcaccctactgggctacagaacacgagaacgtattccctcctatctggcgatatgtttgtaataaact

SEQ ID NO: 697370 - DNA, 235 bp, Homo sapiens
  misc_feature (123)..(123): n is a, c, g, or t
tgctccagttcgcgctgcaatttatagcttagtttgctactgctgcgttttacagtttctgcttttgccgcggcggcttcttcggtttttttcaccgcagctgtttgagcgccacatactgcncttgctgaccacgggcatcatgataacgccgacataacgaccaattttaccgccgccttcgaagatccaacattctgtaacggtgtatcgacaaactgacgatcgtggctaa

SEQ ID NO: 697371 - DNA, 149 bp, Homo sapiens
  misc_feature (82)..(82): n is a, c, g, or t
  misc_feature (131)..(131): n is a, c, g, or t
  misc_feature (146)..(146): n is a, c, g, or t
gatctccattgcacatgaaaagaagatgaaaacaacactagtaccggaaaatactgtagtatgactctgtgctctgccttgnaactgccagtaccagtgccatgagacgccgtatggaggagcgtgttttngtcccccaggttatntaa

SEQ ID NO: 697372 - DNA, 309 bp, Homo sapiens
aacgtagtagacagtgtaacaataaaaacattggaggctgagaaatcgaggacgaagaagtgtactactagataggttaactgccctttaaatctagtggtgcatgtcttagtttccaattggaatttcagtgatctgcactgttctcacttcaaatgcagaggaaggataaaatagtgaagtagatatggccctgtaacagccaatatccgaatcataaagtgacatgctaataggatatactgtggcatttctgtgtattacagcttgtatggttagagttacttttccacaacttctaaggttaag

SEQ ID NO: 697373 - DNA, 214 bp, Homo sapiens
agaatacaaccccgcttctcccagccctccagcttcagcaaaggtgtcacaaggcgtggagctgacggacaagctacccaagacagaaagcaggtaatgtggagtgtctctagggagggaactcccatttgtccagagccagaacctctgacagaagactcttcttcatactccagagctatagacttctgaagattttacagagggtgaatca

SEQ ID NO: 697374 - DNA, 405 bp, Homo sapiens
cacaaagaatacaccaaaacattcacagtgattatctgcgcagtaggatatgtgtgcttgctttcctcttcatgtttctctgtattttctaaaatttctgctataaaggtatatttttttataagcagatatcaatgtaacatggaagtgagtaaaaaatgttctgccttaagagaaaataattaaaatgctcaaatcatttttattagtttttaaacatttgcccaatcctgaattacaaatacaaaaaaaaaaaaatcaaccttgatgatctattcttcctctctcttaaaaagaaaacaaaggaaacctaagtagaagttaagtttcactttttagtaaagttgtaatctaatctttgaaactatttggatgtaagtcagcatgggaaaacatatttctgct

SEQ ID NO: 697375 - DNA, 333 bp, Homo sapiens
  misc_feature (26)..(26): n is a, c, g, or t
  misc_feature (146)..(146): n is a, c, g, or t
  misc_feature (159)..(159): n is a, c, g, or t
  misc_feature (162)..(162): n is a, c, g, or t
  misc_feature (189)..(189): n is a, c, g, or t
  misc_feature (196)..(196): n is a, c, g, or t
  misc_feature (198)..(198): n is a, c, g, or t
  misc_feature (218)..(219): n is a, c, g, or t
  misc_feature (221)..(221): n is a, c, g, or t
  misc_feature (235)..(235): n is a, c, g, or t
  misc_feature (238)..(238): n is a, c, g, or t
  misc_feature (242)..(243): n is a, c, g, or t
  misc_feature (251)..(251): n is a, c, g, or t
  misc_feature (257)..(257): n is a, c, g, or t
ctgaatattgtagagcatgtcgcttnaagtctacttgtatctacggtggtgctcctaagggaccacaaatacgtgatttggagagaggtgtggaaatctgtattgcaacacctggaagactgattgactttttagagttggaaaanccaatctgagagnacnacctacctgtccttgatgagcagtagnatgcttnanatggctttgaaccccaatanngnaagatgtggatcanaanaccnntatagganactctnatgtggagtgcgacttggccaaaagaagtaagacagcttgctgaagatttcctgaaagactatattcatataaacc

SEQ ID NO: 697376 - DNA, 846 bp, Homo sapiens
cgtggaataggctgaggacatggaaatgacatcccccatgtgtggctctacctagcggaactggtaagcacccattctgcaggaaggtggggtgcccatgggggagctgtacagggagattgacaaagaccgtcgtgagatccgtaggtgcgaaacgcatgacttccctggtagctggagatcctgaggcctctcgtgtgacaataagcatgggtcctaaaaaggtggtggacgctgtggctgatgaagccgggtcttagctggaagtgaatttctacctgaatggccaggagattggtgcattcgtcgctgaacagaaggtggagtatagcctgggagaggagtcggaagcccctgtggcagagggcactccgccgtccgagtggagctgaacaggcagctgggagaagctgctgaaggagggcagcagtaaccagtcgggtgttcgactggatagaggccaaccggagtgagcacgcagatagtatccaacaagtaagttcagagccctcatgacggttgtctgctattctgcaatgatattagagactcccctccgagtggacgtcgcagtgctgaaagcgcgagcgaagctggtgcatgaaatacctgtgtgagcgagcagaaggagctacaggcgctctacggtctccaggtccgcttgtagtgaccttagaacagcctcccaagctgctgcggatgtgctttgcacgcaactgtcatgaacgaggacagtggtggaaaggaggatgtggttctagcaggttgggagagtagcaaggaccccgttgagcagcaaggggaagggtgttggccattaaatctgtaaaggcttcttcaagtggc

SEQ ID NO: 697377 - DNA, 991 bp, Homo sapiens
tcttaggacatctgaatatttattggaaaagccacagttttcccacacttctccattaacgtggtaggcttttattattaaggcaaaagcaagagtggatctccactacttttactgtggaaagaaattagcttctgcagcaaaccccagggtttttgcagttacagattcaaaagtgcaagtgtacattgacagattttaaaaaacaggtttaaaacaaaaaaaaaaaaaaaaaaaaaaaatataaaaaaaaaaaaaaaaaaaaaaaaaaaaaaaaaaaaaaaaaaaaaaaaaaaacgagggggggggcccacaagatacccccgcggggggcgccccccacgcgggccacccccattcttggtacaagggggcaccacaaagaggcggcgtcataattaacagggcgagaggggggcgcggcgcgccttaacaccagggggacagggcgcgagaaaaccagcgcgcccgcggggagaacaccaggggagaagacaccacctatcccggcgggaggaggacacaaacacagggccacgcaacctcacaacacaaccaactataaaacacccaccagggcacaaactaaaaaaaaatacaaaacgccaataaaaccggggcccaacacaccagcgaagaacaaaacgcgcgacggacgccaaaaaaccagccaccaccacaccgaaaaacacacacaaacaaaaaactctcacaacaccgccgccgaacacacacacaaaacacaccacaacccacaacaacagaacaagacaccacacccgccccacagcaaaggacgtggctaagtaagaccggcctcgccccgagggcacacacgcaacgacgacctcagggggtgtcggggggagaaagtagcgcgtcggtccccgcacaagtcgcagactccgcacgagggggaaagggttgggggtgcgtgtggcccaagccacccacacaacaacacagggggggggggtggcggtgcgaccac

SEQ ID NO: 697378 - DNA, 463 bp, Homo sapiens
ggaggtggaggttgcagtgagccacgattgcactattgcactccagcctgggtgacagagcgagactccatctcaaaaaaaaaaaaaaaaaaaagaaaaaaaaaaaaaaagggatttggtccttggggtagccaagttttcatttggctcagggaggggttcaagtcttaaaatccttttcatatcaacacaaaatttctatggaggatgtagctttccatatgcagtcatcccctttcatttctcacgttgggtgccccctgaggcgtaagagacacggtacaggatacaattggtgatgctggaacagtgaccctaggtctgtctgtccaattctacacacctcaccactgtgtgactcagctataggcttaaatactagtgagacggggaatgcttaccctgttatttggttccattgatttggtttccaacttaacagcgggactctttgttgttacgc

SEQ ID NO: 697379 - DNA, 977 bp, Homo sapiens
gagcggaagcagcgagagggcggtggcgccgggggcacggctgggcggctccgcccagaagagggccgagaggcggggcggtgcccgccaccgcaggacccgctggcgccctctgcaggccgacaggacagcgactcaaccagtggcactcatctattccttcatcctccctcttggggcatttcctcaggcgcacactatttctgtgtgtctgggcagatctctcacggcctccgacttcccgatcaccatttcttccacattccaggccgggcgtgttcagtgtcgttcggcgggaaaacgtgccaataaagattttatctatcattctcgactcccaaggatccccgcactcacccattaagcaccgccgagatctgacggacgcggcttaccatggcggcggccttctgaatgcctcgggagccttagacagaagatggcagacttgctatgccggcatgagcatgtggccgtgcacggtcccggacccagacgccaacacccgggcctgatgaggaatcctgacgagacccgctcacggactccacaggaggcccgacggacccgcacgggggatgtgcccgatgggccggacgcccaggcacgactctcgagatccactgactgcatttcgcaggcacgggcgcacgcttcaagggccacatccccgactgagccgacgctgccaggcgctcgaccccacaatcgtaccccacggcgtcacatctgcgacaccagcgcaacaagccatgatgctcgctccctgcgcagcaaagttagccctccgggccaccccctcacacgggaacctgtgcgaagacacctcacacggcccaccccaagaacaggaggcacgccactaggcgacctacactcacgaccacaacaacctgcggcagggacccaagacactcacacaccacggacacgacagagcaccaccgggcacctacaacacggcacgccgcacaccg

SEQ ID NO: 697380 - DNA, 111 bp, Homo sapiens
tggtaccgtggaggaatctatttgccataaaaaagggataagttcacatctttgcagagacatggatgaaactggaaaccatcattctcaccaagaccctggcacgatctt

SEQ ID NO: 697381 - DNA, 288 bp, Homo sapiens
gtttttattaccccctcccggcccccagacccatgtgatttttgctttcttctttagcaagatattttggtttctaaataaggaagagtctttaatgagcccccgagccccagtcttttcagactcatggattggtatgaggggtttgaacgtctcctagccaatcagaactggctgtgggcccccctagcccggccccctttcagggcccctggcaggccttcctgagttaaatttgtagttgcatatttagctttgcccatttgaaataaaccccggttgcagcca

SEQ ID NO: 697382 - DNA, 218 bp, Homo sapiens
actgattccagagacgtcagacattactgagcgactgaactgaactgtacgttacgtagcagtctgggaaggccaggcaggcaaggtgtgtctcggctttttacttaggtatttatttgtcaatgaccattgttacacgaagatctgttgaagacttttaattgctgatgatggaagcaaatatgcaagaaaaagtcattctttgggggccacgctct

SEQ ID NO: 697383 - DNA, 269 bp, Homo sapiens
catgctgggcttttacaataaatgggttaccaataattgcctcattttttcagtgctattttatccaattttgggctggctctttttctcagacttcttcattggcttttcactcttaagtaactggtctgcgttctcattcttcatcttttttttcttctccttctcgggtatctcaagcttttcatgctttttagactccttggcttttttagggggaacattccccaccggcagctcgtcctccagctgagaagctgaggcggccg

SEQ ID NO: 697384 - DNA, 128 bp, Homo sapiens
cttaggcttcccagctaccggataccagcttaaaattacaataccagggttagggggatcacctgggccttcctatgtgtaggtagaattccggtctcttcccagcgcggggtacggagctcgatttc

SEQ ID NO: 697385 - DNA, 334 bp, Homo sapiens
  misc_feature (7)..(7): n is a, c, g, or t
  misc_feature (9)..(9): n is a, c, g, or t
ggaaaancngtacacaaaggatgtataatcctgcattgacttaaaaaagttcattaatattaaataatatggatatatttggctatataaatgttaaattaatttcacttttttactatgttaatatgttattggaatatttaaaattacgtatgtgacttgcattgtatttctattgaacagtgccgctttagagaacaagtaatgaaagtattttccctccagccttctaaatggtgtgtcaaatctgtagccatttagggaggtcaagttaaatttgctccctggaagaatcacttaacttgcagagtgtattctgatatttcccattatg

SEQ ID NO: 697386 - DNA, 295 bp, Homo sapiens
cactgttgcctggcctattcatttctctctgtttatcctttcaccactctctcttccaggccattttcgtttccacttggactgggtaagacacccaactggcccctcagctttcattcattcttaccttcctcactacagacttttcatcttacagccacccccagagtcttctaaaatcttaaatctaatcccatgatacccctactcaaaatctaccaattttttgtcttcacattcgaatatccatctggggccagacacagtgtctttcgctggtactcccagtactttg

SEQ ID NO: 697387 - DNA, 180 bp, Homo sapiens
caggaaagagcagatctgtttcgtcagctctaaaaggctctcatcgccctggtgcagggtcccgggtgatggccacgttgagccagtctctcactgtctgagagttggccctggtaaaaagaggtccgtgacggagaagttcccataaggcgggttaccgcacctccgaaatcggaatca

SEQ ID NO: 697388 - DNA, 140 bp, Homo sapiens
  misc_feature (15)..(15): n is a, c, g, or t
cagggtcaagatgantccaccatctcagcctgctgaatagctgggactgcaggcacatacgagcacacccaagctaattgttgtatttatttgtagagactgggtcatataccatgttgcccagactgatctcgaactcc

SEQ ID NO: 697389 - DNA, 135 bp, Homo sapiens
cccacaggtcaaaaagaaccttattacttttatgatgccacttatgctttcttgccagatgccttggagcaggtgctttctggctgagcttttgaccctctgtgtctctccagccgtatagtagtagtagcgggc

SEQ ID NO: 697390 - DNA, 404 bp, Homo sapiens
  misc_feature (156)..(156): n is a, c, g, or t
  misc_feature (392)..(392): n is a, c, g, or t
aggggaatctggaacatgttggattttactttgaccctaaactccgtgacttctgaactccccatttcccccacttttggggactaacttaaaaaaaaaattcctttagagatttcttcttaaaagctaaattccgggccacgtgtggtggctcanacctataatcccagcactttgggaggctgaggcaagaagatcacttgagcccaggagtttgagaccagccagacccatttcaaaaaaataaaaaattagccgggcatgctgtcatgtgccttcagtctcagctacttgggaggctgaggcaggaggatcacttgagcccaggagctcaaggctgcagtgagctatgattgcgccactgcactgggtgacaagagcgtgactctgtnctggaaaaaaaa

SEQ ID NO: 697391 - DNA, 118 bp, Homo sapiens
gtagactgagttattttatttcgctatttccagtttgaagctactatcatgggcgtttagagttataccctccgtacttacggattgttaaagaccaagacacccagagtgagatgca

SEQ ID NO: 697392 - DNA, 391 bp, Homo sapiens
cagttccaaatattctcaagaaaatcagtagctatacaagcagtagaaatagtttgtcatatgtcagtcatcagttttcagaagtaaataacttctatgcactaaactacaatgcattgaaaactaaatattttaaatattcgttatagtgtatttgaactcttgaactgagttctagaatatctttatgtatttaatatacttttttttttccaaaattgaggataggtgaatagttatctaaggcttaaaaagtgttgccaatatagtttttttgttttttggggtttttttgacacagtcttgctctgttgaccaggctggggggcagtgagctgagatcgcaccactgcactccagcctaggtgaaagagccagactccgtctcaaa

SEQ ID NO: 697393 - DNA, 366 bp, Homo sapiens
gaatgaaattgaatggaaaaattgaattaattgaatgatggaattatgccattaataattaaatgcccggtgccgtggccccctcccgcctgggttataaagccagtctctttctccaatgggatgaaattaaattaagaaattaaattattaattattaaatgcccagtctccctcccaattaaattaaattagattgaattttgaattgaattaattgaacttaattgtaaaaattgaataattaaatgcccggtgcggtggccccctcccccctgggccataaagccagttttcctctgggaattaaaccaaattaaattaaattattaaattaataattaaatgctgggtggaattaaatta

SEQ ID NO: 697394 - DNA, 506 bp, Homo sapiens
  misc_feature (63)..(63): n is a, c, g, or t
tcaacttctctcacgctcttcagggatgagagaaggggagtggtgtttgagcgctacctccgnatagggtactgtgtgtgcaccttcgctgttcctgccttcagatatttaccaagtacccgctgtgggtcaggccctactctcaccctaaggatgcaacatgaagcacagcagaggtggagaagatcccactaacacacacgccgattggaatgtagggccatcagtcctttcgacatgaattttccctgtactgggggtagagctggtaactggaggatcatccgattatagaagacagaaggcctgctacttgcccctgctgttaggaggcgggcttcctgaatggctttctgtatacatgaagaatatcaagacctttcgttaaggtggacaaagctaagttccatcgattacaagaggtctctgggctgactggctataactgacaagaccctgatgcgcggacaccttttgcttgttattgtattagtacttactacgag

SEQ ID NO: 697395 - DNA, 692 bp, Homo sapiens
ggaaggagacggagagcatagcacctgcagccatgatggatgtgggcagcaaagatggtcctgactggagagccctgccggatctactccgcagctccccgtggaccagattaggcattccactgctgcccgagtagcacctgaaaccgccttctaatctgtggctggatggtggtcggtcctcatcgtcgtggtgattgtgggagccctgatcatgggtctccagcatgagccagaaacacactggagactggttctggagacttgatcatctggcggactgccaggaaaggcgcaatgcacacgcctggcccctgaagtgaagtcacctggttaacacaacttagacaacactatctcccaatccaggaggatcccaacatagggatcatcgcatgacgtgtctggatttagcgagcaaggcttgcaatgactcagcgcactacacgaagcctcaagcacaccattggcacacgtggtatgaccataggaggttcaattgggcaacgtaatctgcgcgcgggcgcgaggacagcaacgtgaaatgtcgaccagaaggttcctagtcgaaggagagctccgttcgacctttacggaagacgctatggtatcgcaagagcagatgcgtagtcccagtggggccactaagtacgccgtgatgtgtgggggcacatgtacggttatgtaaaaag

SEQ ID NO: 697396 - DNA, 836 bp, Homo sapiens
gctgagccggccgccgaggattcagcagcctcgtgctggagtccgcctcgcttgccgagcctaccgtacccaccgtgtatcgcctatcgcccgtcagttgagagcgccgcgcttccggataccgtttgcagcgaggaaaaggaatcgtatcgtatgtcatgttatccataatctccactctttcgagcccttttgcatgagtgcaagtaacgggtgatgacctgcttcctgctggcgactgaggattatatccagtatatagcgaattcaagcagagaaacggcaggaaggaccctttactatctgtccaagggatcgctgactgacttacgagtaaacaagaaactagtgaaggcgtcttaagaaaactctttgccttgcaatggtactgtaagttgagcactccggacataatgcgagaaagtagtttcacgcgtacaggtgtgaccaacgcaagaatcatactgccaagttcctcggtacagaacttgcgacgtggctaagagacgactcaggtgaaagcgtccatggcgcttattaaaggtgcttagtgggctcagctgaacgcgttacatgtgagggaattcccttcgccaagtgaagctagaatttcccttctctcactcttgtcacaggtttaaaaacctcgacagcttgtatcattgtaacccatttgaggtcccgctttaacttaggactaggtgtaagtcctgttcattgccattaaactgaaaggagctaacaaacaaccgccatgcatacaccaagatcagccgaacaaaatgagggcggcgacaaccccaaaggacttgtcctgttctctcgtttccacagca

SEQ ID NO: 697397 - DNA, 205 bp, Homo sapiens
ctagaccacgcgtccatgtgattcgtcgctagcgctgtattgcctctttgtgtctcgtgctcagctctgtttcttccgtcctggttatgctagctagccgagctgctcttctctctttatagaaaacaaacaaatgtgtgagtttgggtgcaacatctgcggtggatgagagatatggcgatttcccacggcataggttggtgta

SEQ ID NO: 697398 - DNA, 1018 bp, Homo sapiens
ggccatatttttaaatttcgaaatcatttttgtttgtaaagatacaggatcttactcttgcctaggctggattgcagtggtccatcatggctcgctgcagcctcaagcttccgggctcgggtgatcctcccgcctcagtttcctgagtagctgggactgcaggcatgtgccaccatacctggtaattttaagatggtaagaaacgaggtctcactatattagactaggctggtcttaaactcctggcctcaagtgatggtcctggcctcagacctgtcacagtgctgcagtgaggtgtgatcgtgccgattcagctgaggtgtgatcgtgccctctgaactccagactaggtgacagaaggagaccctgtctcaaaaaaaagaacacagaggccgggagcactggctcatgccgtgtagtcccgagtactctcgggaggctgagcgcggaggtatcacgaggtcgggagatcgagaacatgttgggcaacagggtgaaaagcgccactctctacgtaaggatagcgtacagaaatggaaggtatgcccgaggccactggtggaaactgacgtggtatgacccaggacagtggacgcagcatagagcgtagggggaacatccgttcaggctgggtaagagcaacgatgttagcacggtgagcagagagatggcgaaccaccggacactcacatggggcgggggacaacaactaaggtgatgccatgcacacgggactgggatcagtcccgcataatacacgagcagacaactggaagatagggacggacgcgaatcgcagcatgcagacgcacaaggaagaaggataccggaagaggagcggtcgccaggaaactcaaaaaacaggggagagcaaccagtgtccgggccgcaactctacccgaagggacggcgagtgggaatcgcacacacccaagaagaaatcggcgacagcggagaggaacaacaggaacactagggcgtacaaaagacagctgccacggagccaccagaggaacaa

SEQ ID NO: 697399 - DNA, 301 bp, Homo sapiens
ctccgttcatctccccgctattcattacttggcaattttaaacgccacgcaagtggtgtttttaatctgttcccgacccttctaaatttccaaaagagacaccttttcttttcttttcgatggaagtttttcttgtacacactcgtgcgcagcctgatctaattgtaatttgtatggagacactcataaacagagcatgtcatgctgcgttcatgtctattttggatcacaaagatttatcagcttttgtttagatgcagtttgggttgatatgaggtaaataaaatgtacttgtttatta

SEQ ID NO: 697400 - DNA, 116 bp, Homo sapiens
aggtgacgtagaaggaataatactatcgctgttcattagctaccctcataaccctccacacccactccccctctagccaatattgtgcctatatgccatactagtctttgccgcct

SEQ ID NO: 697401 - DNA, 614 bp, Homo sapiens
aagcagtggtatcaacgcagagtgcccaccagccttgtcctaataaaattaagttgtatcattaaaaaaaaaaaacaaaaaaaaaaaaaaaaaaaaacaaaaaaaaaaaaacaaaaaacacaacaaaaaaacacaaaaacaacactgtgtgtgcctgcgcgccgccccgccgccgccctcataaaaaatctttctatcacaaccacctcttgtgtgtgcgggcgcgccgcgcgcgcgcccccctatggagatagtatcagatagagagaagagagcggagcacactatagtagtgtctctctccatccaggaagaaagcaaccacctcgagcgaggaccatacaaaatacagagggggcgcggggtgtgtctccctcccacccacataaaatcagaagaacgcgcgccgcgcggggcagagaaacgacacgaccgacgtcggtattcttgtagcaacacaaacccaataccacaaggaagagagggtgtcagtggcgggggggagagctgattacgtacgagggggagtttattctcactactaagagggagtcgattccacaaagagagcgcacggagcacattaatatctacataaatactatctcgccccg

SEQ ID NO: 697402 - DNA, 214 bp, Homo sapiens
aacccgcgaccgcctttgtatttctggaataaactcaacttagtcataatgtattatatacacttttaaaatgttactagattcaattcactaatacttttattagaatttttacatctatgttcatttcaaaagttagatgacctagttccctttcttctaatgttcatgtagaactcataaaactaatactttttccattctttgtaagagc

SEQ ID NO: 697403 - DNA, 215 bp, Homo sapiens
tgacatctagaggctcccccgatttacatctccgccttactcctcttctcatggaatggtctgaaatattttaatagatacgtaagctatcactagtaaatagctcctgataggaagacgatgctccatatatttacataaatctctttattcttcaacagtggtttctttctcaaagcatgcttttagtcagggagccatggttcaacagcagc

SEQ ID NO: 697404 - DNA, 168 bp, Homo sapiens
  misc_feature (56)..(57): n is a, c, g, or t
  misc_feature (59)..(61): n is a, c, g, or t
  misc_feature (85)..(85): n is a, c, g, or t
ctgatgatcatcgagttgtccagctacctggacagcggtggcgcccacggcatgcnngnnngtggcttcatcaactactccgcangctggacaaggtactgaccctgcaggacatgttggtgccgggccaggaggacaccttctggaaaaccgtcgaggagtcatcag

SEQ ID NO: 697405 - DNA, 127 bp, Homo sapiens
ccgggccatgtgttccaggtatagtgtgtggatcggtgcacgtgtgggcgtgtgcacatgtgtgagtgtgtgtgcccaggtggatgagtgtgtggactaggtgcatgtgtgggcacacattatggag

SEQ ID NO: 697406 - DNA, 699 bp, Homo sapiens
agcgggcctgtcccgtcccctggtggccgtctgggggcgactagtcctgagagaaaccagacggaagctgcgctgggactgacacgtggacttggtgcggtgctgcccgggctgggtcatgctcgtggtgctggtgaggcagccccgggacacagtctgtgcccactccgtcttatcacctccaagcccggatgcaagactaccccacagacgaggtccctgcgagggacatggtcggggacacccagtggtccaggcccgaggtgccagtgctatggacggggacgcgtgctgctgggcatcgtgccgttcgtgtactgcgccctgctccatgcatgcccatctgcaccgtctccatgagccaggacttcggctggaacacagaaggaggccggcatcgtgctcagtcagcttcttctgggtgctactgcctgacacaggttgtgggcggccacctcggggatcggattgggggtgagaaggtcatcctgctgtcagtcctctgcctggggctccatcacggccgtcaccccactgctcgcccagctgagcagtgcccacctggccttcatgaccttctcacgcatcctcatgggcttgctccaaggggtttacttccctgccctgaccagcctgctgtcgcagaaggtgcgggagagtgagcgagcttcacctacagcatcgtgggcgccggtccca

SEQ ID NO: 697407 - DNA, 460 bp, Homo sapiens
  misc_feature (37)..(37): n is a, c, g, or t
  misc_feature (61)..(61): n is a, c, g, or t
  misc_feature (107)..(107): n is a, c, g, or t
  misc_feature (140)..(140): n is a, c, g, or t
  misc_feature (398)..(398): n is a, c, g, or t
  misc_feature (410)..(410): n is a, c, g, or t
aaatgggggaaaccaaaaaaaagccctgggaaagccntccccaaccccggccggggtgggnccggggccccggccttccttaaggaaacccttaaggttggggaatncccccccccggggggccttggccaaggggaaanttttccggccggggccccggcgggttcccggaaccaaccggggccttggccggaagaaaaggaaccggacccaaggaaaaaaggggattggccccaaaaattcttggttccaaaggatttccaaaggaaaaaattaaagggaccaaacgtggaaagtttaaaagtttcgatggcagcagataccttttacaccctggttcatcactggacaaagagaagggcagagaaactggaagcagttccctgccccccggtttnggcagtgaaggnattgaaatgagccagacacactggttgggctgtattatattatacttcct

SEQ ID NO: 697408 - DNA, 83 bp, Homo sapiens
gtggggtgtgataggtggcagggaaaatatggaattctcacggatgggtacgattctcatagtcccccttctgtcgtcttctc

SEQ ID NO: 697409 - DNA, 313 bp, Homo sapiens
gtacatgtatttctccataggcagagttgccgaatcaataggcatgcaagtttgtacttagatctttaccaggtcagtggattgtttccaaagcacatttttgcgcaagcactcactgtgctatctgaaagatcctgaggccgagcgtggtggctaacgcctgtaatcccagcactttgggaggcctaggtgggcacattatgaggacaggaaatcgagaccattctggacaacatctagaaacctaatgtctactaaagatacaaaaatcagccgggcttggtggcatgtagcctgtaatcccagctgcttg

SEQ ID NO: 697410 - DNA, 863 bp, Homo sapiens
cttctttggcgtcgccaggcgagccacatcgctcatacaccatggggaaggtgaaggtcggaggtcaacggatttggtcgtatagggcgcctggtcaccagggctgcgttttaagcatctggtaaagtggatattgttgccatcaatgaccccttcattgagcctcaatctacgatggtttacatgttccaatatgattccacccagtggcgaaattccatggctgccgatcaaggcatgagaacgggaagcttgtcatgcaatggaaatccccatcaccgatcttccaggagcgagatccctccaaaatcaagtggggcgatgctggcgctgagtacggtcggtggaggtccagctggcgtcgttcaggccagcgcatggaggaaggctggggctcatttgccaggggggacgccagaaacgggtcatcatctctgccccctctgcgtgatgcccccatgttcgtcatgggtgtgagccatgagacgtatgacaatcagactcaagatcatcgagtaatgggctccgtgcagcgatcaaactggcttagcaccccctggccgaggtcatcccatggacaaacgttggagtatcgtggaagagacctcattgaagccacgagttccatggccatctacttgccaccccacgaaagattgtgggattggcccctccgggggcaaagtgttggagtgattgggcccgcggggctctcccagaaacttatgccctggctcctacttggcgctgccaggtggtggcaaggtctcctgaaagaagggaggcactggatgacaacaggcccactggcaagtgccagggggctcgacgccctgtaaaacgcgcataagactcacagggga

SEQ ID NO: 697411 - DNA, 413 bp, Homo sapiens
  misc_feature (7)..(7): n is a, c, g, or t
  misc_feature (28)..(28): n is a, c, g, or t
  misc_feature (65)..(65): n is a, c, g, or t
  misc_feature (72)..(72): n is a, c, g, or t
  misc_feature (74)..(74): n is a, c, g, or t
  misc_feature (81)..(81): n is a, c, g, or t
  misc_feature (87)..(87): n is a, c, g, or t
  misc_feature (112)..(112): n is a, c, g, or t
  misc_feature (120)..(120): n is a, c, g, or t
  misc_feature (125)..(125): n is a, c, g, or t
  misc_feature (141)..(141): n is a, c, g, or t
  misc_feature (178)..(178): n is a, c, g, or t
  misc_feature (186)..(186): n is a, c, g, or t
  misc_feature (192)..(192): n is a, c, g, or t
  misc_feature (208)..(209): n is a, c, g, or t
  misc_feature (214)..(214): n is a, c, g, or t
  misc_feature (217)..(217): n is a, c, g, or t
  misc_feature (226)..(226): n is a, c, g, or t
  misc_feature (233)..(233): n is a, c, g, or t
  misc_feature (237)..(237): n is a, c, g, or t
  misc_feature (255)..(255): n is a, c, g, or t
  misc_feature (266)..(266): n is a, c, g, or t
  misc_feature (289)..(290): n is a, c, g, or t
  misc_feature (311)..(311): n is a, c, g, or t
  misc_feature (321)..(321): n is a, c, g, or t
  misc_feature (340)..(340): n is a, c, g, or t
  misc_feature (350)..(350): n is a, c, g, or t
  misc_feature (358)..(358): n is a, c, g, or t
  misc_feature (401)..(401): n is a, c, g, or t
  misc_feature (404)..(404): n is a, c, g, or t
gtttttngtcatattgcctctagatttncttctgtgcttctctctatctgctctggaatggatgngtgaatntnttctgcngctgtnttagggaacatattgatagacatgnccaccttncagancaaaatctctctctcnctttttgctttttatagaaaagcaagtgcatagttanttaattgncattcnatttttccagatattnncactnccntataatggnttgttcnttgnatacctgtaaaattgtgncaatttccaantattaattgtaggtcatatctgnngcaaatcattcttggtctgtnctttctaggntattccatagaatcaacanattttaaggnctgaaagnatactgtcgaaatcacccagtcccaaccccccaatttaaaatngantctagtaaa

SEQ ID NO: 697412 - DNA, 981 bp, Homo sapiens
ggtatatggtcaaatgaatgaaccacctggtgctcgtgcccggatagcatctgatgtgtggctgtactgtgagtctgacatagcttccagagtatccccaaagcaaggaggggctttcccaaaaatgggccaaacgttggggagtttaaatcccctgtttcgggccgcccttttcctccaaacttgcttcggttattaaaagcgttttttgtggggggggcaaaaaacgttttccacccgcaaaaagccctcttttaaaagtggttgtgttccccccccggttaataaaacggtgttctgagtgtgtcccccccgcgggggggtgaaccaccaacactgtgtgttttgtgtgtttttttctgcccccgataaaaaaagaccgcgagttgcccagcagtggccccccacaaataaaaaaaaaggggggggggtcctgggcgggggtggtccccaagaaaattggtgggggggagtggggggaaataacacccgaaaagggggaagggaaggtattgtttccttgaccgattcaaattgtgagtgactcggtaacatccggctttcctgtcctgaagagggctaatcagacgtaccctgagacacttgacagtgggtacctatgcatgggaacaagaattaccacgtaccgaacgaaggagatcttaatcggacttccctttttgcgttttggattaaccacgagctaatcttaataggtagcgcctgcgatgactagacgtgtgaatctagatccgcattggctctccacccccgcgcgatattttggggggaacacaacacggtagtgttgtattcaaataaaaaaaaaaagagcaccaaccccacaacaaagctagtttagtttggaaggaacaaaacaaagagacgatctggcgccaaaatataaaggagagggagagacaacacaataaatctgtcttgactatccacagacccactcagcgacacaaaaccaaggag

SEQ ID NO: 697413 - DNA, 929 bp, Homo sapiens
  misc_feature (90)..(90): n is a, c, g, or t
  misc_feature (102)..(102): n is a, c, g, or t
  misc_feature (105)..(105): n is a, c, g, or t
  misc_feature (108)..(110): n is a, c, g, or t
  misc_feature (123)..(123): n is a, c, g, or t
  misc_feature (129)..(129): n is a, c, g, or t
  misc_feature (132)..(133): n is a, c, g, or t
  misc_feature (136)..(136): n is a, c, g, or t
  misc_feature (147)..(147): n is a, c, g, or t
  misc_feature (149)..(151): n is a, c, g, or t
  misc_feature (918)..(918): n is a, c, g, or t
cgcgtgcgcgtttggcaagacagtaagcggggccgcgatcgggatgccccgcgcaaggcggtaagtgacccgtattaggagaccgaccanaggtgaacgggncanggnnnaaggtaccccaanctaaanccnnagngggaacccctncnnncgcaccgtccttgtcagaggaattggcaggtattcccgatctgccatgtattccagaaaggccatgtacaagaggaagtactcagccgctaaatccaaggttgaaaagaacaaagaaggagaaggttctcgcaactgttacaaaaccagttggtggtgacaagaacggcggtacccgggtggttaaacttcgcaaaatgcctagatattatcctactgaagatgtgcctcgaaagctgttgagccacggcaaaaaacccttcagtcagcacgtgagaaaactgcgagccagcattacccccgggaccattctgatcatcctcactggacgccacaggggcaagagggtggttttcctgaagcagctggctagtggcttattacttgtgactggacctctggtcctcaatcgagttcctctacgaagaacacaccagaaatttgtcattgccacttcaaccaaaatcgatatcagcaatgtaaaaatcccaaaacatcttactgatgcttacttcaagaagaagaagctgcggaagcccagacaccaggaaggtgagatcttcgacacagaaaaagagaaatatgagattacggagcagcgcaagattgatcagaaagctgtggactcacaaattttaccaaaaatcaaagctattcctcagctccagggctacctgcgatctgtgtttgctctgacgaatggaatttatcctcacaaattggtgttctaaatgtcttaagaacctaattaaatagctgactacaaanaaaaaaaaaaa

SEQ ID NO: 697414 - DNA, 1135 bp, Homo sapiens
ggccaccagaggtttcccagagaggaaggcgtggctccctccctgggccagtgagccctggctgccgccgcggccgcggtcccagcagctggagtagggctggcggctgcagccccgacaccatggggggcagacccagccccagaccgcggtaaactgccgacactccgaccgaccgcaccgccgccgcgatcatgcaccccatcccgacgtgcggactcatcatgagacagccaatccccatcactcacctcgaaggccaacaatgaaggagacccggggactacggaggggatgcccaccttctgcaccccgacctccaaccactcctacacaggcatgtggggcagccccgaggcgataccgcccggaggacgacgagaggcaacctcacggcgcccctccagggatctggcgaggattgccggaatcgagtgatccgtggaccttcccgatcaccatgcttgctcactgggtaaacgatgggcaaacgcacttggcccatgcatgcatcggtgatcggcgcatgctaccggcgccgggagaagcaagcgcaagcaagtccttcctgactgtgcatccggcatggctggcgctcaccgacctggtccggggcagcttcctcaccaacccggtcgacaacagacgtgaacctgtccaagcagacgtacgagagcacaatcgaccccgacaggggcggctacaggaaccctataacagggactgaccaaggacagtgacaccggggtccaccacggcgaacaatcgcgagcgcgcatggcccgcagagcaggaactggccacacaggcgccgaaagggaaccgagcccaatgaaaacacaggagacacacagaaagggcgtcacggaatgaggaagacagagacacatatacaccacgagagacaggggtaaggggagcgccagacacccgtcacggcctcgggagaggagtgactcaacgcacacaactaaggaggacggagactgctcaggacatgggaacaaagtgaacggatgcagtcccagaggggatagcagcaacacgatgagcccaaaagagttggcgcgcagagacaaagacgcggcgacgaacaagaagggtggtacaccagcaacgaactcccacgagaggc

SEQ ID NO: 697415 - DNA, 676 bp, Homo sapiens
  misc_feature (13)..(13): n is a, c, g, or t
ctatagaaccagnggatcccccgggctgtaggaatacggctttagcacacccttacccctgggaaaggaatgctgatatcatgaagcttccataaaatcccaaggagacggggttcagagagcttcacggaagctttgagtccttcccctaataccttgccctatgcatctcttcatctgtatcctttgtaatattctttgttataaactggtaaacataaggaagtgtttccctgagttcggggagccgtgccagcaaattgaacccaaagaaggggtcacgggaaccccaacttgaagctggtcagtcagaagttttgaaggttctaacttgtgactggtgtgtggtgcagccggtcttggggactgagccttcaacctgtgggatctctctctccaggtagatggtgtcagaactggattagaggaagaccagctggggtttgctgcgcggtttctgctttagtcacagaaagcttctgggttggtgattgggtgagaatagggaccatggatagaggagaaggtttttctccggaccaccaagacctgggtggaccttaaggtttcctcaacctgaggttaagaaggaccctgttttgtgggcctaccaaacctattggctgaaattcaaggtgcctgtacagacatcccaccggcaggggcccttgattgt

SEQ ID NO: 697416 - DNA, 1335 bp, Homo sapiens
  misc_feature (1324)..(1324): n is a, c, g, or t
catggagtaaaatgttcgccccccacgcggaaaaaaaggggcgccgcaccaccaaatggggtggacgacccccaagatggaggagtgggggataaaggtgtagatccgccgtgccccagatgtccgccccggccctgtgtgaaagaatgtggccgcccccaccaaagaggggggttttgtgtagagcaaaagaaaagggcgaaagaaataaagatgggcaatcaacgcgctgaagggacaataaaaggggggttgttttctcttttctgcggcccacagcgccctctggggtgttagcgacccccagcagaaaagccccaccagctttgttgggggtgtttggggtttgagagcacccacgaggaataccgggcggcccggggttataaccccccccgcggcgtttggagttttttaaaaagaagcttgtgtccggcgcaccaagaagattggcgccccttatagaaaataatgttgtagtattgtcgccttagtctctggagaaaagaagattggtgggccccccttgtcgacacaaaaggcctctgcttgagaggggccccccccgggcccctcttgagagcccccctcttccaacggttccacagagcaacacgcctggatgagagaaaataatctcgcggcggagagccactcgccacctttataccccccgccccgcggggggacccaacatctgtctggagatgacactttccctctcaccttggggagacgccccacacacgggggggccacaagagagggggttgggtttttttcccctcgagaaggccacagtctcggggctaaagtggggcctctatatatacactctcgtggagactcgggagacctctctcgggtgcgctccacacattcgagaggtttcccttctatacgagaggagacacaccaccccacgcgaaattttggtcacgtgtgcccacaccttcacacgcccacaatttcgagatatatcacgccacaatgtgttaaaaattctcccccaaacactctttatctgaatgcttatacttctacaaaaagaaagaaagctgccggaaaggcccacgagcacccacggaaaggtgaagaatctttctgaacaccacagagaaaaagaggagaaataatgaggagattacggagcagcgcaagattgatcagaaagctgtggactcacaaattttaccaaaaatcaaagctattcctcagctccagggctacctgcgatctgtgtttgctctgacgaatggaatttatcctcacaaattggtgttctaaatgtcttaagaacctaattaaatagctgactacaaanaaaaaaaaaaa

SEQ ID NO: 697417 - DNA, 980 bp, Homo sapiens
aggaggcctgggcagtggtgtgctgatgtggacctgacggactgcactggtgctgggctggtgccgggagccatggagcgcggccctggggccctggtggtgcgcgttgccggtggtgggcttcccacggcactgacatggagacctgttgttgcgaggctccctgtgggctcgtgcttggacctgctgatggggtgcttggtgcccttgtgcctcctaacggtggcttgctgtcttgggtgctggtagcttgggggggcgctctcccccctgcccgcgactctggtatcacctcttcacccctcccctgactcgtgggccattgcctggggcggggcgttgttgtgcggggtgccccctgtgttggaaggccgcagggagcttgggcggctgctccgctcaaatcgaaattgggtgctttggttctgcttcgagttgagtgcgtctagcttagccctctttccttgctctagccccagtcacttgcctccctgggtctggcactactcgctttgcgccagaatgcttcgcccttattcttaggcaccgtgccagggtagggacacgagagctattacgttctcagcattgggttgtccccttagtaagggtgcctcggtagtgtgcacatggggggagcgcgttgggatgagtgtggcccggcggggcccaagtaaacccaacacattattgatagtagtaactcccttttgaatataatgtcccttctccacttcagacgcgtactggccagacctcccgcggtgtccctggcatttgagagacaattagccattgtccacaatcacttttggagcggcgaaagacttagatgagcctgaacagattatcacaaaggattaaccatacagtacccgaaatacagactgcaagtcaactgtagaatcatacacaatatcgtaataggcggattacattatacaccacacaacctccataagagaatatcattcacccga

SEQ ID NO: 697418 - DNA, 103 bp, Homo sapiens
cgaggattcctacctaactggctgtctgggaactgagctacagcaacacaccacactttctaggtctcaccacacatccagtgaacagccttttttcttatat

SEQ ID NO: 697419 - DNA, 183 bp, Homo sapiens
attcgtggaagatcatcagcagtgctcctgcaccaccactgcttgccgccctcgcaggtcatccatacaactttggtatcgtgaaggactctgaccacgtccatgccatcactgccacccagaagactgtggatagaccatccgggaaactgtggcgtgatggccgcgggactctccagaacc

SEQ ID NO: 697420 - DNA, 352 bp, Homo sapiens
  misc_feature (341)..(341): n is a, c, g, or t
gaacaccaaaaatatgacaatgaaacttcattggaaatacgaaatcagcaatagtaaagtccaaaaacatcttactgatgcttacttcaagaagaagaagctgcggaagcccagacaccaggaaggtgagatcttcgacacagaaaaagagaaatatgagattacggagcagcgcaagattgatcagaaagctgtggactcacaaattttaccaaaaatcaaagctattcctcagctccagggctacctgcgatctgtgtttgctctgacgaatggaatttatcctcacaaattggtgttctaaatgtcttaagaacctaattaaatagctgactacaaanaaaaaaaaaaa

SEQ ID NO: 697421 - DNA, 127 bp, Homo sapiens
gggccaagaatttttctgtttgcccgggaaaggtaaaaggggaaaattaaaccctttccgtttagttctggaaggcccggaatttttccaaaaaattaaaaaaggggcgggggctttttctttggga

SEQ ID NO: 697422 - DNA, 939 bp, Homo sapiens
  misc_feature (928)..(928): n is a, c, g, or t
gcttctctttcccatcttgcaagatggcgggtgaaaaagttgagaagccagatactaaagagaagaaacccgaagccaagaaggttgatgctggtggcaaggtgaaaaagggtaacctcaaagctaaaaagcccaagaaggggaagccccattgcagccgcaaccctgtccttgtcagaggaattggcaggtattcccgatctgccatgtattccagaaaggccatgtacaagaggaagtactcagccgctaaatccaaggttgaaaagaacaaagaaggagaaggttctcgcaactgttacaaaaccagttggtggtgacaagaacggcggtacccgggtggttaaacttcgcaaaatgcctagatattatcctactgaagatgtgcctcgaaagctgttgagccacggcaaaaaacccttcagtcagcacgtgagaaaactgcgagccagcattacccccgggaccattctgatcatcctcactggacgccacaggggcaagagggtggttttcctgaagcagctggctagtggcttattacttgtgactggacctctggtcctcaatcgagttcctctacgaagaacacaccagaaatttgtcattgccacttcaaccaaaatcgatatcagcaatgtaaaaatcccaaaacatcttactgatgcttacttcaagaagaagaagctgcggaagcccagacaccaggaaggtgagatcttcgacacagaaaaagagaaatatgagattacggagcagcgcaagattgatcagaaagctgtggactcacaaattttaccaaaaatcaaagctattcctcagctccagggctacctgcgatctgtgtttgctctgacgaatggaatttatcctcacaaattggtgttctaaatgtcttaagaacctaattaaatagctgactacaaanaaaaaaaaaaa

SEQ ID NO: 697423 - DNA, 1272 bp, Homo sapiens
  misc_feature (928)..(928): n is a, c, g, or t
gcttctctttcccatcttgcaagatggcgggtgaaaaagttgagaagccagatactaaagagaagaaacccgaagccaagaaggttgatgctggtggcaaggtgaaaaagggtaacctcaaagctaaaaagcccaagaaggggaagccccattgcagccgcaaccctgtccttgtcagaggaattggcaggtattcccgatctgccatgtattccagaaaggccatgtacaagaggaagtactcagccgctaaatccaaggttgaaaagaacaaagaaggagaaggttctcgcaactgttacaaaaccagttggtggtgacaagaacggcggtacccgggtggttaaacttcgcaaaatgcctagatattatcctactgaagatgtgcctcgaaagctgttgagccacggcaaaaaacccttcagtcagcacgtgagaaaactgcgagccagcattacccccgggaccattctgatcatcctcactggacgccacaggggcaagagggtggttttcctgaagcagctggctagtggcttattacttgtgactggacctctggtcctcaatcgagttcctctacgaagaacacaccagaaatttgtcattgccacttcaaccaaaatcgatatcagcaatgtaaaaatcccaaaacatcttactgatgcttacttcaagaagaagaagctgcggaagcccagacaccaggaaggtgagatcttcgacacagaaaaagagaaatatgagattacggagcagcgcaagattgatcagaaagctgtggactcacaaattttaccaaaaatcaaagctattcctcagctccagggctacctgcgatctgtgtttgctctgacgaatggaatttatcctcacaaattggtgttctaaatgtcttaagaacctaattaaatagctgactacaaanaaaaaaaaaaaaaaaaaaaaaaaaactttggtggggccggcttcgggcctgagaaaaggtttatcatagaaccattcgggttggggcggcgggggccccaggatgttatgtgtcgacacttgtggggcctaaaggctggtcacaaaggagagatccgtggcacatgagatatggtgttgggtttcttccaccaaattaaaaaaagcggcccgggggaaacccggggctgttcctggaaaaaaattcccagatggggacttcccgggagggacattagcggggttcctatcaaacagggtgccaagggagagcgaggatattaaatttagcccggcgagagggaa

SEQ ID NO: 697424 - DNA, 1104 bp, Homo sapiens
  misc_feature (1093)..(1093): n is a, c, g, or t
gatcttgcaaggtaagaatcgcgggcctgtctgcaagacttgagttcaggactcccaatccttcgccatccgaacctggagggcatccagtcgacacctacaggggtcggacatgtccaaggctaactgagaggccttccagacgcttcatttttgttgtttgggtttgcggcagggcacaaagaggatggcgggtgaaacaagttgagaagccagatactaaagagaagaaacccgaagccaagaaggttgatgctggtggcaaggtgaaaaagggtaacctcaaagctaaaaagcccaagaaggggaagccccattgcagccgcaaccctgtccttgtcagaggaattggcaggtattcccgatctgccatgtattccagaaaggccatgtacaagaggaagtactcagccgctaaatccaaggttgaaaagaacaaagaaggagaaggttctcgcaactgttacaaaaccagttggtggtgacaagaacggcggtacccgggtggttaaacttcgcaaaatgcctagatattatcctactgaagatgtgcctcgaaagctgttgagccacggcaaaaaacccttcagtcagcacgtgagaaaactgcgagccagcattacccccgggaccattctgatcatcctcactggacgccacaggggcaagagggtggttttcctgaagcagctggctagtggcttattacttgtgactggacctctggtcctcaatcgagttcctctacgaagaacacaccagaaatttgtcattgccacttcaaccaaaatcgatatcagcaatgtaaaaatcccaaaacatcttactgatgcttacttcaagaagaagaagctgcggaagcccagacaccaggaaggtgagatcttcgacacagaaaaagagaaatatgagattacggagcagcgcaagattgatcagaaagctgtggactcacaaattttaccaaaaatcaaagctattcctcagctccagggctacctgcgatctgtgtttgctctgacgaatggaatttatcctcacaaattggtgttctaaatgtcttaagaacctaattaaatagctgactacaaanaaaaaaaaaaa

SEQ ID NO: 697425 - DNA, 199 bp, Homo sapiens
cctttaagcaggaggcccaagaagggaaccccggaagcctagaagttcccagctgccgacatcccattgaaccgtgatcccctgcatggagggggaagtttgagccgtggcccaacaatgatacagtcgtcctcctggcttggggctggggttaccagggtctccatgtgtctgtgctggaaccagagtttctcatcgg

SEQ ID NO: 697426 - DNA, 1139 bp, Homo sapiens
  misc_feature (829)..(829): n is a, c, g, or t
  misc_feature (841)..(841): n is a, c, g, or t
  misc_feature (846)..(847): n is a, c, g, or t
  misc_feature (850)..(850): n is a, c, g, or t
  misc_feature (1128)..(1128): n is a, c, g, or t
gatcttgcaaggtaagaatcgcgggcctgtctgcaagacttgagttcaggactcccaatccttcgccatccgaacctggagggcatccagtcgacacctacaggggtcggacatgtccaaggctaactgagaggccttccagacgcttcatttttgttgtttgggtttgcggcagggcacaaagaggatggcgggtgaaacaagttgagaagccagatactaaagagaagaaacccgaagccaagaaggttgatgctggtggcaaggtgaaaaagggtaacctcaaagctaaaaagcccaagaaggggaagccccattgcagccgcaaccctgtccttgtcagaggaattggcaggtattcccgatctgccatgtattccagaaaggccatgtacaagaggaagtactcagccgctaaatccaaggttgaaaagaacaaagaaggagaaggttctcgcaactgttacaaaaccagttggtggtgacaagaacggcggtacccgggtggttaaacttcgcaaaatgcctagatattatcctactgaagatgtgcctcgaaagctgttgagccacggcaaaaaacccttcagtcagcacgtgagaaaactgcgagccagcattacccccgggaccattctgatcatcctcactggacgccacaggggcaagagggtggttttcctgaagcagctggctagtggcttattacttgtgactggacctctggtcctcaatcgagttcctctacgaagaacacaccagaaatttgtcattgccacttcaaccaaaatcgatatcagcaatgtaaaaatcccccaagaaaaaaaanaaaaccccattncttannctnaaaacatcttactgatgcttacttcaagaagaagaagctgcggaagcccagacaccaggaaggtgagatcttcgacacagaaaaagagaaatatgagattacggagcagcgcaagattgatcagaaagctgtggactcacaaattttaccaaaaatcaaagctattcctcagctccagggctacctgcgatctgtgtttgctctgacgaatggaatttatcctcacaaattggtgttctaaatgtcttaagaacctaattaaatagctgactacaaanaaaaaaaaaaa

SEQ ID NO: 697427 - DNA, 466 bp, Homo sapiens
  misc_feature (64)..(64): n is a, c, g, or t
  misc_feature (118)..(119): n is a, c, g, or t
  misc_feature (349)..(349): n is a, c, g, or t
  misc_feature (466)..(466): n is a, c, g, or t
gttgtggatattcagtagtattagggaggctggttgtgaaccatagtcacctgtggaacttctnaaaatagcctcttccccaggattctaattaagtagcctggggagtgaggcctannaggctttcattctatttttctactcccattttgaattaaaaccacagtaaatttgcacgattttttaaaaatcagaaccaaagactattgttaaaaactaagtatcattctctatgcagacttccaggccccttcccagtggcagccactgttgaaagtttttgtatatgtttctaacaagcactgcccaatagaaacataatgcaaaccacatatttaatttcaaatgnatttaaattaaaaaaaattcctaattttaaattttcatgtagccacattaaaagaaaaagtttttaagaggtgggataatctgaggcccagagtttaagaccagcctgcgcattatn

SEQ ID NO: 697428 - DNA, 236 bp, Homo sapiens
  misc_feature (55)..(55): n is a, c, g, or t
tacacattctgtattatctatgtacttactgttttagtgagttttgtacctttanaggatttcttactgctcattcatgtccttttctttctgattaattacttcctttagcctttcttgtaggacaggtttggtgtggataaaatccctcagcttttgtttgtctggaaagtttttatttttcttttatgtttagaggttattttttccatttatataattctagggtggtatag

SEQ ID NO: 697429 - DNA, 586 bp, Homo sapiens
  misc_feature (574)..(574): n is a, c, g, or t
gcttctctttcccatcttgcaagatggcgggtgaaaaagttgagaagccagatactaaagagaagaaacccgaagccaagaaggttgatgctggtggcaaggtgaaaaagggtaacctcaaagctaaaaagcccaagaaggggaagccccattgcagccgcaaccctgtccttgtcagaggaattggcaggtattcccgatctgccatgtattccagaaaggccatgtacaagaggaagtactcagccgctaaatccaaggttgaaaagaacaaagaaggagaaggttctcgcaactgttacaaaaccagttggtggtgacaagaacggcggtacccgggtggttaaacttcgcaaaatgcctagatattatcctactgaagatgtgcctcgaaagctgttgagccacggcaaaaaacccttcagtcagcacgtgagaaaactgcgagccagcattacccccgggaccattctgatcatcctcactggacgccacaggggcaagagggtgttgaacagggatcccactgcagacagctgcggtagggccagatgggaccgtacacaaggatatntatttcttacag

SEQ ID NO: 697430 - DNA, 176 bp, Homo sapiens
cgggaggcaggcaagtaggatcgggaggcaggcaagtgaggatgtgggaggcagggctgggaagcttgagtgcagcacaagtggcagaaaacaaacccagaaagttcaggccacccctgacagtatgctttcccatgggaaggaggctcaatgtacccatgcagacggaactacgg

SEQ ID NO: 697431 - DNA, 635 bp, Homo sapiens
gcttctctttcccatcttgcaagatggcgggtgaaaaagttgagaagccagatactaaagagaagaaacccgaagccaagaaggttgatgctggtggcaaggtgaaaaagggtaacctcaaagctaaaaagcccaagaaggggaagccccattgcagccgcaaccctgtccttgtcagaggaattggcaggtattcccgatctgccatgtattccagaaaggccatgtacaagaggaagtactcagccgctaaatccaaggttgaaaagaacaaagaaggagaaggttctcgcaactgttacaaaaccagttggtggtgacaagaacggcggtacccggcaaaaaacccttcagtcagcacgtgagaaaactgcgagccagcattacccccgggaccattctgatcatcctcactggacgccacaggggcaagagggtggttttcctgaagcagctggctagtggcttattacttgtgactggatctgtggtcctcatcccagttcctatactatatatcacactataaatcagcattgccaatttcaactcaaattctgttcctctcatgcattactccctaaattatttctgatccttacttcattcttatatagtcttgcgccttctatacc

SEQ ID NO: 697432 - DNA, 953 bp, Homo sapiens
gcagggcattgctccaattgctcccttctcggaccagccttcttcctcccaccatggcaggtggggagcaggtctcccagaaacaccccgtcccgaggatggtgctctgtgcatgccccagcctcctgggcctgcccttccctcttcttcgggaggatgtgtctcttctgacctgcactcttgcctgaccctagaatggggacagggaaagtgaaggttagggaaagcagaggggggcactttttagcattccctttctatcccacccctctgatctcccataagtggaaatgggggtacccaggatgggcaggctttggcctagggacatgaagtatgggagtgggtggcgtgtgtgcgcagagcagggtgtggaacgcgggatacgtgtggacagttccttcttgtggcggatgttggtggcgctggggttgcttcttttctttcctcagggtcacgggagaagggagcgaacagggtacgggtcgctcttgttacagaacagccctggcactgcattcaaatccagtcttcattcagctgggatcaaaatgccagtcaccttggttaccactgtggacagctgtctgtcagcatgcagagggatccaggaatccccccggagcacggccgtttccttctcctccatgtgggcagcagatagtcaggctcctggtggagacagaaggtaggaccagtctcatgaccagatatggtggggtgtgcacggaagggaacaacactagagggccacaagctctctccccaggtgtccattccgggttaaccctgaactgtggggaggggagggcagggggggcacagacgctcccacacagagaacgcgccactcggggaaaggggtgcccacaacaacggggagggggactccgggcgcacccacccgcgaggcaaacagcgagcacgagcggggcggcccacaagggaggcag

SEQ ID NO: 697433 - DNA, 1064 bp, Homo sapiens
  misc_feature (253)..(254): n is a, c, g, or t
  misc_feature (1053)..(1053): n is a, c, g, or t
gcttctctttcccatcttgcaagatggcgggtgaaaaagttgagaagccagatactaaagagaagaaacccgaagccaagaaggttgatgctggtggcaaggtgaaaaagggtaacctcaaagctaaaaagcccaagaaggggaagccccattgcagccgcaaccctgtccttgtcagaggaattggcaggtattcccgatctgccatgtattccagaaaggccatgtcactaagcaggacacgctcacatcnnagccgctcaaatcccacaggtcgcataagagcaagaaagcacaggcatgaaggtgtctcgacaacacctagttaactaatagaccagatatcgcgctaggtggatcataggaaaccgagagcgctcaactccgtgcgtggctctcagagacctttcgtcagatacaattgccctgaagatatatatgcctactggcaaggatgttgccctcggacaatgctgtatgatgccaacgtgcgaatagagaacgcactttcagctcgagcatcgggtgaagaataactttgcagaatgctcgagcaattgaatccctccgtggaacccgagttcgtgaatccatccctgcactgtgaacgctcgacagggtggcaatgaggcgtggttttcctgaagcagctggctagtggcttattacttgtgactggacctctggtcctcaatcgagttcctctacgaagaacacaccagaaatttgtcattgccacttcaaccaaaatcgatatcagcaatgtaaaaatcccaaaacatcttactgatgcttacttcaagaagaagaagctgcggaagcccagacaccaggaaggtgagatcttcgacacagaaaaagagaaatatgagattacggagcagcgcaagattgatcagaaagctgtggactcacaaattttaccaaaaatcaaagctattcctcagctccagggctacctgcgatctgtgtttgctctgacgaatggaatttatcctcacaaattggtgttctaaatgtcttaagaacctaattaaatagctgactacaaanaaaaaaaaaaa

SEQ ID NO: 697434 - DNA, 209 bp, Homo sapiens
tcgcggacgtgtatcatgtgccctatgggaagtcaagtcagtcattgtagcgtctgtggatgatatccagtgtgttgaagaatttgagtgccaatgccactgtggaaaccccagctgctgagagagacaatgaacaccagtccgggtactcctgccccatctgctgaagagacaattaacaccatcccaggtaatcccccccgcactgt

SEQ ID NO: 697435 - DNA, 344 bp, Homo sapiens
ggcacgaggcagcatatatttaatttcaaacagaaattagcaatatttgcaataggaatttagtggagaatctctcttagcaagaacaatcaagagaaacttgcagagttccattgtataacaggataaacactgatttggaatgagacccaagttccagcccatttttctggtcctgattggccaagttaaataaaaacctcaaatatgagtatcctaagtgtttcacatgtgaatgatctcatgtactgcccccatgtgtgtgggtgtgggtgtgggtgtgtaaaaacaaggaaggaaaggcagcaggatgggattttgtagtgattaggaacaggggtaac

SEQ ID NO: 697436 - DNA, 428 bp, Homo sapiens
accggctccgatgtcggcattcctgaaaatctgtccaccaatcttctggtcaatcatggctggcacggtacgattttcgaactcgatgcgaccgagtgcgacaagatgcgctacttcttcgcgcgcaccgccgccacacgtcattatcattggacgcgagagggcttgaccgaatattactccccagtgatcgtccagaaagccattagcccggagaacatcaacgagctgctgatggctgccaaccaggagccggagcccgatctttttattattgatattgacggcggtgatttcgctgtcatggaaaatctcagcgcgatcaaaccacgcgtcattgtcgtcgagtttgaaaaacgttttcgcgaacggacagcgtggttcagcggggtcgacgcgccgcgaatttagtagtagtaggcggccgc

SEQ ID NO: 697437 - DNA, 283 bp, Homo sapiens
gcgacctagaggaccccggaggtaatggtgatcggagtatagtggagcgcttgtcagatttccaggtggcttggtccacagcgtatgtggccaatgcacgctgagccgcaaagctggcaagatcgtccaagattcgtcaagccgccagaccgtctccttcttggccatatccacatggaaaatctcatcaccatcaaagtcaaacataaactcgcctgataggtcaggattcagatagaactcgggctggatgatcacaggtcgttctttgaaagcccatgga

SEQ ID NO: 697438 - DNA, 931 bp, Homo sapiens
  misc_feature (670)..(670): n is a, c, g, or t
ctcaagagtctcaggagatagatgtcatctgatccccatacaagtggctgcgcgtcaaacagtagctccaactcaaccatttgacgaaggcaccaagagagcaaaataaccttcaaagtagatgtgcatgaatgcccccaagagagtgcgcattaactgcgagaatctctaactcgtcgcgctccaggaccaagggacgtgaatcctcatcccgacctgctacaggggaatcaagatcaagtgcaatcgatagtgcggaaaacatggatcaaggacatccaagaatcatagctaatcgtgaatctccaacagaagaaccgtcgcgtgacaagatctcagctctcctacatgttctaggttcttgagtgtagcgtataatcatcgcttcgcatcatcgtcctgttgatggcgcttgcaacgatggaatccatagaggagaaggaaacgcatttagtcgcccgtacattgagggaactccttcctaaccaaattcgcgtggctgccctattctacctgcacgtgaggtatttcttgcctgcgccgaccctagggcaaacgagtattcggtaggcatggcaagatagttcgagacacatcccttcctcattctcgagaaacacacggagcaagaaaatagaatacacttcgaggcaattcttccatgaatagnaaccttattcctaaagccctttttggaatttaaacacacatgcaaagatagatagttgacaaatttattatctgctacttgacgtggacttgacgaaggccctatctacaaaggattatgtgggataggttcatatcgttggtaacgcaaatttgcttcagattacaaaggcacacgaagaggacacacgtgagtacataccaggcttctgagacggaaaaagatagtggtggcgttatgtcgacccacccggcgaggttg

SEQ ID NO: 697439 - DNA, 172 bp, Homo sapiens
tgtggggggggaaatagaatctcattgttggcccaggcgggtctcaaatttctaggctcgggcggttctccggcctcagcctggcaagggggtgggggatacagggcatgacgctacggcagcgggcctaaaccaggtgtttggaaatccattttccttcatatacctttgg

SEQ ID NO: 697440 - DNA, 892 bp, Homo sapiens
catatatcccttgtgcgataaacaaaagaaacgaaaaaaaagaaaagaatggcacgtgaacttccgatttttcaaggcctttgcctaggaaaagtgggtccatggggaataaacagcggagtatttggtttcgtaaacctccagaattgggtccccaataaattgccgagggggtttcccaaagttaggactttcggatacacatttggaccgggaatttccgggtggttgtcgaactttttacaagcacctgacgctgtgtgactcacggggctcggaaactgaggcagaactctctacgtggttagaacaaaattacacccgtgaacttatgtgtcgctttttcgggaagggttctagctccggatgttaacaaagaaactcccgtggagactcaacaatgcccatggggggaactgtcggtctcaaaagcgtcttagacgataatattggcggagggtgggactctgggagtggaggacccccctttcttggggcatcttgggaggttggaacgggggaactccagccagtaatggttgccgttggtcacgggactaaaagaccccttcgaccccggtaggggctgtggcccatttgaaaggttcctggaccccaaattggttccagcagggttcttgccactgaggaaccctcgaatcctggaatcggaactcctggtgggagcataacgggtgatgaccctttgaaacagtccaatgtcgcctcacacacacaccaatgggaccccttcctaacggaaatgtggtcttatgttcccccatggcacagtgtgccccaacaggggactcacctcccattgtgacctggtcaaaaacacagcggttttagatgaccttagggcgggcaaaccttaacacatgtcgactag

SEQ ID NO: 697441 - DNA, 1356 bp, Homo sapiens
cgcggtggctcacgcctgtaatcccagcactttgggaggccgaggcgggcggatcacgaggtcaggagatcgagaccatcccggctaaaacggtgaaaccccgtctctactaaaaatacaaaaaattagccgggcgtagtggcgggcgcccgtagtcccgagtagctgggattacagtgggctcattgagcaactctgaggacatcagttctgaaagcaagtgaacagtctgaggaaacttttcctttgggtgaacaaggagactttcaactttcaagtttcatgtctccattatcaccatcatcttggtcatcatcacctgaattattatgactttgcaactcaacaggaacatttcatccaacagggcccatgctgtgctcatcctttcacataacacaacacagaccctactgcacacaaccacaccacaccccacccacaacacaaaacttcttcgcgcccctcggcccacgagacaattttaaaccccaccgctaggcgcacgcgcgcccacgaaggctacggacaagtggccacacggtgtccccacgggacaccgggcacgacagcggctgggatctcaccccaataaagcgccggggacaccgcaggttcgcaacccccgcagggtccgacgcacacagggggcacaagagccaagagcgaaatgccccgcggaaaaaacaacccaccaccaaacaaaaaaacaacaaacaaccacacacaaccaaccgacaccaagccaaccccccccacacgaccaacgcccaagacaaaaagcacaacaacaaacaagaacaaagaaaaccgaccaaaaaacacccagaaagaccagaacaccaaaagaaaaaacaaaaacacgcagagaacgggcggagcgggagggagactacagccgcgaggcgagggaaacaagaaggcgaggacaccgcagagagaaagagggaaggagggggcaacagaaagagcaggaggaaagcgcgaagaaaagaggaaagccgcagaggcaacgcggacagggggcgcgccgagagaacacagagagagcggagcgaggcgccaagcgccagacacgcgaacacgagaaagaaagacagacaccacacagcagacacaacaagacaagcagacacaaaaggcagcgagaagcgggacacgcaccagacacacacgagacagcgcgaaagacgacaagacggagcacaccagccagcaaacaccggacgcaagacaacccaggagcacgagagccgaaacaaccgacgcaagcaagcacgaagcaaccccaagcgaagaacaaccgaaagaacgagaggacacaagacagacacgacagacagcagaacacaaaaa

SEQ ID NO: 697442 - DNA, 226 bp, Homo sapiens
tgggtatatcctgagtattgtgaaatctaaaaatctgagaggttatctcaagcaaaacattctgttttatagatgagaaataaaacctctggtaggttaactgaacatatctaattgtgtaggactgaaactagagcctctcgaggttcaactctctccaatatgaatcttcatttaagagacaactgaaggctgggcgtggtggctcacaccagtaatcccagca

SEQ ID NO: 697443 - DNA, 569 bp, Homo sapiens
  misc_feature (559)..(559): n is a, c, g, or t
tttttttttggataaacagactttattatattttaaaattatatacagtaattattattatacattcattcataaattctatataagtaaacatacattctaatcacagtgtttgaattccatttttctcaaaacacacacacacacacacacacacacacacacacacacacacgaaaagcctgtaacgtttgaaagcctaaaatgtaggagttcctccacgtactcacttcatagttcagatggatcttaccagattattagcaacaagaattcagtgcctatatcacagttaaaattatagttaaaatatttaatagagggacacccaccctcaatgcgggtgggcaccatccaattgggtcaggggtatggataaaacaaaaatgcgtaggaaagctcactctctcctggacctaagacaccctccttctggtgcttttggacatccaaactccaggctctctgggccttgggattccaggagttgcaaagtggctggtctgagttctcagggccgttgcctgctggactggagagttataccatcagtttcccnagttctgaat

SEQ ID NO: 697444 - DNA, 320 bp, Homo sapiens
gcctccaactgttgtccatcttgatgtgctagataccggcggcatggagcctctctatgggctgatatgatctgtggctgggataagaagggtcctggactctactacgtggattaacattggactcggctctcaggaaatttgttctccacgggtagtggtaacacttatgcctacggggtcttggacagtggctatcggtctaatcttagccctgatgaggcctatgaccttggccgcagtgctattgcttatgccaatcgacagatacagctattctgcaggcgttgtcaatatgtaccacatagttcagcgtctga

SEQ ID NO: 697445 - DNA, 698 bp, Homo sapiens
gattcttgtgtctcagcctccctagtagctgggattacaggcacccactaccacactcggctaatgatgagattatagatggggtttcaccacgttggccaggctagtctcgaattcctgacctcagatgatccacctgcctcggccttccaaagtgctgggattaaaggcgtgagcccccgcgcccagccacctccatgtaagctttggatcataagcatcgcctcttaaatcttgcccatcaaatacccccttcccttctgtagctgtagtttctttctcactattggttctttttccacaactttataacacgcccagtggtcccactttctaataaaatctccctttccctgctccccactctgccagtttctcttccatcttcacattgcctgaattcattgtactcatctcctaatttcccacccccgacttacagtccagcttctgccctcaccaatggcttcctaatttccaaatccaggaacctcttcttaaagaggtcttcctacctatttctgtccagggctctagctggatttaataatgctgtctttttcccagctgcccaagctagaaatcttggctcactgcaaactacgcctcctaggttcaagtgattcttgtgtctcagcctccctagtagctgggattacaggcacccactaccacactcggctaatgatgagattata

SEQ ID NO: 697446 - DNA, 451 bp, Homo sapiens
  misc_feature (261)..(261): n is a, c, g, or t
  misc_feature (266)..(266): n is a, c, g, or t
acaaaaaatcggatttatacggctgttagtgctatcggcgtctggtatgtgttatatattgcctatcgttttttggccaatgggcgttggctacgcggggcaatgattgccattgtttttgttatcttggcttattttgtcgttttaaatattatttactattttacaaatactgtggtcaaatgggatatttcgccaaaaattgagaaagtgttaggcggcccgcagctggaggaagagaaagcggctgtgcatgaagtnattgnacccgctaatgggctgtatcaacgacaacatgtgatgctgggtgaagtgacggtcaatgccacgcagcaagacaatatcacgcaattagccacggcgtttgatgcaactcgggctgatgaaacaagattatggccatcttggtgaacaggcacaacggcaattattttacagcacgtagtgattt

SEQ ID NO: 697447 - DNA, 323 bp, Homo sapiens
aagagacagggtctcactatgctgcccagtttggtcttgaattcctgggctcaagagttcacctgcctcagcctctcaaagtgttggggttacaggcgtgagccactgcactcagctttaaatttttttttatagagacagggtcttgctatgttgcccaggctagtctcaaactcctggcctcaagcgatcctccaggctccacctcccaaagtgctgagattacagggggtgatccaccacgcctggcctgtgcgtgttttttttttaacctttctgtgacttattatccccatttcacagatgcggaaattaagacacag

SEQ ID NO: 697448 - DNA, 239 bp, Homo sapiens
cggggttggggggggggccccccccctttttttttccccctttaaaaacccggggggggcgctccccccccggttttttttgggcggcggggggggttaccttttcccccgcggaccccttgttccctttggccctttggggggggcccctttaacccggtttggcacaaaaagcgcggtggggccgggccgggatttcccgggtttttttttccccccggggcccccccgggggccca

SEQ ID NO: 697449 - DNA, 263 bp, Homo sapiens
ccttatatgctgtctcaggacattgtcttcaaatttctaagccttggagccctctgttccaataaatcctacgggcaaattcataggtaaaagagattttaaagaagagtgggtgtggggttcatgcctgtaatctcagcacttgggggggccaaggtgggaggactgcgtgaagccagaagttggtgaccagccggggcaacacagcaagaccccgactctaataaaatctctcgtactctcaacaccatccaccaccacca

SEQ ID NO: 697450 - DNA, 332 bp, Homo sapiens
agcccattttttttctgtattttctgtatgaaactgccccatatcatgaatagaaagggagaaccataaaggagaaaggacgtgatgttctgttatgttcatgtaaacctaaaaaaacagtgtggaggcaggggcgatcaaccgaactttaggggcttggtgttgcttggaaggcatccaaacctgccttttgcattttttgtatgtaatcatattgccaaagacaaactatttcatcctttattgtaaataacccttttccccagacctaccataaagtttttgtgatgtattgttttccagttgcaataaaaattactgggttgcctcca

SEQ ID NO: 697451 - DNA, 294 bp, Homo sapiens
atactgggtgccgaccgcggcgcacgccctctgtgggcacagtgactttatctctgtttccgtctctttacgctgagggtcttttagaatgaaacgtgctgggaactgttctagagcctttatgtggaataacttagtaatcctccccacaggggatgtcgatgctgcattttacgggtgaggaaatcaaggcatgagagatcatgtgagtggcctcagctcacaccgcagagctaggactttgatcataaatctttaaaagaacaaaacagtggctgggcacacattatggag

SEQ ID NO: 697452 - DNA, 273 bp, Homo sapiens
cgtagctggagttccatggacatgatcttgactcactagtaacctctgtacccctgggttcaagtgattctcctgacctcagcctccagagtaactgggatcacaggtgttcgccgacatgcccggccttgactaccatatataaaaattttactggaggacttatttgttgctcttcttttaacatttattataaatagcatcccagctcttatttcagcaatatacaaaacatttttataggtatgtagcagtaagaagtctataggagca

SEQ ID NO: 697453 - DNA, 207 bp, Homo sapiens
atttcccggggcttcaaagcaggcagtctttgtgtgagtaaagattgagccaatgctaagagtagaacgagctattaagttctatttgctacttccatccccaggctcataacagagcgtaagctaaacaaagaagaacagctctccgctggacagaatgatattcaacaggtagactcatttctgtaggcacttctcacatcagcg

SEQ ID NO: 697454 - DNA, 326 bp, Homo sapiens
gattgatgtgcggccaggcgatcattgcgactctgcatattctgagatccttcgtatgtgcgctcttcctatcatcgtgtagcagaattcaccaaacgttggattgttcactcactactagggaacgtgagctgtggttaggccgctctgtgattggagaaacctctcgcgctactgatgacgtgttgttgccatggtaatcctgctcagtacgagaggaaccgcaggttcagacatttggtgtatgtgcttggctgaggagccaatggggcgaagctaccatctgtgggattatgactgaacgcctctaagtcagaatcccgccc

SEQ ID NO: 697455 - DNA, 498 bp, Homo sapiens
  misc_feature (2)..(2): n is a, c, g, or t
  misc_feature (42)..(42): n is a, c, g, or t
  misc_feature (117)..(117): n is a, c, g, or t
  misc_feature (142)..(142): n is a, c, g, or t
  misc_feature (147)..(147): n is a, c, g, or t
  misc_feature (169)..(170): n is a, c, g, or t
  misc_feature (206)..(206): n is a, c, g, or t
  misc_feature (210)..(211): n is a, c, g, or t
  misc_feature (334)..(334): n is a, c, g, or t
  misc_feature (343)..(343): n is a, c, g, or t
  misc_feature (393)..(393): n is a, c, g, or t
tngttgttcatatgagtcctctaggaaatgagagaggatgantgaagccaattctataaagttgcgttaagttgtataaaaatagatatataagaataaattctttcacttgatgtntgttagaccagaaagtgtgtgtgtnctgtngctcagttcccagacagctttnnaggtagtggaggaggtggcatcatgtggcacttggncatnnatattccacttgggagggtcaggctgtggccttctggagcaggtggcttgttaaggaacgctagcagggcatggcacgtgagctccggaatagatgtcttcatcacttcttccactgtgtgtngacacaganatccttacctatatcctcagatccccagcttactcctctgctaatgatanacttcacagtgcagcttgcagtccgtagctgaaaatgattataagccctgcataatgggtaagcttatggtgattacgtgtatgtaacttctaactattagcaga

SEQ ID NO: 697456 - DNA, 545 bp, Homo sapiens
cattctcctcctatccctcaaccccgacatcattaccgggttttcctcgtaaaaaaaaaaaaaaaaaaaaaaaaaaaaaccagttggtgcggttgggccgcggccctgggccctttgagaaaaaagagattttaatagaccaattccggtggggcgggggggccccgaaagtgaggtcctactgtctgacagtggggccaaaacgcggtgcctccctagaggaagaactccgggcgacagcgacacaagggcgtgtgggggctttcaccacaccaaattaaaaaaaccgggccgggggggacacacccgggagcgggtgttctcgtgagacacacaacatcccacagagaggggagcgttcctcaggagagcggcaccacccacggggggggctcatacctccaacagggggagggggcccacaaagggacagagggctccgagaatatccaaaaatatacaccgccccgggtcgtcggtggaggaatatgcaaacagaaacagagcagcaatcccaatcagcaacagcacaccagcacgagcag

SEQ ID NO: 697457 - DNA, 249 bp, Homo sapiens
  misc_feature (2)..(2): n is a, c, g, or t
  misc_feature (7)..(7): n is a, c, g, or t
  misc_feature (20)..(20): n is a, c, g, or t
  misc_feature (29)..(29): n is a, c, g, or t
  misc_feature (42)..(42): n is a, c, g, or t
  misc_feature (46)..(46): n is a, c, g, or t
  misc_feature (58)..(58): n is a, c, g, or t
  misc_feature (65)..(65): n is a, c, g, or t
  misc_feature (72)..(72): n is a, c, g, or t
  misc_feature (84)..(84): n is a, c, g, or t
  misc_feature (145)..(145): n is a, c, g, or t
  misc_feature (215)..(215): n is a, c, g, or t
tntagtnaataatagagggntagtatctnggttcagaacacntgtnagtctggttttnctacctntgtagtngaaccgcttgancataggattgctgagacccagaagaaaagtcagcattggctctcacactacagaacaaatnagaggtggctccagaaacttcaagatgacaacttcctggaaatgctgcattttcgcctcctttgactgtngactctggcagtctttcaggggacatctccaggg

SEQ ID NO: 697458 - DNA, 299 bp, Homo sapiens
cgaataaatgtgtaactgtgaattgtgttgcatttgccccggtgcaacggttgtgctttggaaatgcctggcagctttgtgcaatgaattaatgtttaaaggaattatctaattttgtcatagtatttaagtcataatgtcatttctgtattcagttctgttggattttcttttctttgagaaatgtatattctgggtagttttattggtaaaaaaaatgtattgtgatttaatactgcatagtgttttgggttttgttttatatgcaaggtcttcgagccaataaactatttctaagt

SEQ ID NO: 697459 - DNA, 944 bp, Homo sapiens
tgttgcttctgtcccgaggaaagagagagtaaaacaaaaaaaaaaaagggaaaagcacggaggcagcagggactacgctttgtgccgtgttccctcgtgttctcaaaactacatttggtaggtcctaccgcatgcagttaccaacttactggaaaagttctgccacggttcttttggacctcggacactttgctgtaccggccctttttatggcgatgacacgagtcggtctaatggcgtccgcctatagcacctatgtaccctcttaatccacattgggacacgctgtatattggtatggcaagacaccaggtacctggtaatacagataattgtcccaccaaaaatattttggtaattgatgcccccaccaagtgaatttttgtatttacttggccaaatgagagaatgatttataagccccacgcgtataaagctttcttcactccaaagcattgtgttggataaggccccagttctggaagccttgcgacaatgccagtcaatcttaccacagacctccccctcccaattctctcaataacgaagacaaccaccccggaatgtgccacacaccctggtaagttctcccacggaacgtcgacccattgttgaagttcacccccaacattctgctccgccataatactcccgggaaaccaatgtttcgggaccactttataagatccagcttacctgtagtaatcccttggcttttagagttctccccagggctgagatccccgcttatcaatgtctgccacccacccccccacaaaagctgtaatattaatcgttttgtcccccttgttttaaataagacaagtctccatgtatgcaatgctgcaaactctgtgcgacttttcaacattattattttctcaaaaggtttgacccctttgcgaaacaaaaaaatttccaaaaaaacggccagacatgacaaa

SEQ ID NO: 697460 - DNA, 220 bp, Homo sapiens
tgtaataacaggctgaacatgaaaatataatggtgaaattttatttattatcttgagacaggatctcgctgcccagctgaagtgcagtggcatgaacatgactcactgcaacctccacctccattgctcaaggtgggtggacatctcagccttctgagtagctatgaccaccgtgcaagggtgcacacccggctcaattttttattatcctggtagagac

SEQ ID NO: 697461 - DNA, 390 bp, Homo sapiens
gggaacccgagggacagggaattggaagaggtggagtgtgtaagggtagtcgtgcaggtgtagtcgatcgttggaggggtcccaggatggtagtcatgggcggcagatgtgcaagttgcgggacaagggatgagtgggggtcatgttcgttgaccatgggggccgggccagtgggacgtcggccgtcattatcgcggtgaattcagtccgttcatgtacaaaagcgcgcttcagggtcggtgcgtgaaattaggggagggcgccggcacgcagtaatcggatgggttcgatagaagtaaaggcgttcggggggacaccagtacttaaaaccagcgacgcaatcggcatgaagttgtacaccccgagtcccaccaatcgctatttttccct

SEQ ID NO: 697462 - DNA, 1239 bp, Homo sapiens
ccacgcgtccggagatatgggagtatttacctgcacagaacgcaccttcaggaactgccaagccagaagcaaaatccaaagctgctctctgcgatcccttcacttattaacgtctcagtctgcactattattttttttaacctgagcatctattatgtgctaggccctggttccagatgcgtcggggacgcagcgtgatgcactgaacagaacatgggggactggaggacaggggagaaacccccgttcacggggccttaggaatggcagagggggctcagggcacagcgagcagccaccagcacacaagtaaacaggaacataatactgtcccccgagcatgccgaacaggcaggcaggcaactggggcatgggtgcatggtgcaccattacaagtgcttatgcaacacgctggcgttctgttcggcctactgaaactctgagcctattggtgggactctagtaacttattgggaacaagagtgggaagacccccgtgtggtatcctagaattccacaagcctgcgccggcgtgcgacgatagggcgctagggggcgaaggggtgagatggtacccaacagcgtggctggtagggcacaccagaaaatacatcaaaacatcaaccgttaaaaggaggcccgcggtacacatcaaataagaacacccacccaagcgattgacacggggaggccccaataacacccgagatacgaccacaagggcaagggggtaatagcgaaccgaagggcgcaagatgcaccgaagaagacgaccgggaaaaattagcgccaaaggaggcacacactataaaccgccacgaaagtaagaggaagaaggtaggcaaaaacgaagcgaggatagtcgcgatcgaaagggcggaaccaaagcaccagaagggccgcacagtaagaataaaccgatacaccccgacgtataacgatacgcggatccacgacgcgtttgtgagaccgccagaagtggcagcgaaccgaataccaaataaacgaagggggacaaagtggagccaccaaacaccaaaggggtgaaaggatgggagaccgaccacaggcgcgggcacacaattgatcgagggagggagaacactagggcaaacacaccagcggggagcggaccaaaaagaggagagtaacacagaggaaaggagaaatgggggaagcgtggaacaagaggaagaaatcccccagtgaggaaaaagacgtaaggaaagggagagggca

SEQ ID NO: 697463 - DNA, 101 bp, Homo sapiens
taaagatcaggaaggcgttgtcgtaggcactaatcgacgacgacacctccgggtgcaccaggcgtacgtgggacagcatcttcttcatgatgatgccggcg

SEQ ID NO: 697464 - DNA, 271 bp, Homo sapiens
ctgctcccgaatgatcatacgagctttggaagtgcagcaatgtatagtatacgctgttggagctggaattaccgcggtggctggcagccagacttgccctccgatggctcctcgtgcgcggatttacagtggagtcattgccaattacagggcctcgaaagagtcctgtatagtcatttgacgtcagtacctcgcggagcgatctataggtgtagggtaccgaggtgaatggtgggtatggtgagtagcgtggtgtgtgtgaagtgttatg

SEQ ID NO: 697465 - DNA, 103 bp, Homo sapiens
ctgggaggccagcgccagcgggcaggagaggtcagcaaagaaacgtggggtgtcgcgccatctactctggaggggctggaggtgaggggcacgcccgctcaac

SEQ ID NO: 697466 - DNA, 145 bp, Homo sapiens
tcggttactatagatagtggtctacagttgatatagacaaaatactttactaagaaatgttcagcaaagagctcattttaggtgtatgactcaccttctgtacccagttctccctcttttttttttaaggctagtggttattccc

SEQ ID NO: 697467 - DNA, 518 bp, Homo sapiens
tggggtcctttaatgggccgatttggtcttttttcttcttttttccccattttttccacagggatgtggacagggctcagaagaaaaacatataaaatataaacacatctcttctctcaaatagtctctttctccgtggtgtacaaacgcaggcgtctctctctctctgtggcgcgcgtggggcagatataagagggtgtggctggggacagagcgtggaagtgtgggagaggaggcgtgaacaccttctcccccaaaccccgagttttagactcctgtgggttctccttcctcccagaaagaagtggcagaagagggcagtgggtgggaaacagcgaggggaaaaacatagtgggtgagtgcacaaaaccccgagaaggaactcacgaggggcgtgagtgcctccgtggggcccccaagaggttccccaccaaagcccttcatatgaaaacagggtgctgggccaaggggggggcccgcgagggccctccgtgggggggcgtgccatactgggccta

SEQ ID NO: 697468 - DNA, 157 bp, Homo sapiens
  misc_feature (24)..(24): n is a, c, g, or t
  misc_feature (28)..(28): n is a, c, g, or t
  misc_feature (34)..(34): n is a, c, g, or t
  misc_feature (40)..(40): n is a, c, g, or t
  misc_feature (84)..(84): n is a, c, g, or t
  misc_feature (90)..(90): n is a, c, g, or t
  misc_feature (96)..(96): n is a, c, g, or t
  misc_feature (99)..(99): n is a, c, g, or t
  misc_feature (117)..(117): n is a, c, g, or t
  misc_feature (138)..(138): n is a, c, g, or t
  misc_feature (151)..(151): n is a, c, g, or t
  misc_feature (153)..(153): n is a, c, g, or t
gctggctgtatggaaatgcacccncccncctgcngctccnctctagaaccgtctagaacctggctgtgctgcttttgagccgcngacccnggggcngcntctcggttctgcgcggcntccgttgtgtttatatggcgntttgtctgtgttncngttt

SEQ ID NO: 697469 - DNA, 410 bp, Homo sapiens
tatggtaggggcaattcatctgagttgcttctcttaccagagagtgatgcataaagaagcgcaggtatttctgcgttaccatgaccctattcccagtggttcctagccagttgactctcctgcactggataccatcctggacagcattcctgtagggaaactgagccccctgctctgcttcccaccatggcacagttggtcctttgcatggacgcaccattattgcccctgtctcttcttggtggaccttaaggttttctccatcctttggctgtaacacacactgctccaagtgtgtgagcatatcagtaggaaacgcttccaggagtagaactgctaggtcagagggcgtgtggatctgtaacctgacagacctagaccggcttcagtatggtctctcggcttgtgca

SEQ ID NO: 697470 - DNA, 149 bp, Homo sapiens
actgttgttcatacctccgtactcctcctcccctcgttccgccccccgatacagcgaccaggtatgaacaacagtgcacccccgatacagcgaccaggtatgaacaacatgtgcagtgtatgaacaacagtgcagtgtggtacctgagc

SEQ ID NO: 697471 - DNA, 321 bp, Homo sapiens
cccggactggagtatagtggcgcgatattggctcactgcaacctccgccattccgggctcaagcaattctcctggctcagcctcccgagtagctgggattacaggcatgcatcgccacgcccggctaattttttttttttttttagtagagacagggtttcaccagtgtgggccaggctggtcccgaactcctgacctcaggtgatccgcccaccttgtactcccaaaatgttgggattacaggcgtgagccaccgcacctggccccatctttctacaactgggaaaatcctgagttctggaaccacctgcgggtaccgag

SEQ ID NO: 697472 - DNA, 327 bp, Homo sapiens
tagtgaataaaatgtttaaaataatatatttacatatgtttaaaactttggggaggccaaggcaggaggattgtttgagctcaggagtttgagaccagcctgagcaaaaaggtgaaacctagtctatacaaaaaatatgaaaattagaaaggcgtggtggtgcacacgtgtagtatcagccactcagggggctgaagtgggaggattgcttcagcctgggaaataaaggctgcagtgaactgtgatcatgctactgcactccagcttgggcaacagagaccctgtctcaataaatatataaataaataaataaaaataaacaaaata

SEQ ID NO: 697473 - DNA, 338 bp, Homo sapiens
acgatagacacatcaaaagtaggccacctacccaggtacaaagatagagcacgctatctttctagctaccaacctattaaagtactaatctcgtaagtcaataagctagtcagcagtatggctacatataactaatatctagagtaacatatagacgaccagtcaataagttacccagcatactaatggtaagacctagatcgctagaggagtacatataaaagtaaaagctaggtcactagtagactaacagtcattaggtaaacagtactatacccaaggtaaggctatactagcaatattcctatacatactatatgtatcagaatccataagga

SEQ ID NO: 697474 - DNA, 349 bp, Homo sapiens
cggcagcccggaggccgcaccagatgccgccgccgccgccattttttttcccctcaggccgccagccccggggccggggcccgcccccgaataacggcccccgcgggcggccaatccgagaaaccgcgcctgcgccccaaaggcgggcgggagcgggcggagggcggggaattaatttaagcctccaaagacagcgcctcctgctgcctgaacgagaactgcccctttttttgcaaggatttttggatttgtgtgaaaactgagcccccgacaggttaaggggctttcctaaagttgcccagtaagttagcaatttcctttggaataaagttcatgatatatggcttta

SEQ ID NO: 697475 - DNA, 1272 bp, Homo sapiens
gggaggggcggttggctttgttggagtgatgcttgatttgtgtccctgtggggtggacgtggttggtgattgaggcaggatcctggtattccgctaacaggtcaaaatgcagatcttcgatgaaaactccttacctggactaagacctatcacccttgtagtgtggagcccagtgtacaccactctgaaagatgtgaatggccaagacttccagagaataacggaaaggacaattgcctctcccggagccagacatgaggactcatactattgccacgtgccaagacatgtgctggtacacgactgagccgttctctcttttctgcagctatcaactatttgccagataggtagttcgaatcccttcaaccgcttgggttccttgtcgatctagaagaagggtaggctcattgtcatgtactctttcgtagaaaagaacccactagtatcccaggagccgaatggatcacagtactaggcacttgtgaatcaaggttgtgcaggccccacaaggggtaacatctcattctgaaaatactttgttgaaatgggctcataagatgcccaggaggcattacgacagggcactagcggctttcgctcgttgctccagaacacaagacgtatgcatggacattcaaatccttgtttaggcgatgtgggcaaaagccaacgacttcgggacatggatgtggggcgctggccacgttcctctatgcgtggaatcgtaaaccgaaactttttcaccatagtaggcggtaggttcccggaaagccttgggggtccgttggagggtcgcctttgccaggttcggttgaaacggagggcggctcggttctatagtcgcccaagtacctccggttttccgggttggataggacgggaccccgccttgaacagttcacagtggcccggtgggatcgccagttcgggcgtctctgtgtgacacggggccgttgtacaggggctaaatgttgcacctccccaggtctgcaaaagtggttggccggaaaccgtgcgctaaaggcaacttcccaggggcatttttcacagggcaaagagcgcttttcacgcttgcgcccggggactccagtcaagtaattgcgttacccatcaggtctaagaccgatcgacttacagcacaaaggtttgtgcaaggcacttggggcccgtgcaatcactcctggtaccttcgcacctcttagccgaactcgttgctcaaagaaaagcacagcatgttcacaacaccttggcgaaccctcgggtatacgt

SEQ ID NO: 697476 - DNA, 279 bp, Homo sapiens
gttacagattaccacgaaccaccacctatatactattgaaaatgccccaacctaacatactaccgtctggaccaccattaattatcccatatctccttacactcttcctcatcacccaactaaaaatctgaaccacacactaccagctacctccctcatcaaagccacataacaataaaaagttacaactatcgcctggataaccaatcatgcacgaatctctgtgcgcttcattcattgcccccacgatccgtaggcctacccgcgcggagtactgat

SEQ ID NO: 697477 - DNA, 329 bp, Homo sapiens
  misc_feature (305)..(305): n is a, c, g, or t
gacagggccctgatctgtcgctcagactggagtgcagtagtgcgaacacagcccactgaattctcgacttcctgagctcacacaatcctccagccccagcctcccaagtagccgggaccacaggcgtgtgccaccaagcccagctaatttttttttccattcttcgtacagacggggtctccccatgttgcccaggctggtctcgaactcctggggctcaagcaatccttccacctcagcctcccaaattgccggggttacaagtatgaggccacccacaattcagcaggggacaattattatgnccatttacagatgaggaaaagttg

SEQ ID NO: 697478 - DNA, 307 bp, Homo sapiens
aacgtcgtatttttttttcccccaatctcggctgctaacttcagaagggacagagtttttgtgttaaggaaatggctatggattaagatggtgcaagaaacacggtagatggaaccaaaattatataaaaccgtgaagggtatggcttcccattggtcttccggtcctggtcctacttccacttgccgggccctggcggccccagacctggcaggggggggatatggtaatgtgagagaagagcagagctccaggagagggccccccatacggatagataagagagggcccgagctcgattccgaaa

SEQ ID NO: 697479 - DNA, 169 bp, Homo sapiens
tgatctcaccttcaccatcctaggccccgttactttcctcactatgttctccagcttagtcataatatcctcatttatcaagaacttcagcttcaaacctcacatgaccctattacccagtgcatggtgcatgggcacctcgttatcccacgctactcagtgacgctga

SEQ ID NO: 697480 - DNA, 372 bp, Homo sapiens
aagacatgagtgatgcaatagactttggggactggaagaggaagggttggggtgagggataaaagactatacacattgggtacagtgtacactgctcgggtgatgggtgcctcagaatctcagaaatcaccactaaaaaacttattcatgtaaccaaacacgacctgttccccaaaaacctattgaaataaaaaagacagaaagacaagacatgaaaaggttaagccttaggcagagaaattaaataatggtgaggaatggagtaacatagtggttgagtgcatgagtcgatgacctctgtgtattactgatttaacatctatgataataataatattttcctagagctattatgtacgttacatgtttttt

SEQ ID NO: 697481 - DNA, 754 bp, Homo sapiens
tgggcttgactcaggatttaaaaccgggaacggtgaaggtgacagcagtcggtgtggagcgagcttcccccaaagttcacaatggtggccgaggacttggattggcactattggtggttttttaaatagtctattcccaattattatgagatgctgttcgttacgaggaagtcccgttgccatcctaaaaagccaccccatttctctctagaggagaatgggcccagttccttcttcccaagttccacacaggggaaggtgatagcattgtgcttccggtgtacaattatgtaagtgcaaaattttttaaatctctcgccttaatactttttaattgtggtttaatttggaatgatgagcctttcgggcccccctttccccctttttttggtcccccaatttgagatgtttgagggctttgggtctcccgtgggagttgggtggaggcagccagggctttacctgtacactgatttgagacccagtttgcaattaacgttgcccccctttaaaaaaaacaaacacacacaccaacaaacaacaaacaaaccaaaaacacactccagcggggcactcttctttccgggggggcacacaacaagagtctaatcagaatgcgggaccaggtggacatcatcgtgttctactccacacacgatattttatgcacaatggtggatacttgcgggggtcccccacaaatgtaggggcccataaaattctgtaatccaccggagatacccggttataaggg

SEQ ID NO: 697482 - DNA, 422 bp, Homo sapiens
acaaagtgatgccctctagcctcacctttcatccatgcttagcgggtattcgtgccggcaggttggcgctaacgcagtgtgatgtgtagaaggtgccgtgccctccaccaagtcctcctgttccagcccggctattcgctccagggtatctatgttctagagggagagatggagggaagaggggtgaggagtgagccaccccttgtaggccagaaggcacagtaagggagttgagggccacgagtagcagtgaggtggtggggacaggtggagaaagggagggaggagaagcaaagtggcagggtttaatctggaagaactcttctgttcatcccaatggtgccacttaaagggtgacagtcaaggctgcttaaaggcaggggccaggctgtgcatagcggctcacgcctataatcccagca

SEQ ID NO: 697483 - DNA, 431 bp, Homo sapiens
gagggagagggaagaggagagtagagaggaagagaggaagaggagagaagaggagagagagaggaaaagagcggagggagggaggagaataggaaagagacagagggagaggtaagaaggaagtagagagtaggagagaggcggtgggagagggagagaagttgaagaaagaaggagaaaggaggaagaaagaggggtgaggagggataagcggggaggagatgtggaagagatagagaaggaaggaagaaaggagtgagagcataaaagggagggaaatggcagggacaggagaggaggcaaggagagagagatagaggttaaagtggaacagtgagaggaagaatgagagatataatactctatatatatatatatatatatatatatatatatatatatatatatatatactactatatatatatagt

SEQ ID NO: 697484 - DNA, 212 bp, Homo sapiens
atagggagtgtgcctgatatggtgattttggctacgccagttctgttctcctttctccttccttgctctgccatatcttttctctgttttaaaaagctgatggtggacggatggttctgtcctgtcatttaaaacattcttctgccaggctcggtggctcacacctgtaatctcagcactttgggaggctaagggcaggtggattgcttgag

SEQ ID NO: 697485 - DNA, 386 bp, Homo sapiens
  misc_feature (231)..(231): n is a, c, g, or t
  misc_feature (247)..(247): n is a, c, g, or t
  misc_feature (343)..(344): n is a, c, g, or t
aatttatgcaatacccctttgaacttattaatcatactgaggtgaaagaagacttagggaatatacttaatttagacagatgtagttttcaaactgataccctttttattcaaagtcaaaacaattctcctcaaaacaataaatcattttgtcaatgtggatgcaaatattaaaggaagatgattttcagtacctgatttagttattggaaaacttttaagtatgtttganagcccttgagtatgtnaaccaactttttcaactgaaaattttatgaaatctagattcagatcaagtattctcagtgaaaatttagcgcacaaaaagagatatgctgtaagtnnttttaaaagaaaaaacagttttcaaagactcaatactaaaaa

SEQ ID NO: 697486 - DNA, 167 bp, Homo sapiens
acagaagagggggtttctggagctgaatctccggcccccaccaaaacggagatgccgtggccggatcagcccggacaaaggtcagctagccccttgaggacatcagcttgggcctcagggtcctaagggcagcagaaccacggacagagctagaggggtaccgagct

SEQ ID NO: 697487 - DNA, 117 bp, Homo sapiens
cacctctgtttcagtttgtggggtgctcatgctttcctttcattcttctccgtaggtacagctctcatgtcctcccctccctaacagaactttctgacaaagctaagcccactgata

SEQ ID NO: 697488 - DNA, 623 bp, Homo sapiens
cgaaaaatttaaaaaaaaaaaaaaaaaaaaaaaaaaaaaaaaaaaaaaaaaaaaaaaaaaaaaaaaaaaaaaattaaaaaaaaaaaaaaaaaaaaaaaaaaaaaccttgtggcccgcttgggcccagtcgattttaaactcggccaggtttttgcttgcggccgaatttggggctcattgggccatttccccttatggggggccgttttccatttcattggccgccgtttaacaccgtcgggacgggaaaacccttggggttccccactttaatcgcttggcagcaaatccccttttccccagttggcgtattaccgaaagggcccgcaccgatggcctttccaaacggtggcccaccctgatgggcaatgggaatttgaaggcgtaaatatttggtaaaaatccgcgtaaaattttggtaaaaccagttaatttttaacccaatgggccgaaatgggctcctttataattcaaaggattgccccgagatggggtggagggttgtcccagttggaaccaggagcccttttttaaagaccggggcctccaccgtcaagggcgattttttgggtccaggggcgccaaaggcctatatttggaaccctgggcccccgttttaggtt

SEQ ID NO: 697489 - DNA, 165 bp, Homo sapiens
agatgtatggttggtgatcttatggtagatgaatgaagcggaagaagccgctggatgtgaggacagatgtgtggaaattagagatgggatgatgcctgtgtatctgggcatgttctcatggtttccacagttaatgtctactgctactgtgatgagagtgcctgc

SEQ ID NO: 697490 - DNA, 109 bp, Homo sapiens
  misc_feature (11)..(11): n is a, c, g, or t
  misc_feature (84)..(84): n is a, c, g, or t
agggtgagcancaaactcaaactacgcctgtcggcgcctgggagcagggagcccaaacaatctcatatgaagcaccctagcatnattctactatcaacattactaataa

SEQ ID NO: 697491 - DNA, 913 bp, Homo sapiens
agcggagtcggatcgcggaaaccgagactggctggatgggaaactctgtatccagtgaaggctccggggccctcaagagtggtctccgcaccttcccctgtgaacactgtgtacaccatggctagtcttgcgccgaatcattagagcgcactggcgaactgcgcgaccgcggttcacgatgtgcgtccagggctgacacaacgttccggaagagtttcaccttcctggacgctgtggcagattgtatccttctagcatcacagagtagccgaacttgagtcatcaactctccgtgacttgtcccactcggactaatgtgcgtagggcattcgagctacaccgcgaagttctctccgactctctgacggaaatggtctacttcagcgggtaccgggatggaggccctaccctgctcgcgacttcgtagaggtgtttacggcagtcgaggcccagtcggtcgcctccggcttgaatcataggaatactactcggcgcaggggggcggtctaaggcagtatcgttcctcgtcgcccacggcgttgccccgcgcgattttactgattgtatcacatcatggctcgcttccccatggcgagcgggcaatggggcaggtaggtgcgggtgatagacagtgagcctggagaaggttgttaggcacgctcgcattccgttcgcacggacaccctaggcgtggcaataggcgggccgactatggttcgcgttggccattcgttgtaagccatgtaggttgccaacgaatgtgaaccctcctttcccaagcagttcgtagaagaggccatccggagggagttcctaaattcgcacagactttttgcaaggaacactcgccgtaccggacgttcccccaccccggccacacaaggtcccgggagcccttctagcgggactttgg

SEQ ID NO: 697492 - DNA, 116 bp, Homo sapiens
gaggtgatcctcctaagtagctgggactacaggtgtacaccaccatgcctgactaatttgtttttgtttttgtagagacaggactccagcctgggtaacagaggaagaccttctct

SEQ ID NO: 697493 - DNA, 545 bp, Homo sapiens
tggttgttgttggggaggatcggggccgagtggggcacaaagggtctttttgcaggtttccttcctgggattaaaaggggggccccctcctgggccataatgatcagcacttatgggtttggcaaaaggtttttccaaaggttgaaccaggcccggcttttggggggtttaaaggggcaaggaggcaaggaccccgtttttcccccggatggggaaagggcaggaggaaacccacccaagggccttttcctcagccttaagggaggggggttgtttcccttccctcccggggacaaggttcaggggaggggtgtccctttggggggcccagcatttcctcaaacaaaattttttcctgggggtccagtgggggggattatcatttaccccccccccaagtttaagaccaaattttccaggggccccctttgggtttccctgggtttgggggagggggggatgtttccaggaaccaaaaagcccccagccggggggagtttccctgccccttgttaattccttaagtttaaaaatgatgaatttca

SEQ ID NO: 697494 - DNA, 137 bp, Homo sapiens
gggcccccaaatttttcggttggcccgggaaagggaggggggggattttaacccctcccctttttttttgggaaggccggggtttttcccaaaaaattaaaagggggggggggcctttttttttggggttgggggga

SEQ ID NO: 697495 - DNA, 489 bp, Homo sapiens
ggatccagataattaaggcttctcaaatggcaactaataatttgcatttgcagtgcggccagccttaggcgctcggggaacccacacaggtgagaaatgaaagaaaaagctcttcctggtggtcatctgatctttcctaatggagtcttagaaaaatcatttcgccctcccgccctatcttgctgaagttattaagtgacctaggggagctattttcatttattggaaagcacttgggaccagctcacagcattaaggagtgtggggtggttctcaagtctatctcctgcttctcatccctctgtcactcacaaggaccaccccagagggtctattctaagaggtctttgtgcttccagcccctccctcctcgaatccctctttcacattgtcaccagtaagatcttcctaagcccaagtttggaccattgtccttctgctttcacacctccattgtatccagaattaaagtccaaattcctgtgtaaa

SEQ ID NO: 697496 - DNA, 204 bp, Homo sapiens
gttcctttaccaggccccctggagcagaaggacttccggggtccccaggcttgcccaaggtgccccaaggaggaccgagggcttttcccggaaccccaaggaagggccaaggcctggccaaggagagaaaggggcgctgttgggccaagccaaggcatttggttttccacggggccccccggccccaaaaggtgtttgacggaa

SEQ ID NO: 697497 - DNA, 214 bp, Homo sapiens
  misc_feature (81)..(81): n is a, c, g, or t
  misc_feature (130)..(130): n is a, c, g, or t
ccagcttgcccagaaatacaactgcgacacgatgatctgccgcaagtgctatgctcgccttcaccctcgtgctgtcaactnccgcaagaagaagtgtggtcacaccaccaacctctcccaaagaagaagngtcaaataagtgtttgttctcttccgttgaacgggcagcgctccgtgcccagtgccccgttggcccttggatgcctcaaataaa

SEQ ID NO: 697498 - DNA, 371 bp, Homo sapiens
atccttccttctctcacgttgggggacaaaaaagggggaagggggggcaccaaggctcatcactcacaataaaacacaataaaaaattttatggcgaagataaaaaaattttgcattacataatttacacgaaagcagtgctgttacctcccctgtgtggacttgggagaggactgggccattttccttatagagaaatggggtggcttttaggatggcaagggactttctgtaacaacgcatctcatatttggaatgactattaaaaaaacaccaatgtgcaatcaaagtcctcggccacattgtgaactttgggggatgctcgctccaaccgactgctgtcacctttaccgttccagtttttaaatcct

SEQ ID NO: 697499 - DNA, 212 bp, Homo sapiens
cagcaacacagtacaagcttccagaaagagacaagcaactacattactcagaatataatttagaagatctatagtgccatcattacggagcctttataagtcagtatatgatcagtcacttagtcaacaaggtttgatgaacatcccttctgaatcttcccagcagacccacagcttcatgtgcctatcaggactactcccagcattacagt

SEQ ID NO: 697500 - DNA, 122 bp, Homo sapiens
ttaagggacttaactaagcaagcagctctccagtaaacggcttgtgccaagtaaacaccaagcgaagtcctaagcccagcccaggccaacgcctccagggaggcttgccaggaggaaggtgg

SEQ ID NO: 697501 - DNA, 163 bp, Homo sapiens
aggggtaagtgggacaaatggaatggaagggagaagaaagagatggaggaggccagagggaaaaggagagggcatgtaaggaaaggcctggccgacgagtaggctaagtgagtgagagaacatgggtcctggcagtggagcacccacctgagtccgacgtagt

SEQ ID NO: 697502 - DNA, 506 bp, Homo sapiens
  misc_feature (395)..(395): n is a, c, g, or t
  misc_feature (477)..(477): n is a, c, g, or t
aggatccccatggtacctgaatcagacggctcggagctataacttccaaatatgaaatagagacggaagagatttatttccaaacattatcaaatacaaggggcttatgaaacacaggttctggctagattttatggagattaaaaaatatatttcatagctgggcgcaggggcttagggttgtaatcccagcacttggggaggttgagaggggcggatcacgaggtcaggagatcgagaccatccgggctaacacggtgaaaccccgtctctactaaaaacacgaaattagcggggcatggtagcgggcacctgtagtcccagctactcgggaggctgaggtggagaatggcttgaaccccaggggcggaggttgcagtgagccgagatccggncatggcactctagccgggccaacagagcaaaactccatctcaaaaaaaaaaggaaaagaaaaatggtcctgctcgggatgtnatcctcagatagggcctggtgcctgggga

SEQ ID NO: 697503 - DNA, 166 bp, Homo sapiens
ttatgggtagaggtaataatagaggtggagactacaggtgctgtgaactagtaataggtaactacgcttatctagtcaggttcggtctaggaggagtaggggcaggtttggctcgtaagaaggcctagatacggggatagtgcggtgtgtgatgctagggtagaat

SEQ ID NO: 697504 - DNA, 422 bp, Homo sapiens
  misc_feature (412)..(412): n is a, c, g, or t
tgactggggactgctgctctgaagaagactctttcatgcttcctccttagcttctgatggctcctggcagtccttggcttgtggctgcatcacttcagtttctccctccgtcttcacatggccttctgtgtctgtgtctcgcatggccttcttccctgtgtctgtgtctttccatggcctacttataaggaccccagtaattggatttagggcctgcctaatccagtctgatttcatcttaactaactagatctgcaaagactctatttccaactaaagtcacattctgaggtttcaggtagacatgaagttttgggggacaccacttcaacccattgcagaacccattaggcagtcacttcccgttcctcaacgcccccttaccccaggggcaatcagtaattctactttnctgtctgttt

SEQ ID NO: 697505 - DNA, 120 bp, Homo sapiens
tacgagcttggtacgtgctatggtacgtgctgtgggtacgtgctgtggtgacgtgctggggtgacggctgtggtactccagcacgtcacacagtccacgtcacggatctctagatcactg

SEQ ID NO: 697506 - DNA, 1136 bp, Homo sapiens
  misc_feature (529)..(529): n is a, c, g, or t
aaatgcactgtccaggatgagagccacgtcagagtgcggtgttcgtagttgatccgcattcatcgcccaatctagacagaaaataccctattcattcggtcgtccttgtggcctgggacgaatgcgtggtcaagggtattgtggaccctggcgtaacgtgcgagctgaaggaccaaggcaacagttggtgcacacagggcgtattatgaacaccggtgatctgtcatactcacagataggatcgcctctggtggcttcgtgggagggcaaggcatggataggcacatgtaatgggatgcgttcataggaacggcgaataagctttgaaacgcgtgagaatgggtggagtgacgatcgatgaagacagccgcatgtatgattaatggcctgaacacgcgtaacatgaggatgtagatgattgcccatcatgtgccccaagcaatcacaggatgcgtgtggatgttgacgacggggcaaacgagtcgattggtcacagattgaggacctgaagcaacgaaaggttatgcangtagccaagtcatggccagggtcagaatccaatcgcacagatgcgagcactcacacatgggacactggtgtctgcgtggatggcacaggactggaggttatgggtggtctgcaacggaatcaagctggttgcagaagtgtggacagggtgaaccatttggaacaaaggctagtgaaggttaactgggtagaaggcttttaacaataataccataaaatggggcagagaccctggagattacatctctgacaaccacacaccctggtccaattttcgaccacacccggaacggtcagcgcagtggtgcccaacgtggagccacctgttgacagaacgccagaaggcccatgtgggcgacgtgcgctcccaccaatgtaacggcaagcgtaagtgaccatgtggcagcacagggccggacgcgcgaaggggatactcgggggatacaaacgaaaggagtgcgggagagtgatccccacattatgacatatagcccgcgggggggtcaacagcagaggtccgagggacagacacaccaaagaggcgcgcgaggagagcaacaggggcgcgtcacaaagcgggaccaccggagaggggggaaataaaagcg

SEQ ID NO: 697507 - DNA, 712 bp, Homo sapiens
  misc_feature (2)..(2): n is a, c, g, or t
  misc_feature (77)..(77): n is a, c, g, or t
  misc_feature (79)..(79): n is a, c, g, or t
  misc_feature (99)..(99): n is a, c, g, or t
  misc_feature (109)..(109): n is a, c, g, or t
  misc_feature (123)..(123): n is a, c, g, or t
  misc_feature (137)..(137): n is a, c, g, or t
  misc_feature (173)..(173): n is a, c, g, or t
  misc_feature (191)..(191): n is a, c, g, or t
  misc_feature (198)..(198): n is a, c, g, or t
  misc_feature (208)..(208): n is a, c, g, or t
  misc_feature (212)..(212): n is a, c, g, or t
  misc_feature (226)..(226): n is a, c, g, or t
  misc_feature (230)..(231): n is a, c, g, or t
  misc_feature (234)..(234): n is a, c, g, or t
  misc_feature (256)..(257): n is a, c, g, or t
  misc_feature (259)..(260): n is a, c, g, or t
  misc_feature (268)..(270): n is a, c, g, or t
  misc_feature (276)..(276): n is a, c, g, or t
  misc_feature (287)..(288): n is a, c, g, or t
  misc_feature (357)..(357): n is a, c, g, or t
  misc_feature (360)..(360): n is a, c, g, or t
  misc_feature (397)..(397): n is a, c, g, or t
  misc_feature (405)..(405): n is a, c, g, or t
  misc_feature (412)..(412): n is a, c, g, or t
  misc_feature (419)..(419): n is a, c, g, or t
  misc_feature (423)..(424): n is a, c, g, or t
  misc_feature (445)..(445): n is a, c, g, or t
  misc_feature (451)..(451): n is a, c, g, or t
  misc_feature (463)..(463): n is a, c, g, or t
  misc_feature (476)..(476): n is a, c, g, or t
  misc_feature (478)..(478): n is a, c, g, or t
  misc_feature (481)..(481): n is a, c, g, or t
  misc_feature (483)..(483): n is a, c, g, or t
  misc_feature (486)..(486): n is a, c, g, or t
  misc_feature (490)..(490): n is a, c, g, or t
  misc_feature (498)..(498): n is a, c, g, or t
  misc_feature (501)..(501): n is a, c, g, or t
  misc_feature (505)..(505): n is a, c, g, or t
  misc_feature (518)..(518): n is a, c, g, or t
  misc_feature (522)..(522): n is a, c, g, or t
  misc_feature (537)..(537): n is a, c, g, or t
  misc_feature (551)..(551): n is a, c, g, or t
  misc_feature (563)..(563): n is a, c, g, or t
  misc_feature (577)..(577): n is a, c, g, or t
  misc_feature (583)..(583): n is a, c, g, or t
  misc_feature (586)..(586): n is a, c, g, or t
  misc_feature (590)..(590): n is a, c, g, or t
  misc_feature (599)..(599): n is a, c, g, or t
  misc_feature (615)..(615): n is a, c, g, or t
  misc_feature (624)..(624): n is a, c, g, or t
  misc_feature (626)..(627): n is a, c, g, or t
  misc_feature (705)..(705): n is a, c, g, or t
anatgcctcaaacaaattaactttattttcagacaacaggtccaagaagacttcacagctcaatcatgacgaacatnangctgtatcctcacagccagnaaccctcggnattagaagaaaaanacaaccccccacancatcatcaaacctcttttctcactgtgaagaactgntgagacagaattcctganaaggggncatttaggtnatcngggataggggggcntggnnggnctgggcaaactaagcctccccnngnngggggggnnnagcctnttcccaacccnnctaccagcccacccgccccctccgtctcttccggctccccccgccgccactctagatgctctgcttggnggntgtccgtgcctgcgggggcggggggtgggtctggggngcgggggngggttgncggcccnttgnntccgtactctgcgttgggtcngtgtgnacttggctttgntcccaatggtcantnctnanatnggtncttctganganggtnggtcaggtatatnccanccaccctcaccaganaatacatctatganaaacccaaattnctaatcctgaagtnctttgngcnactntacattgtngccactcaataatagnataaatttntnnaaaagctgcatgttttattttaggaaatgagtagaagttcacaagcaacccagaatatgtgccagcagtttgctccantgggcca

SEQ ID NO: 697508 - DNA, 182 bp, Homo sapiens
gcatcccccccgcgaatcgcacggagttgaggcacacgatgtggccattgtgctgctgcagattacgcttgagcatggccttgggggcacagatctgatccaggatgtttatgtgttgcaacttgaggagcgcctgagcaggaggtcggaatcaagaaccagagatcgcaggaggtcacgct

SEQ ID NO: 697509 - DNA, 380 bp, Homo sapiens
cttatggctgccttgagataccacgtgcacgagaggcctctttgcgactcccgtcctctgggcttttctctccagtgccccacagcattaccatttccggtttcatcgaccactttccccttgctttgtgttttctccttgaccctagccatcactgactttggtcgtgactgaaaagaccccttgcgaaattctgcctttgggatttttccttggccgggagccagagagaggtccaatttgtcttctgctaccaaaaatatattccatttcctttcagtcctgtgtttaattaaaaagaggaactagaattgctggataaacacgtgctatttttattcccacctcccacttgcaaaccctcctcctcttcctaatgc

SEQ ID NO: 697510 - DNA, 451 bp, Homo sapiens
  misc_feature (194)..(194): n is a, c, g, or t
  misc_feature (207)..(208): n is a, c, g, or t
  misc_feature (214)..(214): n is a, c, g, or t
  misc_feature (216)..(216): n is a, c, g, or t
  misc_feature (220)..(220): n is a, c, g, or t
  misc_feature (239)..(239): n is a, c, g, or t
  misc_feature (259)..(259): n is a, c, g, or t
  misc_feature (262)..(262): n is a, c, g, or t
  misc_feature (363)..(363): n is a, c, g, or t
  misc_feature (410)..(410): n is a, c, g, or t
  misc_feature (427)..(427): n is a, c, g, or t
ctgtagagacgtggtctccctatgttgcttaggctggtctgaaactcctggcctcatgcaaccctcccacctcggtctcccaaagtgctgggattataggcatgagcactgcacctggccaaaaggcaaactcttccaccaagctaacattcctgagcttttggcgccaaaagaacttcttttttagtgagggnattttttcacgtnnggtacncncccnagattttagatcaggaganttggatttttaaaatgaaantanccaaatatacaggcaataactgacagaaaaatattttgcgaagaaaaagatgaggaggaaaagcctctcgtttgggaaaacctatgaagtgttatggggtnggcgtggtggctccacgccattaatccccagcactttggggaagccnaggcagggtgggatcancctgaaggccaggaagtgattgca

SEQ ID NO: 697511 - DNA, 464 bp, Homo sapiens
atttatattcagatgaaattagggttggcgagtgtctattaaatatctcgattaattttcaaaaaaaaaaaaaaaaaaaaaaaaaaaaaaaaaaaaaaaaaaaaaaaaaaaaaaaaaaaaaaaaaaaaaaaaaaaaaaaaaaaaaaaaaaaaaaaaaaaacctgggggcccccctggccccggggggtttaagcccggggcagctttagcctggggcccgaatttgggcccacttggcccattcccccttaagggggggggattaccattccacggcccgggttttaccaccggggggcggggaaaaccctgggggtccccaacttaaaccccttggaggaaatcccccttttcccaggggggggaaaaaggaaagggccccaaccggtccccctttccaaaagttggcccaccctaatgggcaagggaaatttgagggggtaattttttggtaaaaccccggg

SEQ ID NO: 697512 - DNA, 178 bp, Homo sapiens
  misc_feature (63)..(63): n is a, c, g, or t
  misc_feature (130)..(130): n is a, c, g, or t
gtgggagaggacaggttgggggaggaaatgaagagttcttttctcttctggtttcctgccctnccattcaaaagccaggaaatttctacagtaggcaggatgattggctccggcattccttaatttcagnctcaaaatcaagagcttacaccctcagggtcttcttgcagtagaggag

SEQ ID NO: 697513 - DNA, 342 bp, Homo sapiens
gtccaaagtccatgttcttttttttttgagacggagtctcactctgtcgcccagtctgaagtgcagtggcgcaatctcggctcactgctacttccgccttctgggttcaagcgattctcctgcctcagcctcctgtgtaactgggaccacaggtgcgtgccaccacgcctggctaattttttgtagttttagtagagacggggtttcaccgtgttagccaggatggtctctatctcctgacctcgtgatccgcccaccttggcctctcaaagtggtgggattacaggcgtgagccaccgggcccggccatgctcttaactgcctcactctgatgcctctcta

SEQ ID NO: 697514 - DNA, 900 bp, Homo sapiens
  misc_feature (8)..(8): n is a, c, g, or t
  misc_feature (92)..(92): n is a, c, g, or t
  misc_feature (166)..(166): n is a, c, g, or t
  misc_feature (227)..(227): n is a, c, g, or t
  misc_feature (238)..(238): n is a, c, g, or t
  misc_feature (248)..(248): n is a, c, g, or t
  misc_feature (305)..(305): n is a, c, g, or t
  misc_feature (342)..(342): n is a, c, g, or t
  misc_feature (351)..(351): n is a, c, g, or t
  misc_feature (366)..(366): n is a, c, g, or t
  misc_feature (394)..(394): n is a, c, g, or t
  misc_feature (396)..(396): n is a, c, g, or t
  misc_feature (415)..(415): n is a, c, g, or t
  misc_feature (427)..(427): n is a, c, g, or t
  misc_feature (440)..(440): n is a, c, g, or t
  misc_feature (467)..(467): n is a, c, g, or t
  misc_feature (492)..(492): n is a, c, g, or t
  misc_feature (495)..(495): n is a, c, g, or t
  misc_feature (498)..(498): n is a, c, g, or t
  misc_feature (510)..(510): n is a, c, g, or t
  misc_feature (547)..(547): n is a, c, g, or t
  misc_feature (637)..(637): n is a, c, g, or t
  misc_feature (704)..(704): n is a, c, g, or t
  misc_feature (770)..(770): n is a, c, g, or t
  misc_feature (825)..(825): n is a, c, g, or t
  misc_feature (889)..(889): n is a, c, g, or t
tcaccgtntgagtaaaaataggccacctgcaggcctcaggcaaaaagtagaaactggatagaagaataaagcctcaaaaacgcaagtaattntttggggtgcacgcaggagagggcggatctggggtgtggtcagcagaagaccagccgtggccttgaaggcagtntccagtctctgcagcggcgggatgagggtgaagccccccatttgctctgctcagcctaaangtagagtatanaagaaaaccngattctccgtgtcctgccagggaggatactgcagaagagtggactggtgtggccatnatttcagcatcttcaccatgtacgggcctggtaaacngtagccganctttctataaaaatncctggtgccgacccctgatatcacagcnantatcccagaaccaagtacnactctagccatnctttctgcttccnccatcagcagcatgccaaaaccctgangcggaaatttagtaggatcccggcngcncanagggaccacacncccaaacacatgcagccctcgtactatggagacaccnccacccaattcgaaacggaaagtatctactgaacacttgcgtaaacgtaggaggccaataaaaaagtctagatcagggtcttcgtatganaagaatgtttcccagccaccatttgcaacaaaatctctccttaccaattcaacctggtatggccgtnctttgtgatgaatttcttggattccaacttctctggttctcacatctcgacactgtattccgaggnctttcattcttgcaagtgccagccctctcaggttaccatgctctactcctgagcnaactaaaggcattggaatatccctctgtactcggtacactcgagttcatggaggcacgagggcnaggatccgagc

SEQ ID NO: 697515 - DNA, 229 bp, Homo sapiens
tggataggcaaaaggttttaattggtatagattaaaattaacttgggacaaaaattaaaactcaggcagaaaatgtgttttcttctttttggcaacagcagacactatgtaaaaacaaaggccacagtaaaatattggaaacccaaaatttggcagctgtaaagtattatgatattataatatatagacacaggcaggggaggatattaaagaaaaaaaaaagaggggg

SEQ ID NO: 697516 - DNA, 162 bp, Homo sapiens
ctagctgactctagagtatcccactatcgctacataaactcaggtatctcccgcctcagatctccacagtgctggtattacacgtgtaagccactgcactcagcttgtattaaatgagtttatgattttacgtgtgatatggatccactgttagggtcatga

SEQ ID NO: 697517 - DNA, 219 bp, Homo sapiens
  misc_feature (34)..(34): n is a, c, g, or t
  misc_feature (73)..(73): n is a, c, g, or t
  misc_feature (81)..(81): n is a, c, g, or t
  misc_feature (97)..(97): n is a, c, g, or t
  misc_feature (129)..(129): n is a, c, g, or t
  misc_feature (135)..(135): n is a, c, g, or t
  misc_feature (141)..(141): n is a, c, g, or t
  misc_feature (143)..(143): n is a, c, g, or t
  misc_feature (172)..(172): n is a, c, g, or t
  misc_feature (217)..(217): n is a, c, g, or t
aaaaaggctaagtaatatgtgaatatcatatttntgaaaggtaaaaagtacatttgtatattacatatatggncataactngtgaaggatgaaaganagtacagcctctcggtggtgggattatgaatnattttnctcctntngcttgtttgtattttctatattcctaaanttaacacacattattattgctaggataataaacgttttataaaangg

SEQ ID NO: 697518 - DNA, 1047 bp, Homo sapiens
cggtcgatggcgaggagcccgccccggaggctgaggctctggcctgcaggccgggagcggagcagccggcttcattgagcaggccatggatgcgtggctgagagccagggatgccggcaggcgctgctgtgttccggtggcctgcttccagggcctgtgcggcggtgatcaagcaccggttccccaagggctaccggacccggcgctggaggcgcgggttggcagacggcggacggtgcaggaggcccgggaagctcctccgctgtcgccgcgctggaatatctgccccagttgtcttaatagtggactatgcttccaactgcttatatatggcacgccattgaaggctcagtgactgtccgagattatattcagtccactatggagactgaccaaactccccagggtctctccaacttagccaagacaattgggcaggtataggctcgaatgcacgatgaagacctcattcatggtgatctcaccacctccaacatgctcctgaaaccccccgtggaacagctgaacattgtgctcatagactttgggctgagttacatttccagaacttccagacggatcaagggagtagacctcatatgtcctggagaaggcttcctcagtaccatcccaacgaatgaaacactgtgttggaagcttttctggaagagctaatcccactcctcccaaaaggccaggcagtgctaaaacacttcagctgcagtgcgcctgagaggcacacagaggtcctggtggctcgcacgcacagggatgacagcccccaccaggggacctcccagcacaggacatcgacagcaaggacaagcacgacatggacctccggcacggggcaccacacaatgcaacggaccatgacacggacaagcaaacacgcccggccaccagaccccagggcacaacaccggccccggcgaaggaggccacagacgggcagctcccaacgaacgacacacaacggcgcgccaccaaacacccaaaaacagcagccaacgcgcgcccgacgcccaaccccaccagcaaccccac

SEQ ID NO: 697519 - DNA, 718 bp, Homo sapiens
  misc_feature (583)..(583): n is a, c, g, or t
  misc_feature (621)..(621): n is a, c, g, or t
  misc_feature (684)..(684): n is a, c, g, or t
  misc_feature (715)..(715): n is a, c, g, or t
gggggcgctttattttattactcgtcgggggcgagatgaccaccaatctgttgactctgaccccacaataaaaattctaccttggatatgcctgtagatctaatgcgaaccttcgacagagttgggctaacaatgacttggcgtacaacgttcaactgacactgattcgatttaacaacaaggtcagggggttcaagatcacctaccgggcactccgcaatcacatgggtttgaaggctatcatcatttgggaaaacaaatctattatggaagcgtatggacatgagactgccggggtctttaccaaaagaacccttgtccatcgcttttccaaatgcgtcttcgagagtaaaagcacattcgaaccttgtggatacttttagcttgtcaactgtctgcagcaatgaccgagtacctagttcgtatattaggaaccagctatattttgatacatttcattataaaccttcgaggggccttaacacaaacttaaataaaggccaaattaatgacccatttcacctttatataagccgcggtatacatataaaagggtgatatacccatcttgtaaccaccgccntttaatataaggaaaaccggtataattccctgtggccncggaaaaaagaccccattatcgtgcctgtaaaaagatgccaatctaaaagccactcctaaacnagcccttttaagggggaacccctgatattgnccg

SEQ ID NO: 697520 - DNA, 280 bp, Homo sapiens
ttttttttttttggggggggggggcccccccctggggaaaattttggggggggggggcccccccgggaaacccccccctggagaaaaaaatggggggcctttaaaaggggttcccggcttccaggggggggggggttcaaaacccccaaaggccccccccccggggggggggtaaggggccaagaaaaatttccaaattggggggggggggggggcctttttttttttttggaaaaccccccaaaattggggaaaaaaaaacccgcccttttttttttta

SEQ ID NO: 697521 - DNA, 174 bp, Homo sapiens
atcagccgaagagtgtggtgcacttgtctctacaaaaaataccaaaaattagtcaggcatagtggcatgcagcttgtggtcccagctacttggtgaagctgaggtgggaggattacctgagcctggtgaggttgccacagtcttcgcgctgatgggtacctgagctcgacattc

SEQ ID NO: 697522 - DNA, 279 bp, Homo sapiens
  misc_feature (99)..(99): n is a, c, g, or t
acttaggcgcgttctgcgtcctgggagctgctgagaggactggctcaatgcagaggctctgactgagaaaccagagggagccaggcacgcatgtgcctntagtcttggggggctgaggcgggagggtctcctgatcccaggagttccaggctgcagtgtgccatgatcacacctagagaacagccactgcactccagcctgggccacagaagcaagaccctgtctctattaaacaaaagacagcagagggcacctccgcacgcagaacgcgcctaatac

SEQ ID NO: 697523 - DNA, 230 bp, Homo sapiens
ccctcctaaggtgggaatatcctaattaagctcccttaggaatgggccaggtgaataatctattcatcccaggttgggcttggaggtcggatggccatccctttcttccagggccggggtgtttggtagtaaaatcacgggttaatccaaggcttaattaggggggtaaaggtaggcggtaaacccccagggtgggcgggcggctattggaacctcctaaacgggggggg

SEQ ID NO: 697524 - DNA, 384 bp, Homo sapiens
tgatgcaagtgtcctgtgcttaaagtctcgaatcggcgagcaagtctatttgggattggagacccccttcgatgagtgttttgggagggcctggtcggctctgttggcacaggatgatagctcatgcagggagactgttgggaggtattctcctagctgagagttagaagggggcctgttttgtaagaggaaagggcgtccgtatattaactcaaatggactgaggaaggagggtgcttttggactggctctaatgctctccagtgctatgggcaaaaggggaggtccatggttgttggacttcaagagtgagtttggttaactgaaccttatagatcccatttgccctttcgacttttccggatgtctggggccagcatggga

SEQ ID NO: 697525 - DNA, 261 bp, Homo sapiens
tgcagtagtctcatcaggcacgagtctcatcagctgttcatttcaaattccttcttctatttttaatgaggagacggtttttcagctcttgtcgaccagtctgaagtgcagtgtcacaatctcagctcactgaacctccgcctcccaggttcaagtgattctcctgcctcagcctcccgagtagttcgaattacaggcacccgccaccatgcctggttaattttttgtatttttagtacagactggaaagacagcctggtt

SEQ ID NO: 697526 - DNA, 375 bp, Homo sapiens
atatatggatcagaaagacatcgcgatcaggccggctcgaacaggcacggagcgagcgctcgaggcgaatctgcacgatctcgcgaaaaaccgttcgaactgtctggcggtgaccttggaatgcggcgtgcgatagcataaagtttggtgaaatcttgcgtcaccgcctctggccagtcgcgcacgaatttcggcaaattgacgcgacttcgatatgcggtcgtaaagctgcggggataatgataaccattgtggacacgcgcttgattgttgtatgacgcacgttgcaggagtgcagcttcctgctccacaagcgcgatacgcttgaatccccgttgcttggcgaggtagatagctattgccgcgccatagaat

SEQ ID NO: 697527 - DNA, 182 bp, Homo sapiens
gtagtcattgtcattactcgtataatcgtctgatcactctgagagaagtccctgaggagtacagctcctggttaaaatccagtgtgtgaattatcaggcctgaccataggcaattacagatggctttacctggcacgcctcgtggggaaatctgcctttccctcaccagactttatagccaa

SEQ ID NO: 697528 - DNA, 397 bp, Homo sapiens
ggtctggctaggtaagaatattctgccagtcgaggtaagggcctacaatttgcctagcaccccggcccaggactaccactgtcatgttatgtcagtctcaggtgcgttctagatgcaactaacagaatccccagcagcaattggtccacctatttggtggttcttgttgtttcacatgacacgtctggagttgagttcttgggaaggtcaatagctgattgcacgttagtaagtttatctggggccttctagttctttgccttcaaagctccaacgtggctgccttgctcccagaattttgggtaccctcaacaacacccaccagtgagaagggagagaggaaacaagatcctgtttcctgggatcatgggggctttcccaggagcctctgcatctc

SEQ ID NO: 697529 - DNA, 265 bp, Homo sapiens
  misc_feature (46)..(46): n is a, c, g, or t
  misc_feature (99)..(99): n is a, c, g, or t
agccggggtaggaggatcaccagaggccagcaggtccacaccagcntgggcaacacagcaagacaccgcatctacagaaaaaattttaaaattagctgngcgtggtggtgtgtacctgtaggcctagctgctcaggaggctgaagcaggaggatcacttgagcctgagttcaacactgcagtgagctatggtggcaccactgcactccagcctgggtgacagagcaagacccctgtctctaaaataaattttaaaaagacatatt

SEQ ID NO: 697530 - DNA, 182 bp, Homo sapiens
ctgggctggggacgagggatggcggtgtggtactgaccaggctgaccctctgctgcttctccggctcacccccaactctctgcgctctctctgatgtcaccctccagccgcagacccttggactgccattccctctttctccagatcctcagacagcccatccccctgcccctcttccccag

SEQ ID NO: 697531 - DNA, 124 bp, Homo sapiens
tgacatactgattattagagaacatgtaacaaatcaccatcagcatcccactccacatcagtccagcacatggccgtcattcatcaagtccacaaataacaaatgctggcagggggtgtggaga

SEQ ID NO: 697532 - DNA, 191 bp, Homo sapiens
agtggtgtgggaggaaacttgagttgcagagttggaggctgtggggatggcgcgagggagagaaggaaggtaatgtgacctgggtgaatgacctgttgcactgaagggtccacagctccgctgctgctgcccctgccattgctgctgctgctgctgctgccactgctgccgctgctgctaccactaccacc

SEQ ID NO: 697533 - DNA, 924 bp, Homo sapiens
agcggagctccaaggtaacctaggtttgcaatatgggattcccaattctgctcgcagagatttacccgagcgtgttgcggagcgagctgggcttgcaaggtgctgatccaagagggatttaagcgagaccagagctcctagaagaaaatagagagcagatgatgatgaaactagacactgagacggcgttaaggcgtttagccgaagttagatactatatttgtgaaagaagaactgttgagtgatatcatttagcgcattaatgtgacccgtgcgcacgacggctagtaagcgtgcatggactgcgggaatgacaagaactacggcaaactctgggcgcacctggaacgtgactggacggaccctggtgaacgacgacacagacgctcttacagtgacgcagtgaaaccattcaaaggcaggtgagataacagaaaatggaagtgtgtgttcaaatgggaaactgggtccacaaagactgggggaatgcggcgataaaaagtctatcggaagggaaacactattacatgccaaggagggtacataaatgttgtacagctctcgctgtataccgtttaattgtgacgaaacaggcgcttccacacagacgatatgtggcgcccaacagacgtagttgtccccatatcccctgaacaagccccttattcatggtaacccacgatcgacacaattggcggggcagaaccgagagacactgacactaactttggcaacccttttacccctgcaagtcaaaagtttctaccaattcccttggtccaccattcccttgtgattcgacccattatctgaaaccccatccaccaatgtggggggtacgagaggcgttatcctgtgaacgacaccgggaaaacggcgttggtacaaacttggctcgacctttacttcaaaataacttggtta

SEQ ID NO: 697534 - DNA, 80 bp, Homo sapiens
acacggctgtgtattactgtgcgagagggaggcacctcaataccgagtttgacaacttggggccaaggaaccctggtcac

SEQ ID NO: 697535 - DNA, 158 bp, Homo sapiens
gtcaggctcttaagacgacggcttggcgcgactgtatccgggactgtgacttgcagggtccgcatggagccagagcagatgctggagggacaaacgcaggtgcagaaaatcctcactcttagtacggtctcacagcaacgttagagatagtagaaatg

SEQ ID NO: 697536 - DNA, 170 bp, Homo sapiens
aggccgtgagggtgcaggcattgttgacaccggcacctctctgctgaccggccaaccagccccattgccaacatccagagcggcatcggagccagcgagaactcagatggcgacatggtggtcagctgctcagccatcagcagcctgcccgacatcgtcgtcaccatcaa

SEQ ID NO: 697537 - DNA, 287 bp, Homo sapiens
gatcgagctcgcaccgattcctaattacgccagtgtcacactgaagcagaagaaatacccaacccattcccgaatccttgctacaaaaaataatggtaataatgataaagctatcttacagcacttttctttctaaaagttcacagcacgtataaaggtcaagaagagagaattacactcctactcattttacctagtataagactgggatggtataatgtggaaaatatatttacatgaaaagccattttttggagttcctgtcatggcgcagtggttaacgaatc

SEQ ID NO: 697538 - DNA, 253 bp, Homo sapiens
tcagagagtgacaaaacaacaagatggcaaaagcagagggacatgagacccgaggacatctgcgatccagaacttcatactccagaatggcctcaaagtgggggcaggagataacgtcatcgtccagtactaactcagagggctcagacagggtctccatggcaccaatgaggtccacaatgggcttagaatcatagcgctgcagcaggtctcgcggccggcagtagcgctgcctgcaaaccagcacacgcga

SEQ ID NO: 697539 - DNA, 141 bp, Homo sapiens
atgagtgatctacgactatggtgctgctgtgagacaattactacattgattatctactaattattctcttaatgctggtctgcttatagggtataatctcatgggtatccaagacaaaggagaatgagctcttgtacgaaa

SEQ ID NO: 697540 - DNA, 382 bp, Homo sapiens
tccagttatggggatgtcttctaaaattttctttgctctaagtttataaggaatctgagattaaatcttcacaaaccccttgagaataggaagccaaaccaaggctgacttcagactttgcctgcagttcatattggttcattctatctatgtttttaatataacatccgaatcaaagcgttggtaatataaccaatgatttcaaatgtgtcatgttacaaagaaagcagattgttactgtacttgtgcaaatatgtgtattaccataaacatatcaattctcatgaatagttgcccaattctggggcagtcaggtagaaagcaaaagtaaatgtttcaattacggttcccagaagtatagtttattgaactgctataagca

SEQ ID NO: 697541 - DNA, 728 bp, Homo sapiens
  misc_feature (1)..(1): n is a, c, g, or t
ncggtttattttctaggctttttttgttgaccttctgtctccgtggggatgcctattactctttggtttggcctctcctctttttgatgctcctgggggctggttctactcttctcggcgttttccctttggcctccccggggcttggatgtccccattttgcataccaagcgaaccactttattgggctccactttgcctttatttttaggggcacacattttttagctaccaacgtttgctttcctaaaaataccatggacttggttctctgtctctcggattttctccgggagtttttttttctcacactcacatcttgccggcaggcactggcgaaatgttcacccgggcgttctacgcccgcgaattctccgctgcgccccccggtgtgggagacgccaccgcagttgtttcgttcgccctggttctcccattaggggcacaccattgccgtggtgggctccccatgtgcccatgctaggcaacacgttccacgagagtctaccctttcccaggtcaccattttgagtcaggggccaacaaattgggggcccaaaacggccaaattccaagggctccccccagtatccttgcccggaaggccacccccgcgcgcccaagggggtgactcccccacccacctgggtggttttttgagtacaatgaactctatggtttttccaaataaagtttcaagcatactcccccaaagagcagaaatagaa

SEQ ID NO: 697542 - DNA, 270 bp, Homo sapiens
aggatcccggcatcatttcagttccaagcacaagaaaacagacaatactggcatctcacaacaataccttagttgacccttgtgaggagcataagatagaagaacccagtatgcttcagatcaatgttctcagcagtttctaaagaagtgctcagagacatggaagaccagttaggctaaagagaaaggaaaattggaagatatggcaaaggcggacaaggcccatgtatgaagagagaaatgagaaccatatatcccatcctaacaggg

SEQ ID NO: 697543 - DNA, 933 bp, Homo sapiens
ggcgaggagcgcgggacctgctgacacgctgatgccttcgagcgcggcccggggcccggagcggccggagcagcccgtggttcctgatccccggatccggctcccgctcgcgggctctgacggtcgggcgggcgagcgcgtgcgcggtccgggccggggggatgtctcgggggagggcggctgtgaggatctggatgaggcgtgcacgtaccgaggactacatgattcgagagtgtgccggagcgagagggataggcaagtgcagaggtcaaatggaccacagtgaggactggagcgagcatgctggagggcccgtgggtgatggcaagttgggagcaggcatggactggacagttcctggaccagtacagcattaccctaagccgaactgaccagacaaatgccagtgacaggtggctcgagacgtttcgaatccagaccttgtcaaggcggccatggaccaaagaggaagaccgagaaaagtcatcgagctggttaagaagtctggcacaaagcagctggacactgatttgccaaggcacctgacgggccggcttggggacagcagtgccgtgaacggctggcacaagcaggctcaaccctgaggtgaacgaagtcttgctggaccgaggaggaggaccgcatcatctgcgaggcccacaaggtgctgggcaagcggtgggccgagatcgccaagatgttgccgcggaggacagacaatgctgcgaagaatcagtggaacttctaccattaaaaagggacggtggacaccggagggctactggacgcgaagtcaaagaactggcaagcccccaagggacttgtggtgggaccaccgaggcaacgagcggcctccaaagtggccaggccacggaaaggccaggaacgaccggacaaactggcctccagccactaccaaaagggggagaaacc

SEQ ID NO: 697544 - DNA, 357 bp, Homo sapiens
tcccgggctgacggtaatagaggcacctacaggctccggtaaaacggaaacagcgctggcctatgcttggaaacttattgatcaacaaattgcggatagtgttatttttgccctcccaacacaagctaccgcgaatgctatgcttacgagaatggaagcgagcgcgagccacttattttcatccccaaatcttattcttgctcatggcaattcacggtttaaccacctctttcaatcaataaaatcacgcgcgattactgaacaggggcaagaagaagcgtgggttcagtgttgtcagtcgttgtcacaaagcaataaggaagtgtttcttgggcaaatcggcgtttgcacgattga

SEQ ID NO: 697545 - DNA, 485 bp, Homo sapiens
  misc_feature (4)..(4): n is a, c, g, or t
gtanccgttcgtacgagaatcgctgtcctctccttgctcgagcgcggtttgtacgggcgagcgatgaaacgcctgttggccttcggcctggtcgcctcggtcccgttcattgcgttgggtggagtggtgggcggatggtggccgctgaacgtcatgttcacgctgttggccgcaaccgcgatgctctacctggtcgagcgcggccgctcggtcgctcctatagcgctgttcgtcgtggccggcggcctggtcgagttctgttggccggcgctgctgctggccgcgtctgtctggttgtacctcaagcgcccgacgtgggcggccgcgttgatggcgctgctgtcttgcgcgtccctgtggtacatcaatggcaacctttgggcgcttgctgttgtgcccctggtgatcgtcgccgccggcgtcgatcttcgtgtcccgcgcctgcgctgggccttttacacgtactacccgctgcatctttgcaa

SEQ ID NO: 697546 - DNA, 239 bp, Homo sapiens
atcgcctgctagctgcttgatataaatggtcatttctgcaataaagctcctgttgtgatcaggacccacttgggtgaggagaggggctctcaaatttgagagcccctctcctctcactcagaacaacacacaaggtcttatccaaaggcagaaaccaggttatacatcacagtcaatgactttgaatttcatgtctataatcgctcggatctttatggacgccttcaagagttgtttgg

SEQ ID NO: 697547 - DNA, 362 bp, Homo sapiens
ccgaggtcaagcagtcgcctgggggctcgtttgaggcaagaagcgccagtcgtgttccaggcggggtcttgagggtgctgcggtagttttcgcgccgggtgcccacgacattgaggatcaccctctcgttgttctcgatcttgcccatctctgtgactcagacatgacttaacgagaccgagagaaaagtggttctgctttggtttccgagtggacgagtttctctgggcagcgggactgagtctttgcgcccagttgagccgcccttctccgacgagaaactacttgttggcgttttccggattcaggtgtttgagccgcttccccgggctgcagtttgagagggggtaccgtgctctaat

SEQ ID NO: 697548 - DNA, 198 bp, Homo sapiens
  misc_feature (71)..(71): n is a, c, g, or t
  misc_feature (95)..(95): n is a, c, g, or t
  misc_feature (120)..(120): n is a, c, g, or t
aataaattcaaatggtacaaaaagggataaaacaagaagtgaatgccttaaagtccattttgtctgaaatnatgattgcaacccctgcttttttnctgttttctgtttgctttgtagatnttcctccatccttttattttgagcctatagatgtcattacatgtgagatgggtctcttgaagacagcatactattggg

SEQ ID NO: 697549 - DNA, 834 bp, Homo sapiens
  misc_feature (28)..(28): n is a, c, g, or t
  misc_feature (84)..(85): n is a, c, g, or t
  misc_feature (197)..(197): n is a, c, g, or t
  misc_feature (218)..(218): n is a, c, g, or t
  misc_feature (224)..(224): n is a, c, g, or t
  misc_feature (228)..(229): n is a, c, g, or t
  misc_feature (254)..(255): n is a, c, g, or t
  misc_feature (288)..(288): n is a, c, g, or t
  misc_feature (297)..(297): n is a, c, g, or t
  misc_feature (299)..(300): n is a, c, g, or t
tggtatccagagagaagactcatcctgntcttcgcgctgtgctggcttctacaccacgatttgctgagtttctgctgcccctgnntgattgagaaagtggattctgaggttctgagtgccaagttggattctctacagactctgaatgcttgctgtgctgtgtatggacagaaggaactgaaggacttcctccccancctttgggcttctatccgcanagaggntgtnnccagacggcaagtgagcgggtgganngcagagggcctggcggccctccactccctgacntgcgtgtangnnctcgctctgtgctagccgcgctgcatgctgcagcgagcgctcccttgaactccttcctctcacgcaacattcgtacaggacctgcacggccaccaccttgtgctcaacccggcccactgaccacatggctgctgcgccctacactgccaacagctgcacagcacgcgccccctaccacgctgccactcgtcgcccaggcgccctgcctgacctcaatgcacacccaagccaaacagacacctgaccctcacaacatgccacggacaaacaacgaccaaccaaagaaccacacgcaccaagaaggacaaaaccaagccgagagagaaacaaaataccatagtacacaaaatgcacacccaagaagacaaacaatagaaagacacagaagccacacacaaacgaagcaaccacctgaacaccacaacacacaacacacacgaccctcatacaacaagcgccatacaaacaaaccacaacagacacaccacatgacacacacaaggcacacacaacaacaccacagacaaacaacaa

SEQ ID NO: 697550 - DNA, 736 bp, Homo sapiens
  misc_feature (28)..(28): n is a, c, g, or t
  misc_feature (84)..(85): n is a, c, g, or t
  misc_feature (197)..(197): n is a, c, g, or t
  misc_feature (218)..(218): n is a, c, g, or t
  misc_feature (224)..(224): n is a, c, g, or t
  misc_feature (228)..(229): n is a, c, g, or t
  misc_feature (254)..(255): n is a, c, g, or t
  misc_feature (288)..(288): n is a, c, g, or t
  misc_feature (297)..(297): n is a, c, g, or t
  misc_feature (299)..(300): n is a, c, g, or t
tggtatccagagagaagactcatcctgntcttcgcgctgtgctggcttctacaccacgatttgctgagtttctgctgcccctgnntgattgagaaagtggattctgaggttctgagtgccaagttggattctctacagactctgaatgcttgctgtgctgtgtatggacagaaggaactgaaggacttcctccccancctttgggcttctatccgcanagaggntgtnnccagacggcaagtgagcgggtgganngcagagggcctggcggccctccactccctgacntgcgtgtangnnctcgctctgtgctgagggctgatgcatgaggaccatccatatgactccattccttagcaacattcatacagtgactgcaggcaacacaacatgtgtgaacacggacatgaaactggtgtggcactagatgccaaagcttgtatgcaggcaaggtgacaggtgcatcttgcaccgggccatgtgactctgtcaacagcaatgtactgacatttacttgctggaaacagttaccacaagcacagtcaagagcagcccagcgtgttgaccaatccttgcaaatgctcctgggttatcttgaacgctgcagcagaaatggagctatgaaaaccaagatcaaggctctgaatggtacaaggaccagatgtctcaatggtatcatggctctacagacacaggcacagctcagatgtaggatcgacactgaagcatggtgcag

SEQ ID NO: 697551 - DNA, 861 bp, Homo sapiens
ccatgaggaaacgagcgtatgaaaaatcagatgaaatgagtataagaataataaaaggagtaaagaacgaaaaaattacgacgagaatttagaaaaaaaaaaaaaaacgggcaacaaaaaacgaagctgccaaaaagaccagaacaaccagagataaacagagaaagaagacaaagagaaaaaaaataacaaacagaggcatagaaaaagacacacaaacaaggaacgacacaaacacagaatcaggaaagagaaacagaacgaatgaacaaggacagacgtccagacacaaaaaacaagaaaaaaaacaacaacgcacagaacaagcaaaagaaaagcaacaaaaaacacaaggtagaagacagaaaacaaaccacaatggaaaaaaaacaaaacatgaccagcaagaaaacaaggagaatcaaaaaaaaaaaaagaaacagagcacgacagaaaaaggaacagaaagaagaacaagaaaaaagaaagaacaaacgcaaaagaaccagaaacagaacaaaacaacaaacagaaagagcgagaaagaacagaaataaaaaaaaacaaaaacagaacaaaaaggacgaaaaggaaaaagaacaagaaaacccagaagagaagaacacgacagaggaccagacgagaaatagacacaaaaagcacccacaaaaacagaccaaagaacacaaaacaccaaacaacgcaacagaacgaaaaagaacaagaagcagaaaaagacaacggaacagaacaaagagacgaaacaaaaaaaacaaaaagacaaaaagaagacaacaaaaagacgaacaaaagcgcagcaaaaacaaaacaaacgaacaacgagaaaacaacacaacacac

SEQ ID NO: 697552 - DNA, 84 bp, Homo sapiens
cttgcgcaagcactgtacaggtttgccaaccaagttttaagcgtgcttcaaagtctggagggtgctcactacggtcacttaaga

SEQ ID NO: 697553 - DNA, 1250 bp, Homo sapiens
  misc_feature (618)..(618): n is a, c, g, or t
  misc_feature (922)..(922): n is a, c, g, or t
  misc_feature (1116)..(1116): n is a, c, g, or t
  misc_feature (1250)..(1250): n is a, c, g, or t
tccagtggaaaatacttttttttggaaaccccaccaatctgcaaaatctgtccctggcatttaagcctcctttcttctcctttgtgcaattctcggctcttctcttctcaggtggtctcccatgtgaatgtgcttttcttctcctcctctccagtggtctcgtggaacgcggccatgtgcgccaaactttgagagggtggtgctcaagtgaacctttaaggctcaactctctcctccagagaaacccccgccgctatctcgtctctgtgccaccgagcaagaggacacttttgcggagagggtgtgagagccacccgcgcttctctgtgtggttctcccccacaccccacaacagagctctttctcgagcatatgacaccaaagagtctcatatgtggtctccacttctccacaccaatgagtgtgcgacacaaaagacgccacacccagagagaggcgtgtcgtgagagtcgctctctgtgtgtctcagagatataaggctcatataagtctcagaggttggagagcgcatatgtgtgtctctgtgtgacacctccgaagctgtgtgacccggctctctgtgtgaactaagagcgtgtaaaccccctcgtgtggccnacaatatcctcctatataataaaatatcatctcatcatctgtgtattgtagaataatctctccacgaagtgtggcgcgcggtagaatagtcgggatagagcccctcctatttctcgtgcgctcaacaagaagcgcgtcgtgttgcccccacacgagaagaagaaagaggcgctcctaaacccccgccgagcgccagaggagaatatttgcgccaagttgtcgccccccccccaatattataccacaaggggcggcgccaaacccctttgtttagtacagaagaatggtcgcgccgaagagaagnagggggaggacacagaagaagaagggcggccccacaggtgggtaggaaaacaacacgcaaaagcggcgtgtggtggctcatccccggggggccgcaccccagggcgtgttgtcgtcggtcgtagaaaacataccaccgcaggagagaagggccgctactaaaagacgaacaccatcgctgtggcggcgtagganaatcttcccccccccgtgttgtcgtcttctatgaagacaaaacacaagaggggcggccctcatatagcaacaacactctctttgtggcggggccaatctttgtggtgcacccaagcggagaaccacatttcccn

SEQ ID NO: 697554 - DNA, 1240 bp, Homo sapiens
ctccgccacatcctaccacctctcttggtccatgcgatgctgttgcctggtgccatgtggtcaatgctggatgtgtgctcctgactgtgctgctgtgactgtgacgctgaatgctgcctgatgccactggctgcaccttaactggtgcatccactgccactgtgaatgatgcttgaagtgaatttcttttgccaatgtgcactgtggcttggctcttgtgctgtgctcgatcaatggtttgttgatttgagtgactgagcagctctgtgcttggtgttgcctctgcagtgagccagtaagtgcctgctgtgtgatcacgtgacctcatgacatgtggcctgtgcttgaccacttgctggactgcccagcagaccctgactaccttgctactacctgcctcgactcacagaattgctcagggcttacgaatgtgctcttcctcgacctggtctgcctgataactcccccgtgctggctgaagatcgctgtactgctgtgccactgcgggccacatgtgaaaaatggagttttggaaggttggccacatcaatggatgagctcttcgtggactgtgaagtgatgacctctctatttgctgggtaccagaaacagctgtcgatcctgttgcggcacctgccccgatgacctcaggctgagagagagctccagaagatccggattaaactgatgtgtgaatgacagagatcagtgtggaaagcaagcaccaaagcctgcagggcctcgaccttcccgctgaaggcttgaggccaggggtacttcagcagctacaagcagaagcatggtcagatacctccagatgacgtggaccaagagcgggaaacacattgaaggtggtatgcaacacagaggcccacggattgttggcccaggtggtcctccctggtttgcctgaattgggtggcgggaatccaggacttcctctagagagtcagccccagaaggggacccccttaagacttcgtaaagtccacattaccctccctggggctaagtggccgaacaggatcgcaactacaaaccagcgtcagaagagcactaatacacaagtaggaagcgtacccatcggggagtctacaagtatattagttctgacaaactagagcaatagaggaggcacaacagcacacatctgtcaatcgacgctgcggctgacgaacccagtagcgtcacgcgacgagagtgctcacacagactttagtcctttttctagtgtagttca

SEQ ID NO: 697555 - DNA, 364 bp, Homo sapiens
agtagcggaccaatagttaataaagaagggaaagtgagttcaaagagatattgtacccgtgtcatagcagcattattcattaacagcccaggattggggcagccagatgccaatggataaatgaataaacaaaatgtggtatatacagtgaaatgttattcagccttaaagaggaaagaaattgacatatgtgacaacgtgaatgaatcttgagggtattatgctgagtaaattaagtcagttacagaaagacaaatgctatgattccacttttttgaggtacctagaatagtcaaattcttaggcgtggggaagggggagctatcgtctatggggtacagagtactgattgtgtaaactgatt

SEQ ID NO: 697556 - DNA, 364 bp, Homo sapiens
ctaattttgcaagctcattatcacctcgagattaaacaacactatatacagttccactcaccaatctatcgtgcataacataaggagtagatctaactgtgtagcaatttatgatcatgtcacttccaaccataaggtcgcacagtgatcctcctcccagggactaccgagcaagtataatactcctatgagtataagtagaaaagtgggttaggaggctattataacctgctgcatacctcccctagtttaagtcttctaaaataccttttttccatcaattactctataatgccaccaaatacaataactttgtaattcatcagccttgccatatgtataaaaatgtgtgctctcaaagcat

SEQ ID NO: 697557 - DNA, 176 bp, Homo sapiens
gtctctacaaaatataaaaaattagccaggcatagtggcccacgcctgtagtcgcagctaatcgggaggctgaggtgggagaatcacttgaccctgggaggttgaggctgcggtgagatgtgattgtgccactgtaccctaaagcctgggtgacagaatgagaaccctgtcccacc

SEQ ID NO: 697558 - DNA, 238 bp, Homo sapiens
tttggggaaaaggggttctctctatgacccaccttgaggaaaagggattcagtgtctgtggctaggcttggggaagaatgaagggccgagacaggaaggccgaaggtcagagagaaacttttgcttctgaggctgcttcagagccttaatttggggtatcattctctgagccccaacaacatgttaaagtctctgtccattagttcaaacattttggtttgagtagcttggacgacag

SEQ ID NO: 697559 - DNA, 839 bp, Homo sapiens
  misc_feature (197)..(197): n is a, c, g, or t
  misc_feature (204)..(204): n is a, c, g, or t
aaaccatcgatgacctagaagatgaagtctatgcccttaagatgaagtacaagtccaggagcgagtaactggcaacgcactcaaatgccacaacttccttctaaccccaagccaaccgtgccacctcagctctcttctctcctctcctttccattctctctatggtgaggccagcaggcagaagaacaagaaattgncaacatngcacagccagggctgggagcagcctagggagagccccatcatgcccaccacccactcgggcactggcttcatcctttacctatccccttccaccctccttggctgcttaataaattctgaacttgggagaaaacacaaacaaaacaaaacaaaatcataaaagcaaacacaaacagaaaaaaacaaaaacatctgtgggtgtggcgcgcgcgcccgcgcgacccctagcagaaaaagagcttttataagacacaccttgcttgtggggggcgcgcgggggccccccagtaggtgtcaaggtggacccagtgtggcgccaaccaaagagggtgtgttacgccagggagaggacccaccgggggcaacaaagagaaacaagggggcggtcggggggaattttctcaccacacaattataaaaagaaaagcgcgcgcccggtgggaaaaaccaccgagaaggtgctcttctggtgaaaaaaaaacatctccgacgagagagggagagaatcctcagcagggaggggagaccaaacaatagagggagaacttactaattcacgaaagagcgggacgtccacagagagcgagacaccgcaggaatttgataaaatgaagccccccgtgttgggggtaggt

SEQ ID NO: 697560 - DNA, 148 bp, Homo sapiens
caaccgccatgcactgcggcgtcagacacaccgcgatcttctcccgacgcgaggcgcggaccccaatgccgcaaacagtccgatggtaggcagaccgtgcctatgacggcagcctgctccatcgctggggttgaatcatctgggatca

SEQ ID NO: 697561 - DNA, 658 bp, Homo sapiens
agcggggtagggccgggaagccgggcgttggtggagggaggcgttgggcttctgtcgccgcgaagctggcggaaaaggcagtggccatgcgaagccggctcgccagttcccacgactcccagggcaggtggcgacgaccacgacttcccgggaccagcctttgcccacattcctgacacggggtccagtgcttgccattccacaggtgggggaaggtggaacactgtccatccccgtggagcaaaaacgctgcgcctcggggccttgaacccggatttcggtttgaacaggaagcaagagaaaataagtgtttttccatttaggtgtgaagaacaaacgagtgacacatccaatgggctgccacgtggcaaccgtgttccttctatgccgaaactaggacgtcatgtttaagtcttcatgcgctaccgtttcgatgtccgtcctcagagaatgggccagacagatcatgagtcagttacaagtggtctggcggttaaacattaggcaagctataagcgggcacaccaacgggcatttgtccctttaaccacgtcatcaattccctactacgacattggtccctactggtactaaaactgcctgttgagacgacagtaaggaccactattccctagaagccatacccatagaggcagaa

SEQ ID NO: 697562 - DNA, 353 bp, Homo sapiens
ttgcgctgggtatgaagaaactggaactctgcaagttactggtgggctccaaaacggtgcagctgctgtggaaagcagcaaattaccatgagatccagcaattccacttctggatacctacccaagagaaccagaagcaaggtctggaatagatatttgcatatccatgttcacagcagcattattcacaacagccaaaaagtggaactaacccaagtttccatcaacaggtaaattactcaacaacatgttacacatacatacagtggaatatccatcggccttaaaagaaaggacatgttgacacattacaacacgggtgaaccttgaagacactgaagatattatgctgc

SEQ ID NO: 697563 - DNA, 298 bp, Homo sapiens
caataaccctcaatacaggtagttaatagaatatgtataattagagagacgagtcccttctgttgcccaaggtgccaagcagggagtaccgtggtacgaccttggctccatgcaagctccaactcacaggtatatgccattctgccggctaagccacccaaagtgctgggattacaggtgtgagccaccgtgcccggccttagatgtagaatattcccaaaagagaattctttgagttcctgtttcagtctatttattgagttgagaacaagtatacccatgtaccctacataaggta

SEQ ID NO: 697564 - DNA, 494 bp, Homo sapiens
tatactgaatactgtaggcagttgtaacgcaatggtaagtatttatgtatctaaacatagagtaaaaattcggtatagaaaatagaaatggtacatctgtataggacacttacccatgaacggagcttgcggggctggaagttgctctgggtgagtcagtgagtcaagtaatagtgaatgtgaaggcccaagacatcactgtacattgttgtaaactttataaacactgtacacttgcactacactaaatttataaaaaacatttttcttcaataataaattaaccttatcttactgtaactttttaactttctaaaactttaaaaaatttttgaactttttgactcttgtaataaacctttagtttaaaacactatacagctgtacaaaaatattttctttctgtatatctaaactttgcctacttttaaatttttttttctttttttttttaacttttaaacttttttcttaaatgtaagatgcaaaagaga

SEQ ID NO: 697565 - DNA, 176 bp, Homo sapiens
gcaggtaggcctaatgggggaagatggtaatataaaagcaaaaagtattttttttttgtaaagactgaaagctgttctgtggaagacccaccctttcctttaaacacgattctttcacttccaactccaaacttggtcaactaatccttaaaaataaacttgagctgggttttgga

SEQ ID NO: 697566 - DNA, 744 bp, Homo sapiens
  misc_feature (26)..(26): n is a, c, g, or t
  misc_feature (74)..(74): n is a, c, g, or t
  misc_feature (81)..(81): n is a, c, g, or t
  misc_feature (90)..(90): n is a, c, g, or t
  misc_feature (106)..(106): n is a, c, g, or t
  misc_feature (114)..(114): n is a, c, g, or t
  misc_feature (173)..(173): n is a, c, g, or t
  misc_feature (211)..(211): n is a, c, g, or t
  misc_feature (258)..(258): n is a, c, g, or t
  misc_feature (310)..(310): n is a, c, g, or t
  misc_feature (338)..(338): n is a, c, g, or t
  misc_feature (358)..(358): n is a, c, g, or t
  misc_feature (360)..(360): n is a, c, g, or t
  misc_feature (375)..(375): n is a, c, g, or t
  misc_feature (400)..(400): n is a, c, g, or t
  misc_feature (402)..(402): n is a, c, g, or t
  misc_feature (419)..(419): n is a, c, g, or t
  misc_feature (424)..(424): n is a, c, g, or t
  misc_feature (459)..(459): n is a, c, g, or t
  misc_feature (504)..(504): n is a, c, g, or t
  misc_feature (548)..(548): n is a, c, g, or t
  misc_feature (551)..(551): n is a, c, g, or t
  misc_feature (561)..(561): n is a, c, g, or t
  misc_feature (630)..(630): n is a, c, g, or t
  misc_feature (683)..(683): n is a, c, g, or t
  misc_feature (720)..(720): n is a, c, g, or t
tcaagcaaatgaatacttttattaanagggtaagtttttgtttgttttaacatggtagggttttgacctcaaanatttgtnaggtctgcnactcaaatgaacttanagctgganaacgtatgaaccttgaagatgcctcttctagtccagtttagggtccaatgcagaaagtnccatactctcatccccaagcccctaaagggcctttgcnaatttttcattttatgccaagtcctctaaaacgcatcagggtattanatcaacttgtaaagaatatcaagatcttatcttctattttaggttccatgtnaaataaagctgagtaaggttgtccaaanaaactcaccagaaaggttananaagaaagtgtaccanaacaaatttaaattttgaacaaaananatctctcctcctttggnctcanaaagaaattaaagtctccaaatacagacaatactntccattctccagctcttctccagattcacgagttccagccagggnggcccatccacactccccgttgaagtgtgggcctttcttcagtngtngctgcatggngtggtcttccagaattaatgcagccccttcagcaccctccagagctggagaactccaactgtgagtttnatgtgtaaaaaacagacccaaagttccaggcgagctatcaggtcacacaaganatagcaaagcacctcaaaaatttagaaataaccaccnaagcccgggaacaaatgtgacttc

SEQ ID NO: 697567 - DNA, 151 bp, Homo sapiens
tccaatgtatataacccactcctgaaaaaaaagtctgataattattagacgtaaacgacctctctaaattgatcatgacctggttactgggaattaaaggtcaggaatgtcactagaagctgatatctagctggacttggctactttgcaa

SEQ ID NO: 697568 - DNA, 115 bp, Homo sapiens
gggagatcgaggctgcagtaagctgtgattgcaccactgcgctccagcctgaacaacagagccagaccctctctcttaaaagggaaataaataagctctcctcacatccgtactg

SEQ ID NO: 697569 - DNA, 288 bp, Homo sapiens
gggtccaggaggtggctaaccacttgcatcacatgcagcagtccattgtggccgtgctcatcatgcctctggggcatggtgacattgtcatctgtgtgaagggtactctgtgccacagcaggataagcttgccagatgagcagctgggaaagggtaggctatgtatttcgtacagctgttgtcaggatatcaatggctgtcgcacaaagccctgcaggaatcatgtccgatgaggcatgcattatgcttaccagagtgggaatcagcgtcatttgcattgggccctga

SEQ ID NO: 697570 - DNA, 834 bp, Homo sapiens
  misc_feature (834)..(834): n is a, c, g, or t
tcccatctttctactttttcatttttttggaaacagggtctcactcggtggcccaggcgtggattgtgcaagggatcaccatatattagcctcacgtgcagaccctctatacctctccggggcctcaagtgtgactcactcgtggcattcagccctcccgagaatagcgtgggaacatacgggcatgtgtgtgccaccagtgacgtgacctaaacacaaacaactatttgaggtgtagaagaagtggaggctcctccacactcagtgttccgcccgagggcgtggctcttgtgacacctctcgcgtgagagacctcaagcgcaacactccccaccgtgcactctgcgcactatcaccacagagtgtgcgtgaggggatatataaccacagcactatgagaagcccaatcgtaggacactcgtgggcgccccaattatcgagagcggtataaacaaatcccgcgcgacgtgtgaacaccctatctcttttatttatttattatatctatatactatctagagagaaataagagagagtatatcctgcagatcatgtgtagccatactccacaacagagggaggagagaagacagaggcgaacaagagtgcgacaaccaaaaacaactcgtggggagacaacacataaatagtagaacaacaccaccaactgatgtagaggccactccacccagaaacgatcataacaaaaacacccaaaaaatcaacctctactgtggagagacaaaaccaaagacgctcaccacacacaaagagagaaacaaaacaagagaagacaaccaaccgagcggcagaaatagaagagtgtaccacccn

SEQ ID NO: 697571 - DNA, 292 bp, Homo sapiens
taacgcaccattactgcgtgtgctgcaccgaaccacgcagagctcatcgtgtgtcccagagcgggagtatccacatctgggagttgaaaacagagcacaacgagcagatgatccctgagcccgaggtctccatcacgtacgcccatatcgatcccgaggccagctacatggcagctgtcaatagcaccgtaaactgctatgtctggaatctgacgggggcattggtgacgaggtgaaccagctcatccccaagactaagatccctgcccacacgcgctggcctacgcacatg

SEQ ID NO: 697572 - DNA, 123 bp, Homo sapiens
  misc_feature (95)..(95): n is a, c, g, or t
tggacttctactgattctaatgacggtgtgggtggccagagtggagggatggttagggtggggactatgatgcccagctgcagtctgggcgtgantaaactcgccagtccagtggaaggtttt

SEQ ID NO: 697573 - DNA, 373 bp, Homo sapiens
ggtgcgactccatctgcagtttttgcgtaccggcagtcacgcgcacgtggcgctggccggccatctgcaacaactgttgctgcttgtcgctgagccatgcgatggccttgagggtcatgtcgctttgccgcgctggccatagttgtccagggcccgcagcaacagtgccgccgacagcgagttgtagcgttgctcgttgaggcgcttgcgaagtttatccagcaggcttgccgacacatcgtcgagcatttccgggaagtgacgggcgagcaaatgcaggtgctctgcgtcgtgcaccagcgggtcgtaatacaggccgtcgctgttccatttatccgacaggaaagccacggcaccttgcggaacagcgtgt

SEQ ID NO: 697574 - DNA, 328 bp, Homo sapiens
gctcccacattgactgtgcccatttaagacttagatgccttgtggggtttcttcgccacccagtgcttccaccaacgccggcagaagtcaccaaacgtcagcatcatcagggtaaagctggcgtcctgctggcccagcgcttcgtcgcgccgtcctgttccgcctgatcctgcagcaggtcttcgaacttcaggcgcttgacggtcatcttgtcgtccagcatgaaggacagcttgtcctgccaggccagggacaactgggtcacgactttgccggtggtcaggtgcagctggatctcttcgccggtcaggtcctggcgcttgcagcg

SEQ ID NO: 697575 - DNA, 252 bp, Homo sapiens
aagtccctctccacgccctgcaggcacaggcacttttcatggcaagccatggagcaggatggagagcccctgggtgctctgggccttgggcaggagtaagcaaggtatggctggctgaccaggagaagacccagcgcaccaggagcactttgttttcaggccgtgggaagttccggggcctttatttttattctttttaaggaaaaaatgataaaatctcaaagtgtttttcttgtttaaaaaactatataa

SEQ ID NO: 697576 - DNA, 1297 bp, Homo sapiens
  misc_feature (95)..(95): n is a, c, g, or t
cgcagcagattgactatacaccgtcatctactcaaatacgtgtgatacatgctgtgctagtgatctagcccggctatatatatgctagtctgganatcttatacatgtttcccactgagtccacgtagatgctgctcgtatagccactgtaggacttccactagacaacataggtgaagagtcaactcagtacacaacataatctagcaacggcacctggcagcagttagcaagacgggtgttgacccggattagtaggccgggccgcgagacgagtaccctacatcgcctgccattacgaaacgctacgcctagaagacctgatggcccagttgctgtttaaagattagagcagcagggaggcgctgacaccggaatcctcgtccccggaaacgccagacacaagttcacactgtgggtgcagccgcatgcggtgacctggagactcgtatggaataacgactcgtaattgatcgtcggggattaaggtcgtcccaacgtccgctgagtattagcttgcgcagcctattgatgaaccttacgaacacagggccgtacgctgctgaacttggctgtgcaggctggcatcacacccgcacggtaggctaaccctccacaggactgggaatcatcgggcgactatggcgatcacttatacaagagtcttagcactggagggacactaatctgttctgtggggcaatatcggtgcgaacgcttaggtggcagttaaagagatccatgggaacttgtacggagttaaccccgagagcaccatgtccttctagcgaatggttctacaagaccgccaaagcaatcaggggtatggcactctgtgtcaacactggaaggctgtgggagttctgaactcaacgggatcccaatggccgtgctagcgatagtacctagaagcgaacgcaaatagccgagacagctgtcgcattgacctctatgcggtgctcgtgaagaactcctaaatgtgccccattttacaccccaatctcttttggcattgggactgggtgcctccgtacactatgactcgcgtaataagacatgcaccggtcttgaacgcccggcgtggaaatcctaaacgaagggggtgctacaccactagagggggtcagcagaccgcgggcgacacgctccgagggggaacctcgggagtcgaggcaagacgggccggacccgggataaaaagccggggccagaggggagacgtgggataaccaaggcaaggcgcggagcaactggtacaactgctaacacgcggacagcgggcctgggacaacggggc

SEQ ID NO: 697577 - DNA, 1276 bp, Homo sapiens
  misc_feature (956)..(956): n is a, c, g, or t
gagtcccacacaacaggtggcagactaaatgtcgcccaagcgaaaataagctggggcctccacctccccccccccgcgctagaggacacctcgtattctggggaagatgtgtgcgggccccccccctctccccccccccgggggagaaaaaacacacatcttcggtgtggggccccgctacatgaagttgtagggtccccccccccccgcggcgggggaccttctttctttttcccaccgacggtagtacctatcctttttaatgtttaattccgccctatggggccgtctttgttcttaatcaacattcgtggggccgatgtcgatttttgcccgcaaacaacaggagactcttattttgcgggcccacacacaggggttttccaactactcccccccctcctggagactctggttgagacacccgccgggagaaacacgtcctccacaccttctggggacaacaatagcggccccttcatgttccccggctggggggcacccccaccccgctctggcacgacacacactgtgtggccacagctgtggtgtgagaaaacccctcggagacctcgtgccctgctgtctcacagagacaaaaaccctcttctccccccccaatagtatgtagagagggacgactcttccacacagagagagagtgtgtgtgtgagacacccacagggagcctccgcagagagaggcgcccccctctctcacacaggggacacactccctctggggcgtcacacacacgcgaggcccccccaccgcagtggtgtgtctctcctctctctgagactctctcacacacaccgcgcgcgcaccacccacactctctctctcccacctctctgtagacccctctgcgggcgtctgcgcgctcttgcagctcccacaccgcgcccctctttgtgccacagctccctatgtctcctccggtttatgcgccaccncaaattttgggtaccaccccacacacgggtgtggtgggaccctccactcggcccaccaccggcccccccaaggaggtataaacacccctcggacgcccccacacccccccccaagagagcccccgagagaggaaaagaagaagaaccccccccgccgggggagtccccgcccaccaccccagtccccccccccccctggatatctccccccccccccgcagtgcccacagtaggacacccctgtaagaaggggaggggcccaggggacccccccctgtccaaggagcccccccattaagtacccccggccccacacccca

SEQ ID NO: 697578 - DNA, 101 bp, Homo sapiens
cagtagtagctgggactacaggatatgcacaggcatgcccagctaatataaagtatttttactagagatggggtttcaccatgttggtcaggctggtctcg

SEQ ID NO: 697579 - DNA, 143 bp, Homo sapiens
caggcgaacgattggtgtgtctgcattgagaggtatcacgtggtgtacagctcactctcgcccgggatgcggcggcaccgagggatcttcggatggtattcctgcttccggccacagtcttcgcctgatgggtaccgagctcg

SEQ ID NO: 697580 - DNA, 110 bp, Homo sapiens
tacgactcgagctcggtaccatgctcatcccgtcctttcatattatatctggacttgagttttgtgtcaaccaacttagccttcaccttcagtggcattcccaggaagat

SEQ ID NO: 697581 - DNA, 1703 bp, Homo sapiens
tggcttcggcagctgggagttgttacgttgttgccagctgcactcaacaaagcagcacattcaacatcattggtgttgcattgtttgcagcacaatgtgcacagcacagcattatttcattcatgcaagttgtatcccgagttgccatcacctgattgacaaatgtgtgagtgcacagcagcaaagacttgggcacaaatctaccatggatctcttttgtggctgtgcatgcacaggtcagtgccccatggcatcactcttacacatgcctgccaaataatgaaaccacaagtgccattccatcttgggtgcagcagtgatcacacttgcattggcagtcattctggcaggcacatcctccaatgcacaggtcacatcaccattgtgcaaaccaagaacatgcatcgtcttgtcggtgctatttccacgcacagcaagtgcacagcaaagtgggccagcactctcacaatcaggacttccatcttcgcaccagcaaaaggcttcacttcaaaattgcaggtcacatcaattttgtgcccacaccttgcacctttacaatctccattcaccacgaaacccgcagcacacattgttctcccattgcaactataatcaatacaattgtcgtacacccatcccgttttatcacatcaagcaattcgtccaatcaacaccccaaagaacaatatcccaggcaatcctaattgcaaattgcacgtttgcacggatagccacaatccaattcatcagataatagagggacccaggactcccgttgcattctttaaagaccactcagaggcaacctgggcactcctggatggggattcacaagagtggcaattcaattgcttcccaggattctccgactgcaaattttacgacaatcagctaacaccgtccgacacgttttccaagctaccacaatggcgttcactccacacacttggatgatacagcgccccattcatgtcacaacacaggcatctacttttgacacttccatcgcaccattcacgagattacgagcaacagatgggtcatcacacagacgtatcgatccacaacaacagaacattggagtgaactatgacgcagattctttcgaccaacctgttaccgatggcaacggacattgggggcctctcacatcaacttagtcacaggaattaatcagtcgttagacacacatggagatcaaatgtcgcgacagacattcatgtccacacactcgagcggcgtacaacaatggggtacaccttagcaactaacaacacgacaatgaacacaccaccaccgacgtcggatgctacgtagattcctacacgtatacattaatccagctatttacaaagcacatcagattacacatctcaaataagtagcaacagcaccataagtaattagtacagcaacaacaagaactcacacatatacatctacgcaactactcacacaccagcagaccaccacaccagtcacacgagacatccacatacgagttaatccaaacacaagcacacactcaacaccacacctagcagcaatcatcctcgcttactcaaccagaccagactatagcactatacactcaccacatcactatctcatacacaataaaatacaaatatacactaagctacagacatcatatactacactcacactagactaactactactcatcacagcacgtcataata

SEQ ID NO: 697582 - DNA, 828 bp, Homo sapiens
aaagcattagtgtcatttaattacatgtctgaggaatttatgctaactagatttgggctttgcagcgaattttagtcggggcctcattcctgagcccaagtgaccctttcacctcagcttcccaagtagctgggattacaggtgcacaccaactgtgcttgcagtttgtttgtgtgtgtgtgtgtgtgtgtgtgtgtgtgtgtgtgtgtgtgtattgtgttttttattacaacgcccacaacatcatagctgtgcagtttattaacccaggaggctggtggagatctgtagaaactcattgtaggccaaattctttgtagattacatattatgatgaaactagggatctaccttaaaggttgggggaagctctttcaaaactatcagacaccatagaaatatatatagtgcaggatcagtttgtagtcttctgcagcgtggtgggaaacaaaagatacataggatttacaactcgatgtgtgttcttcttacaggtagaagtaaatgctcgtgtggcttgaatcgcttatctcccaagagagatacgtgcacgttcaaacccccagtagtgtacatgtgaccttatggggaaaatagggtctactagagatgcagtcaaagatagaaatgagatcagtagtggattacaggggggccccaataactaggtgtgcggttcaaacaaaacaaaagcggaaagtgcgcagcgagaaaagaatgccgcgcgaaggtggccggaaacactggaagacgccgagcccacggatacggggatggtgccacccacgaagcggaaagcacaggaacaacccgcgacacaaggaacgc

SEQ ID NO: 697583 - DNA, 430 bp, Homo sapiens
  misc_feature (15)..(15): n is a, c, g, or t
  misc_feature (246)..(246): n is a, c, g, or t
caacggttttaaaanactagggtccccccaacccccgggctaacagaccggtacccagaaccgggcccacacagcaggaggtgaagcagccaggcgagcaagggaagcttcatctgtatttacagcccacccccccattgatcccacagcagccctgaagtccgccctcctgtcagatccagtggcggctggagattgtcataggagctggaaccctatggtgaactgcgtcatgtgaggaggttngccgctgcttttgaaaacctaatgcctgatctgtcgttgttgcccatcacctccagataggactgtctagttgcaggaaaacaagctcagggctcccacggatcctacattactgtgagttgtatatttcactatatgttacaatgtaataataatagaaataaaatgtacataaaaaaaaaaa

SEQ ID NO: 697584 - DNA, 419 bp, Homo sapiens
ttcggaaggaggtaggacattgcgtgctttggtggctgcccgcattgcgtcacttcccctttggccccaggtcagactggcgcgatctgcccaacatcgaggtgcggctctcagacggcaccagggccaggaagctgcggtatacccaccatgacaggaagaagggccgcagcagctctggggccctcgggggggtctgctcttgcgtggaagccggcaaagcttgcgaccccgcagccaggcagttcaacaccctcatcgctgtgtgcctgccccagacggggaaccgacacaagcagggggctggcctctagggaaggctcgagtgggacggtttctacagcacaaccgtcaccaaccccgagcccatgggcaagcagggccgtgtgctccacccagagcagcaccgtgtggtgagc

SEQ ID NO: 697585 - DNA, 430 bp, Homo sapiens
gattcggtgagttcagggatcaaattctggtccttctacttatctgtgttgccctagaagagtcactttaactgtctggggtataatttctcatctacaaagagaggattaataattgtacacagttaatagggttgtgagaataaatgaagcaatgcattgaaagcacaaggcatagtgcctggaacccttgagcgatcagcaaatggtagctcttactattgttgttgtttgtggccattgtggcaaagcctagtgcttggaaacttgaaggagtctaccatatgtttgttgaaccaaaatcagttgaaatcccatccaaaatcccttccaaagacccatgcactgatgcaatagcgatgaagatttcccctagatgtctagactttagaggttccaatttttttttctttgagccagagtctcactc

SEQ ID NO: 697586 - DNA, 247 bp, Homo sapiens
gccatactcctaagttttttgttttttgttttcttgagacaggatcttactctgttgcccaggtttcccaggctggagtacagtggtacaatcacagctcactgcagcctctttcttgtgggctcaagccatactcccacctgtcagtcttctgagtagttgggtctataggtgcacatcaccacacccggctaatttttgtatgttttgcatagatggggtttcatcatgttacccaggctggtct

SEQ ID NO: 697587 - DNA, 292 bp, Homo sapiens
atctcagtactccagatttttatccttcaggttcggtacgtacgttaaacatgtgtcactgggcaggcagtgcctctaatactggtgatgctagaggtgatgtattaggtaaacaggcggggataagatttgccgagttccttatactttttttaacctttccttatgcagcatcctgtgttgggttgacagtgcagggtcaatcaatgactggcttgcttgcattggtagatatcgggctgtacatttgtccgcatccagtgctcccaatctgcacgcaggcttcatgcgg

SEQ ID NO: 697588 - DNA, 139 bp, Homo sapiens
ggaagacaagagagtagcctctccagtttcagcaaccgctagtttctattttttttcctggattttactgttttggtaatatatatattgaaacaagatatattaataccacatggcgagaaccccaaccaaagaaatc

SEQ ID NO: 697589 - DNA, 364 bp, Homo sapiens
tgtatgtgtgcatatgtgctcatcatttagctctcacttataagtgagttataccattttatactttttgaggtgtatcatataatagtacacactcatttttatatttaacatctttgtactgtgactgagtttttccacttattcattcaagatattaatcatctgagacccacctacactgtggctctacgcttatgcaggctctaagatcagagacctaaggagaatagggtatgctcttctgcgttaaagaggggatcaatggctcaggtatttcaaggtggcataacctagaagctggcaagtgcaatatcaaggcgcttgcagattcagagtgtgcgtaatatgcactctgtgtctg

SEQ ID NO: 697590 - DNA, 112 bp, Homo sapiens
ggccaaaaaaagggaaaaaaaacggggggccaagatagatcgggcgagtcatcgcccctccccccccaaggcacggggggccaaccctcctgggcccggatcaaatgaaagg

SEQ ID NO: 697591 - DNA, 202 bp, Homo sapiens
tgcactgcagcagcagcagcagcagcagcagcagcagcagcagcagcagcagcagcagcagcagcagcagcagcagcacacagcagcagcagcaacagcagcagcagcagcagacagcagcaaaacaaaacaagcagaaaaaacacacacaaaagaaacaaccaaacacgaaacacaaaaaaaccaaaaccgaaaacacccc

SEQ ID NO: 697592 - DNA, 237 bp, Homo sapiens
gtctgttgcggtgctagctcccgttttcctcttgccccatcaccagctttacctttcttactagtggtgggaagcagacatcttggaatgctaacctggtgcttattttctgggaaagaaagagatccacccctgaatatatccatttgtaagaatgggcagtatttcccagataggttttcagggaaaagaacaatctcacaactacataagtttgagaaaatttacttgatatat

SEQ ID NO: 697593 - DNA, 126 bp, Homo sapiens
ccctcaagatcattaacctatataacttgtcagttgcacttaagtcagctagtggacctcctgcggtcttggggtcgcatccatctagtgtcctataaggacgcgtagtacttgcagcagacctgt

SEQ ID NO: 697594 - DNA, 113 bp, Homo sapiens
  misc_feature (83)..(83): n is a, c, g, or t
tgtgctataaactttccagctgttacatagacgtcaacatctttcttctgagtttaaactttctttagcttattggtttctcngtggatataccagtccaagcctcttgggga

SEQ ID NO: 697595 - DNA, 757 bp, Homo sapiens
cggaagcagaaagagcgtctgcaaaaatgtccgaatcagaaatgcagcggggtgtggaccatggttcaaagtctctgtcctcttgaagaagaggtggtcgggggacattgacccaccagccccgctaggctactgcctgcaaacaagaacccctcatctgccacgcacgttcttaatgtatctatagtctgactgatgccacaaaggagtccaggttgtgacttaccaagaagtgactaccgatacggaggaaaatgactccccagatcgctgactgcagacgacacgtgtaccatgctgagtctgctcttcctggaccaaggtgcaccacggcaggggccacagggaagacatatcgcttctgcagccagcggaaccagacacacaggagcagcctccactacaaaaccacacagacctgcgcatctccatcgagaactccgaagaggccctcacagatccatgcccctttaccactgaaggcgcacccgtgctaacccgatacttacactagaaaccagagagacatctacacagttactggctctactggaaccagacatgactaggagaaaatgaccatcataatacataataggcaaagcggtggaactaacatagcatgacagtggacaaaagacatacataggcacaacacctgataaacagaacaaacaccgagcgcccagcctagagaacacgggcacaccagagagaaaaagcagatcagagaaaaccctggggacagaccacaaaa

SEQ ID NO: 697596 - DNA, 130 bp, Homo sapiens
ttaactgagctcaggagtcaagaccaacctaatgcaacatggcaaaaccctgttgtgcgtatagtgccagaaaatactaaaaattagccaggcaatggttgcattgcgcctgcacgtgagcacagcatat

SEQ ID NO: 697597 - DNA, 411 bp, Homo sapiens
gtaagggtccaggatggatttgtaaattacagaattttatttaatagaccagattgttattttaatgaaattctaaggaaaattgtaaaggccatatgcaacatgtttaaatattgagtattcttaacagtataaagcctagggaatgatatgaaggtgagaacttcagttaacgttaagaaaatgtgactgagcatttactttagaattaagtttgttaagctgcaaaatactactcttacacttctcttaaataaaaccttctgactattaaagccttgattaatatcctgtcaacaaaggcggaggaaagcagatatttccaaatagtactttaactaattcatgctttaatgatagcagtaaaaatgtttaaatgtagtcccacatattattttaccaaccctgcag

SEQ ID NO: 697598 - DNA, 646 bp, Homo sapiens
ggaatatagccgcataacggggcatgtagtaggattagtacaccatcgaggaccacaggcttcagaacgcgagaagagccaccgtcctggtgccagtctacacttccacaggcggagtcgacataatagatgactccagaatacaagacagtatttagtagatactagatttactgtatttcacggcaataccgaatgcttgggagcatactagagtgttttgagatgatggaattgggctctaaatgttacatgtttgaaatacttaaattggttggctatgcatcttgtgtaaagagtgcatgtgattgtgagtaaatgtctattacaatagttttagtttagactgtataaatactaatacaacgtgattgaacatgacatgggaaacgcaggaaagtaatttttggagtgatacaacgattaaagtgggtacgttcgtattaggtaaattcaggcaatagagttacgcaattagtcagtactgaaatgagagaaaaagaattatgctatatggaattcgtagtgtgttaaggatgtgaggaagcttggaacactaacgaaattaaatggtagtttagaacacttattagggaagagaagggtgagtagataaaaaatgccctggtctgtattaggaagagac

SEQ ID NO: 697599 - DNA, 757 bp, Homo sapiens
catccaaggtcctttgcgcaattccttacccggggtttcctcgtggggtcccagctttggggaactgggggaacccttttttcgggaaattccgcagctgcacttttccacacttgagtggcgccacggccgttggccccccctcgagaagggagatggccccactgttgcctggttggtggctgtggagagttttcacggcacagcccgcccacacaacgcgtctcttagaactttttgctggcacatggcaagaatgcgctatagggtggagaattatgccagattatcacatggcccacggcctggggccacagggccacagaaaggagggaaaggccccctggagtttcttcaacgtcacatggtgaggagtctcttgaaattcttccctttcttttggttcctggtttgtgtttatgttatgtatgtccatcttggtaaatagtgttaaaaaccaccaaaaactctgtatctgtgttttaagcacttgtgctgcatttgaactctattaatcacatttcacaattcacccgtacatttcctctcctctgtcaactagcctcttctgaaaggtggtcctggccaagccctggaggaaaagcaactggtggtttgcaagcacccctcaagttcctgggcctcagcccacaggccactgtgataatggtctggttagcaccttttgtatttattgtaagaatgattataatgaagatacaccccggtatacaaggaaattattaatgtttttcca

SEQ ID NO: 697600 - DNA, 174 bp, Homo sapiens
  misc_feature (89)..(89): n is a, c, g, or t
tttgccgttggggccctggcctgggcctggggaactgacgccggtcgtccggaagccaggaggaggcgtgaggccgctcgtggaccttncgcctaggccctctcccctcaaccttctcccggggcctggtcaccccaatccacggagagagagtaccgccgggaggtcggtcgc

SEQ ID NO: 697601 - DNA, 167 bp, Homo sapiens
aggaccaactaagcagctatccaagatataggcgatgtcagaactgagatcgaatggagatggaaaagctgcattctatgtctgcagaaccaatggtgtcacgatcagagtatcatggagtgagcccaaaggtcgaaagtgtgcagcttcttcgcttcgtcaaatct

SEQ ID NO: 697602 - DNA, 120 bp, Homo sapiens
cttaccacacacccggccggcttatggcgcgttccagggccgtcctgttgcgttttttttcttccccattgggggtttttccacccatgatcgatacttcgttggaactttttcggggta

SEQ ID NO: 697603 - DNA, 401 bp, Homo sapiens
ctgttctgcacaacattatcagaaatagattagatggagggaaagaaaaaggaaacaagcaaatataaaaacatcagacataagcaattatgtaacaataagcaccttaaatgtaatggtctaaataaaccaaaagacagattgatggagagcctataataaacacatggtccaactaaatactgttcataagaaacttcaaactcacttaaggacctaagtaggttgaaagtaaaagaatggagaaagttatcctgtgaaatcattaattttttaaggaagcaggagtgaatatattaatatctcatgaagtagacttcaagaaaaataatttaccagagctggagagggtcttcgctgaattttaagatctaaaatttcctatgctgccttgacatctt

SEQ ID NO: 697604 - DNA, 398 bp, Homo sapiens
  misc_feature (244)..(244): n is a, c, g, or t
aagggtttcctgggtggttgtgtttgtatagggttctgaaagtttatctttaaggctttagcttcattgtgcaccatggagcaaaataaattttaagtttaaccctaaccacctgaccagtacccattttattgttaaaggtttattacaaaaaaactggggagggggtgggaaattaagtaaatttttaaaatgtttacgccttcttataccagcctgcaaaatatgaaagtaaggcactcancttttcctgtagtagtctgtcttttgaattcacagccagttgtatccttgagttactttgttaatgtatttttctcagtacatttaaccactgggaaatgaacccttgtacgaatgtgtttcttcttctctgtaggaataaaaaataaatataa

SEQ ID NO: 697605 - DNA, 138 bp, Homo sapiens
acgagatgctcatggctaacacagagtctgagtgtcgctccgtgttaccatactccctgtgcctcatcttcctcaccactctctctcccttctctcttcaccaaaactctttttcaccccactccttcatacttgtct

SEQ ID NO: 697606 - DNA, 381 bp, Homo sapiens
  misc_feature (15)..(15): n is a, c, g, or t
  misc_feature (100)..(100): n is a, c, g, or t
  misc_feature (115)..(115): n is a, c, g, or t
  misc_feature (119)..(120): n is a, c, g, or t
  misc_feature (123)..(123): n is a, c, g, or t
  misc_feature (152)..(152): n is a, c, g, or t
  misc_feature (326)..(326): n is a, c, g, or t
  misc_feature (349)..(349): n is a, c, g, or t
  misc_feature (364)..(364): n is a, c, g, or t
cggtggtgaaccgangtgtttgacaagctgtccccgctgcacgagcgcaatcatacatgtgcactctctggttcagctgctgatgcccaagcccgtggcngacatggcgccctancaanntgnagctccatgggatagaactggaggaaccntccactttgttttggctgctgaaatgtggtgagaaatatcagctataaatatcgagaggacttgtctgcacatctcatggtagctggctgggaccaacggtgaaggaggtcaggtatatggaaccctgggaggaatgctgactcgacagccttttgccattggtggctccgggnagcacctttatctatggttatgnggatgcaccatatanccaagcatgtctcccga

SEQ ID NO: 697607 - DNA, 461 bp, Homo sapiens
  misc_feature (59)..(59): n is a, c, g, or t
ttgatggagcccaaccccaaaaggcaggggtccttcctttggtgggacaaaaaaggggncttttatgttcccctggggtacaaaaaaccccaaaaacaattcccgccttgggggttgccaaaaggggaaccccccccccgggggtttggtggagagggggggttccgcgctttttttggttttggcaataaattgggtggaaaaaaaaaagggggggggcccccccccccccccccccaggcgggggatttttaaaaggggattcccccttttggattttaactgggggagaaaacttttttccaaaatttccgcccccctgttcaaaagggttaaagggaaaaaggtgggggcccatttttccctttttttggggaggggccggccttggggtaaaaggggagaaacccccaaggggggggtgttggggggttggggaaaaaaaaaaaaatcttttgcca

SEQ ID NO: 697608 - DNA, 383 bp, Homo sapiens
ctacccgtgcacacacgatcctaccctctctttggatagtattctacattcctctattttcttactacacctttctactgctctcctactaccttactatctcctctccgccacttgactacctatttatattcctacctgcaccttctcctctcctcctcacctttttcttattttcccctccttcttctctcctcctccttttccatttctcctctcctgtcctcctcttcctcctctcttgtccctctcttttggctcttcctccttctcctctcctcctccgcctcgtttttctcttctcctactcatttttcctccacctccttttcttctcctcctcctctcctcttgctccttctcattcttccttttcttttccc

SEQ ID NO: 697609 - DNA, 261 bp, Homo sapiens
catatgtactaacctatgtgttctatcttcatcattaacatcctactttgtctattgcttggctgttttctgtaagtataatatatagttgatgtatgtgtgttcgtggtatatgtcagaaggcatagcatcttcacttttgctagctttgcagaatcttacaatgtgtactcgttatttctaatgatgtacataaaaaatccctagtcctgtttagcatttgacttttttatatgttttaaatgttgcagtgtgcttccg

SEQ ID NO: 697610 - DNA, 413 bp, Homo sapiens
ccaacatgtcctctgtagaccaccctgaggcctaggaagcacataggggggtcgatgagaactctggtgtgaagtgactgtatggacagcagacaccaacatgagatccgtgacataggacgggttcactaggagagtgatatgaagcgagtacagcctctgccagctgagagctggtcagtgggagaagatgcccttaggcacgatcctgggagtatagagaggagacagtcccagtaatcaggctagccaatagaccactcacattctgtatcaccatgtgaggcatgtagtgctgagcatttaagcggccagcccaaccactgacaatgacagctggcgactcagtctgacgtatgagctcgagctcgctggctaccaattacagtatgactgtcagcctcaggctgtgg

SEQ ID NO: 697611 - DNA, 528 bp, Homo sapiens
gcaataacctccatagctcttataaacagctcttatttgaagctttccatttctaaagtagacatgtatagaaggcagacagtaggtttgcctttttatattaaactatgtgagccaactttttatttttattttttattttagattcgggcgcacatgtgcaggtttgttacgtggatgtattacatatactgaggtttgggcttcaactgaacccgtcacccaaatagtgaacatagtacccaataggtagtttttcaactcttccctccatccctccattctgttttgagtccccagtgtttattgttcccatctttgtgtccatatgtaccctatgtttacctcctacttgtgagttagaacatgtagtatttggctgtttttgcattaattcacttaggataatggcctccagctgcatctgtgttgctgtaaaggacatgattttatttgttttaatgtctgtgtaataatccatggtatgcatatacaccacatattcttccagtccaccattgatgggct

SEQ ID NO: 697612 - DNA, 382 bp, Homo sapiens
cacgagggcgactgcaccggcctgctgccgctggcctcggtggccgccatgcagggccgcatcgcgatgtatcacgcgctcggcgagggcgtcagcccgatccggctgcgcacagtcgcggcgacggtgttcacccggcccgagatcgccgccgtcggcgtgccgcagaccatgatcgacgacggttcggtgtcggcgcgcaccatcatgctgccgctgcgcaccaatgcgcgggccaagatgtcggggctgcggcagggtttcgtgaaggtgttctgccgcaagtccaccggggtggtgatcggcggcgtggtggtggcgccgatcgcctccgagctgatcctgccgatcgcggtggcggtgcagaaccgcatcaccgtca

SEQ ID NO: 697613 - DNA, 766 bp, Homo sapiens
gagcgttgtgtgtgccgggcgggtcttgtcctgtcgttgtttcccgctcccttggttgtgaggctgttccccctagtggccccgccgctatgcgcggatctggtgggtgttgtcctgcctccgggcgtcgtctcccccgggatgttaggctgcccgcttcgcggccacgtccgtgcggtgggaggtgtgatattttttgaagccgactgcctcttattcgcgcctcgtgtggtggtgatttgtctgcgggttgttttctacggtgcagagactgggggcgtagtatgtctgtcttgctgccgagagacatgactgacctcgcctctctgccgccatagtttttgtgacctcctgcggtggatatattgttcgttagttcgctctctttgattgtgcgtcgcgccattcaatcaatgtctctctttgtgtgagatcgttgtgaggcgcgcgtccgtatgttgtaaatgtcgctcgcctcgcgcctgcctcctctcttccgatgatatacctatacagacaggggcctctggtgcgcgctctgcactcgttgtgtgtgctcgcccgccttgatttgtttcgaccacagagtggtccaagaaaaagaggagcatttgcaccacatcactctttgttaaacataattcctcctcccatttctataaaaagagggtctctcttttatattagtgccccccgattctctctctcctctgtcgattcgccaacctcgctgcgaaaagagacccacccaacaattaacaaaaca

SEQ ID NO: 697614 - DNA, 339 bp, Homo sapiens
cccggccagccggtccaggtagtcccgcagccggccgcgggagcggtgctgcagcgcgttgatgccgggctgtcccgccgacatccggcaataccagagggagaacagctgcatgacccagccgttgtaccagtcgacggtgccgtgcggaccgtccttgtaccagccgccgcggccgccggcctcgccgaggtaccagtcctccatcacggcgatgttgtcgtccacccgctgttggtcatggggcgcaccgaccgaccgcaggaacgcctgggtgacgttgcagaaccagcgccagttgttgtccggatagctcaccgtgccgctgggtgcgagcca

SEQ ID NO: 697615 - DNA, 123 bp, Homo sapiens
ccggggggggtttttttgggggccccccccccccccggttttttttttgggggcccccccttttttttttttgggggggccccctttttttttttgggcccaaaaaacccccctttttgggga

SEQ ID NO: 697616 - DNA, 238 bp, Homo sapiens
gtcctagaagtatccccgattacggctccttagacgggcagggactgtcagtcagcagcttggcgcttctggatgctgatattatggagtgctccagagagcagtacggctactttagctaattattcaacggttggtgccatactccagagggaaacattagattaaaattagtttagactgcttccactgacggctgaaaggggaaagcgggcggtctaagggccattggctgggg

SEQ ID NO: 697617 - DNA, 304 bp, Homo sapiens
tttttttttggggggtttgggttttttttttgggggcccccaaaattttcctcccgggggcccctttttacccctgggggatggggggtgccctttttttgggaaaattcccccaaaggggggggagaccaagggggtttttttcccggtttttgcccccgtttgggggggggagccccccctttttttttttttttttgccccggccttttttcttagggggggtttcctttttggtgtgggttttttttcctaaagaacatagaaaaagaaataaaatgtatagaaccacaaaagagaaaca

SEQ ID NO: 697618 - DNA, 261 bp, Homo sapiens
attgactctagagcgatccccctgtatcccgagagaaagatatgaaaagtcgacttccatcgattgtatgcattacgggtcaggccctggtgactgtgggaggtgacactgatgcctgctcctcagcccctcctcccatccccaacgcgcacaacacatgcatttcacatggtaaaaggcttaaaaacagcttgtatagaatattcttttttaaatagatcatggttgaaattgtctgaaatcaggactgagtcatataca

SEQ ID NO: 697619 - DNA, 82 bp, Homo sapiens
  misc_feature (31)..(31): n is a, c, g, or t
  misc_feature (34)..(34): n is a, c, g, or t
cttatagtacatattttcccctctgtaatgncgnaattttgattctaatattttttctattatttataagtgcaaatttttt

SEQ ID NO: 697620 - DNA, 409 bp, Homo sapiens
taggattcatggcatgcacatgagccctgctaatttagtatttttagtagagacggggtttctccacattggtcaggctggtcttgaactcccaacctcaggtgatccaagcacctccacctcccaaagtgctgtgattacaggtgtgagccaatgcgcccggcctcaacctgataagtttttacaaagtgaaccacgtggaaacagcatccagagcagacattggacatcccggcaccccagagctccctatggatgcctcactgacatccatccccaccccaaaggtcctccggcattctggaatgatcttgccttgtcttcaagttgcggtaaatagattcttacagtgtacattagaatacacgtccacgtgtgtcagccacttcttcagcatcttggctacagg

SEQ ID NO: 697621 - DNA, 121 bp, Homo sapiens
ctagaggatcccaggatgcagcaagtcagttctgttggttgggagcagaatggacatgagtagtaacaatggatgcatgagagatccaaccctttatcgctggaagattcaaccacatcca

SEQ ID NO: 697622 - DNA, 190 bp, Homo sapiens
ccctgtgttcccgaccaaaagccccccggtccccctcttggcccccgttttttttacgcccccgccccgggggtgttcctggggccctgggcctttttgtccttgtttttttgtaaggggggggcccggctcagtgccctgtgttgttttgtatggtcccgtgtgtaaaaataaccccgttggaatccta

SEQ ID NO: 697623 - DNA, 120 bp, Homo sapiens
cgatacatacaggatcccaatgcagcggactcggcatgtgtcttgatattatcatccgctgaaggtgaagctgaaggtggaagggagagctgagcagacactcgaggcacgagtgtcttg

SEQ ID NO: 697624 - DNA, 812 bp, Homo sapiens
  misc_feature (160)..(160): n is a, c, g, or t
  misc_feature (679)..(679): n is a, c, g, or t
gggctcaagcatttggggacgctctcaagctctcgagcgcacggcccatgcttccttcaacaatgtctacgtgttcacgacaatcctggtgcaagctcgagcttggcaggtgtgatcacgtctacaccctccaagtgcatatgggtcctgtcaaagcctnatactacactttgaatgcttgagcggcgatgctgttgacacattgaaacatgccagtcaagtaccaacaggtgtggcatgacggtcacgcatgtgtccaaccacttttggagccaatcctgcagcgaagtgccacatgatgaccaggcatattggccgttccgccatacgcagcagaacaggaccgaaacacacggacactttgcagtccagccactggacagtccagcccgttactcgtgggccaaccctgtgagcaccggctgcacttcatgagagccataatttcgacagcacagccgtggctacaggatcattgcacgcctctcgtggacgcctacaacacgctttcccattgacagtgtggcctgcggaacacctgagctgagggcactcgtcgtcgattggcaggatccattctggcatcacagtaagccaagaccaaggcagcctgccagtgacaacttaaaccacgacgtcgtaccaagtgcacaatggtagcaaggcactgtgcatctgngcagcacagtgaccatgcatcgtcgagaacacaattctgggtggcacttccggcaaagctggatgcgttggccctgggcaaaggggctagaaggagcagcaggatggctctggcaattgacttcatgaccttg

SEQ ID NO: 697625 - DNA, 389 bp, Homo sapiens
gtacaaaccagctatatagtgctgcatataaccttctgcttgccgcatcccattgaatcacaggagctgtgacatctgctatactgctgtgttgtcagtaccaagtaattactacaacgagaatatcttggcactgatggttaaatgaagctaaaagtcagagtgcatacatatcatcatacaaggttaagtaatcccagttcaacaacctaaaaatatcaaactggatcacacttaattatcttccatatcctctacttcatcctcgtgtatcttcaaggctctcaccatttcttagactgcatggtacaaaatatttttaacctgtagtttatcatcataattgctttcttccttcaaaagtctcagttcctgtgttaactgcaatg

SEQ ID NO: 697626 - DNA, 343 bp, Homo sapiens
ttaagggatcttcaggatttggagtataagacacacctcggccttccaaagtgctaggattataggggtgagccactgtgcccagtgctgctccttttttcttgcaacatgcggattaccatacctttcctcttttcacctttagcccactttttccctttaaatactgaagccctcagcatcatctctggagaaaaggcacagaccagactgtttctgggattccctatttagttcttccaggcatgtccttaaccttggcaaaattaacttctaaattgttttagacctgtgtcagataatttttggtgtacagtatgtggtcactttcccccaagattta

SEQ ID NO: 697627 - DNA, 581 bp, Homo sapiens
atccttcgtcttatgggggaaatttgcatgtgtatttttttttttagggagatagaatctggccccggtcgccgaggctggagtgcaagggtgctatctgggctcagtgcaacctaggcctccggggttcaagcaattctcccgcctcagcctccggagtagcggggataacaggcaccggctgggattaccacgcccagctgattttggtattttaagtagagatggggttcaccatgtgggccagggtggtcctgaactcgggacctcaggtgatccacctgcctgggcctcccaaagtgcggggattacaggcgtatgccacggtgcccagcctgagttccggtttagaaacaacagtctatgatagtataatcctctctttttggtacacagagtaacgaggacaaataggtgaaagaataattgaagggctggaatcccatttccccggctgtcccagggcatgggatatggagggataggaggcagcaaaccactcacagagccaggaagaattgattgcgtgggtatggccaggaggggaggcgggcccggctgaaatacactatgaccatagc

SEQ ID NO: 697628 - DNA, 231 bp, Homo sapiens
ccagaaagggtatagaagcagtacatgttgacacatcagatgcgagatctgccatcccaggtctttgagcccagttccaagcttggccccaatcagaactcagccgtgattcccgccaagtcgttgtcatctctcatcaagacagaggtcaacggcttcgtgcctgtttctcctcaggtcagtgaggacacccccaccagtcacgtcccggctggggctctgtcttcctct

SEQ ID NO: 697629 - DNA, 433 bp, Homo sapiens
acctgtgcctcccacttgtgacccctccctgctgactacatgccactacatacactgacacatcacagagacctgacgggacaatgattctatggtgaccaccattggagaactcacaggatttgtccatgcaagatctgacaactgccctgtctggctgcgagatgacttcctgaaccaagtcatgagacggaacaggctctgacgcatgagcgtggacggccgacatcaaacgtgccatgacgcaagtggtgactaggatgagcttgacccttggccatggaacctgacctggagattgcagatcgaaatgtgcctagaattgaaagagcttggaactaacctgaaagaagaaaacagtgatggatggaaaatcagataacgctgaagggtgccaaagtgaggaaggacaggatcaatgtgtgggaaggtg

SEQ ID NO: 697630 - DNA, 382 bp, Homo sapiens
tggacttacagctccacatagctggggaggcctcacaacatggcagaagtcaaaggaggagcaaagccatatcttacatggcagcaggcaagagagcctgtgcaggggaactgcccttttataaatccatcagatttcatgagacttattcactatcacgagaacagcacaggaaaaacctgcccccatgatccaattacctcccacccagtccctcccacaactcatggggagacacagccaaaccgtatcaagtgcagactcgaagcaacagaacactggattagtgcatttgaagacaagtcaacataaaaatatcttaataaaagtgctgaaaggaaaagaaattacacaaagagcaattctgtgtcagaatggggcc

SEQ ID NO: 697631 - DNA, 750 bp, Homo sapiens
  misc_feature (21)..(21): n is a, c, g, or t
  misc_feature (44)..(44): n is a, c, g, or t
  misc_feature (46)..(46): n is a, c, g, or t
  misc_feature (54)..(54): n is a, c, g, or t
  misc_feature (64)..(64): n is a, c, g, or t
  misc_feature (69)..(69): n is a, c, g, or t
  misc_feature (75)..(77): n is a, c, g, or t
  misc_feature (80)..(83): n is a, c, g, or t
  misc_feature (89)..(89): n is a, c, g, or t
  misc_feature (91)..(91): n is a, c, g, or t
  misc_feature (93)..(94): n is a, c, g, or t
  misc_feature (98)..(98): n is a, c, g, or t
  misc_feature (101)..(101): n is a, c, g, or t
  misc_feature (274)..(274): n is a, c, g, or t
  misc_feature (279)..(279): n is a, c, g, or t
  misc_feature (296)..(296): n is a, c, g, or t
  misc_feature (319)..(319): n is a, c, g, or t
  misc_feature (324)..(324): n is a, c, g, or t
  misc_feature (330)..(330): n is a, c, g, or t
  misc_feature (358)..(358): n is a, c, g, or t
  misc_feature (360)..(360): n is a, c, g, or t
  misc_feature (362)..(363): n is a, c, g, or t
  misc_feature (413)..(414): n is a, c, g, or t
  misc_feature (416)..(416): n is a, c, g, or t
  misc_feature (445)..(445): n is a, c, g, or t
  misc_feature (450)..(451): n is a, c, g, or t
  misc_feature (453)..(453): n is a, c, g, or t
  misc_feature (455)..(455): n is a, c, g, or t
  misc_feature (525)..(525): n is a, c, g, or t
  misc_feature (529)..(529): n is a, c, g, or t
  misc_feature (536)..(536): n is a, c, g, or t
  misc_feature (552)..(552): n is a, c, g, or t
  misc_feature (556)..(556): n is a, c, g, or t
  misc_feature (562)..(562): n is a, c, g, or t
  misc_feature (588)..(588): n is a, c, g, or t
  misc_feature (594)..(594): n is a, c, g, or t
  misc_feature (638)..(638): n is a, c, g, or t
  misc_feature (652)..(652): n is a, c, g, or t
  misc_feature (657)..(657): n is a, c, g, or t
  misc_feature (659)..(659): n is a, c, g, or t
  misc_feature (679)..(679): n is a, c, g, or t
  misc_feature (714)..(714): n is a, c, g, or t
tctcaggctgtcacccatggntcctgcagacccttccctcctcnanaacccttnaaggcgaacntgaanaaaacnnnaannnnaaaatnanannaaanaantaagaactaaattttatgccttcatctgatttctttccaaaaagtccatttcattaagtattcagacttcttagctccatcccattcatactttttgctctcctactacccacccaagattgttaataataacaataataataacaacaataatactgcgataatattaatanttcanatttgtacgaagcttanagaatgttttcacatatagcatntcatntgagcntcccaacagttccgtgaggtaggtattntnanntccctttttacagacagggtaaccgaggctcagagaggtaacgggatttnntnaaggccacacagctagttagtggtaaagntaggnntngntcccagcaccccatatccaagttcagtgtttcaacaccacagctacctctgttaagtggagcgacatttnttancccagtnaggcctaaatggtggnctgnggagcnaagaggctgacttctcagatgggganggaacntcaacgcttctttgaagcccttatgaaccaagaaaccttcgttnaggacctcaaaatnaaacncngccacatgcagctcgcaggnctggctgattcggttgtagccgtctgccgtaagcnctcgtcgaaggtgggcaccttgcctcctgccacgta

SEQ ID NO: 697632 - DNA, 83 bp, Homo sapiens
tgggcttttttcggtgttagattcaaccctgcgctaaaacggggatgttcccttgaataaaaaagcagtgtggttttttggga

SEQ ID NO: 697633 - DNA, 861 bp, Homo sapiens
  misc_feature (21)..(21): n is a, c, g, or t
  misc_feature (44)..(44): n is a, c, g, or t
  misc_feature (46)..(46): n is a, c, g, or t
  misc_feature (54)..(54): n is a, c, g, or t
  misc_feature (64)..(64): n is a, c, g, or t
  misc_feature (69)..(69): n is a, c, g, or t
  misc_feature (75)..(77): n is a, c, g, or t
  misc_feature (80)..(83): n is a, c, g, or t
  misc_feature (89)..(89): n is a, c, g, or t
  misc_feature (91)..(91): n is a, c, g, or t
  misc_feature (93)..(94): n is a, c, g, or t
  misc_feature (98)..(98): n is a, c, g, or t
  misc_feature (101)..(101): n is a, c, g, or t
  misc_feature (274)..(274): n is a, c, g, or t
  misc_feature (279)..(279): n is a, c, g, or t
  misc_feature (296)..(296): n is a, c, g, or t
  misc_feature (319)..(319): n is a, c, g, or t
  misc_feature (324)..(324): n is a, c, g, or t
  misc_feature (330)..(330): n is a, c, g, or t
  misc_feature (358)..(358): n is a, c, g, or t
  misc_feature (360)..(360): n is a, c, g, or t
  misc_feature (362)..(363): n is a, c, g, or t
  misc_feature (413)..(414): n is a, c, g, or t
  misc_feature (416)..(416): n is a, c, g, or t
  misc_feature (445)..(445): n is a, c, g, or t
  misc_feature (450)..(451): n is a, c, g, or t
  misc_feature (453)..(453): n is a, c, g, or t
  misc_feature (455)..(455): n is a, c, g, or t
  misc_feature (525)..(525): n is a, c, g, or t
  misc_feature (529)..(529): n is a, c, g, or t
  misc_feature (536)..(536): n is a, c, g, or t
  misc_feature (552)..(552): n is a, c, g, or t
  misc_feature (556)..(556): n is a, c, g, or t
  misc_feature (562)..(562): n is a, c, g, or t
  misc_feature (583)..(587): n is a, c, g, or t
  misc_feature (590)..(590): n is a, c, g, or t
  misc_feature (592)..(592): n is a, c, g, or t
  misc_feature (598)..(598): n is a, c, g, or t
  misc_feature (624)..(624): n is a, c, g, or t
  misc_feature (699)..(699): n is a, c, g, or t
  misc_feature (705)..(705): n is a, c, g, or t
  misc_feature (749)..(749): n is a, c, g, or t
  misc_feature (763)..(763): n is a, c, g, or t
  misc_feature (768)..(768): n is a, c, g, or t
  misc_feature (770)..(770): n is a, c, g, or t
  misc_feature (790)..(790): n is a, c, g, or t
  misc_feature (825)..(825): n is a, c, g, or t
tctcaggctgtcacccatggntcctgcagacccttccctcctcnanaacccttnaaggcgaacntgaanaaaacnnnaannnnaaaatnanannaaanaantaagaactaaattttatgccttcatctgatttctttccaaaaagtccatttcattaagtattcagacttcttagctccatcccattcatactttttgctctcctactacccacccaagattgttaataataacaataataataacaacaataatactgcgataatattaatanttcanatttgtacgaagcttanagaatgttttcacatatagcatntcatntgagcntcccaacagttccgtgaggtaggtattntnanntccctttttacagacagggtaaccgaggctcagagaggtaacgggatttnntnaaggccacacagctagttagtggtaaagntaggnntngntcccagcaccccatatccaagttcagtgtttcaacaccacagctacctctgttaagtggagcgacatttnttancccagtnaggcctaaatggtggnctgnggagcnaagaggctgacttctcagatnnnnngtngnaagggntcagcagcgtcggggagagttggggnacttggccttcaactcctgtttgaactggcgatataggatcttattgtgctgattttcagcctccttttgggganggaacntcaacgcttctttgaagcccttatgaaccaagaaaccttcgttnaggacctcaaaatnaaacncngccacatgcagctcgcaggnctggctgattcggttgtagccgtctgccgtaagcnctcgtcgaaggtgggcaccttgcctcctgccacgta

SEQ ID NO: 697634 - DNA, 108 bp, Homo sapiens
aaccttacgtgaactgcggaaagcaatacccaaataaccgcgttcacttggctgtagtggtctattgtatgggagggtttgatgagggttgctgacagggtggtgtac

SEQ ID NO: 697635 - DNA, 851 bp, Homo sapiens
gcatcgcacccatggattcagttttcacagcgtacgctctttttcgtgtgacggaaagaggagatgggagagaacatcatggaccctactttatggttgccatggatgcaagcctcatttccattcctttctactttgaacatagcaagtcctggaggctgctgggtcgtcctccagccacaaggtggctcccccaatcccttctctcaagccaatcgatgcacgcctttgctgaattctccacacggactacaattcacagctaccatgatcgataaacgccattattttcattgggaagcaaaaggcttatgaccaataccctggggcactaaaattcaacgccaattttctcctttaaacatgcccacaaagcaacacagctttgtccttagcgaatcagtctatttcaaccatacttgtcataaagacaactgagtcttatcactaagagcaataaacgattagtcctctcaccgcctcatccagaccccaccctgcgtgtcgcaaccgaacaagcgcgtgcgcggacacacccctacccgcgtcatagacactttcctccatttaatccaactatatctttgagctaccctctccgcctactactggcgacctcttacactgtgcgttaataacacatggtcaaattgcggcccaaccccctcgtgtccctttactctttctgcttgtttctgagaactttactgccacgtaaatgaaagcgagcattcgaccggctcgggtcgtcgccatcgccctgcccgacgctgcatacgcgccaatcggcgcggacgccctcccgccgtgcccctgtcctcttgtcgggatatgctccacttacacgtccc

SEQ ID NO: 697636 - DNA, 394 bp, Homo sapiens
  misc_feature (29)..(29): n is a, c, g, or t
  misc_feature (78)..(78): n is a, c, g, or t
  misc_feature (261)..(261): n is a, c, g, or t
  misc_feature (269)..(269): n is a, c, g, or t
  misc_feature (283)..(283): n is a, c, g, or t
  misc_feature (285)..(285): n is a, c, g, or t
  misc_feature (288)..(288): n is a, c, g, or t
  misc_feature (290)..(290): n is a, c, g, or t
  misc_feature (335)..(335): n is a, c, g, or t
atacaggcacagaggaaaggccatatgangacacgggagaaggtagcagtcgtcaagccaaagagagaggtctcaggngaaaccatgcttgctggtactggcaccttgatcttgaacttctagcctctggaactgtgacaaaataaatttctgttgtttaagctagtcagtctatggtatttaagttatggcagtcctagaaacctaatacagtggagggtttcttttccatgcagatgaaagcagtccttgtgatacaanaaacaaantattacagaccaantncanantactaattttgggcatttgaacacatgttcctaatttcaggtganttttttctttgaggtgggtttaagtttagagaggtttgcttttcacttgagcttttcat

SEQ ID NO: 697637 - DNA, 179 bp, Homo sapiens
agatggaacagtcatcccgtatggatggcaatgccaattggaaccacgactgcttgaggctctggactgctattctaccaccaatctcgtccaactgacaagcccttgcgccatgcctctccaggatgtctacaaaaattggtggtattgggtactgtttcctgtttggccggacgtgg

SEQ ID NO: 697638 - DNA, 156 bp, Homo sapiens
gatcgtgattatgggtgagcatactagctcaagttctcttctcttcttaaaaagcactagagccattcccttgataacccataaatctatgagtggattaactccatttatgagggcagagacctcatgcaccaatcaccttttacaaggccctcc

SEQ ID NO: 697639 - DNA, 408 bp, Homo sapiens
  misc_feature (50)..(50): n is a, c, g, or t
  misc_feature (55)..(55): n is a, c, g, or t
  misc_feature (119)..(119): n is a, c, g, or t
  misc_feature (134)..(134): n is a, c, g, or t
  misc_feature (140)..(140): n is a, c, g, or t
  misc_feature (151)..(151): n is a, c, g, or t
  misc_feature (153)..(153): n is a, c, g, or t
  misc_feature (157)..(157): n is a, c, g, or t
  misc_feature (174)..(174): n is a, c, g, or t
  misc_feature (344)..(344): n is a, c, g, or t
ccccctggggtcgcttgccgttcgtgatatgagccagacattgcggtggntgtcntcaagcagtggacagaaggctgctggagctggcaggtcaccagtctgcccgaagctcagagggntaatgatattatccntatacntgccaccccantnttanccagtggtggagaacgntctcagaactggtttcaattggccatttaagtttagtagtaaaagactggttaatgataacaatgccatcgtaaaaccttcagaaggaaaggagaatggtggaccactttggttttcttttttgcgtgtggcagttttaagttattagtttttaaaatcagtactttttnatggaaacaacttgaccaaaaatttgtcacagaattttgagacccattaaaaaagttaaatgat

SEQ ID NO: 697640 - DNA, 668 bp, Homo sapiens
gcacgcgtgccggcattaactgcaggccgagcctgtcagtgctgaaggtgggaagtgcgacgtaagggataatctgtccagacccgggagcagaagattcgtgcattagcctatgcgactgctgcttgttgccggataacccccggagtgatatgtcgatcctgtccactctactgtctcgacacgaagggatggcgacaagacctgtcacacttgatggagccttgagtggataatcgaagaggaagggagtgacattactacgtttacaagcgtctagatagttctagttcggacctaagtgaatagggctacgtgaagaatttcgagctttcagatagtgacaagagttgatcacacgagcaatcatcatagtagtatctcataacgatattcaactagcgtggtgccaaagcggatgcaagaggattgttttccaattgtgaaacttaccatcgtccacggcttttcgtcctatttgcagcggctcaagcaagaggttgggcttgaatcaacttcaatgacttccaaaaatggaaccatggggaactgggaaaagaaaagtaaggaattggtgaattggaagtttattcagggaagcagagacgggggggggtcattccaacaagttttagattattcttttttaatttttggttcttttccct

SEQ ID NO: 697641 - DNA, 1133 bp, Homo sapiens
ggcccacaagcaacacgtccaccagaaggaaccttgtcagttgatttccctgagccgatccccagcagagactggagataccagaggcccctgcagccccctgtgtctgaggagacctcaacaaggcccgctggcccatggacctaccgctgtcctcctgtgcagacgtgcaatttgcgagaggccttggatggctgtattcccgtgacaccaacgttttgtgcatcgtgactggtaccggcgcctgtacatgcagcatttagtggcaagatgttcatcgaagaagtctcacgtgctgtaccatccgtgcgcacacttcacaggggagcggctccttaccctcgtgccctgactgctctcaagccgctttcaactcatcctgagcaaacctggtcccgcgaccatcgtctctatcacatcgacaggtagagcggccctaccggtgtggggactgtgtgctaaggcttaccacagcaaagctccacactgaggccagcaccgtttgtgtgcatgcaccagcaagttgccctagctggtgtccaggaatgtggggctgcgttggcagcggtcacgttaacgcgctgcttctatgcaccggttaccaattcactacatggtgagatctccctaataagtgttcgcagagttgccacgcgcttcccttcttgcttggcgtcagggctgcgtgtgacggtgcaccaggggtcgtggatcccgtgcccgggcgcccagcacgcgacctgctagcccattccttgttgggctgctgcctatccccctcctcaatggtgcatcgagtacgctccaggattgtagaggccggctgcgtggcccattggccacaacgatcgccctcttgcacgttgctggggccccttggtgggcccacgaaagaagggcggcttaacgaatgactcgaaacatggaccagggcaccaccgaaagggcgggcccctatgtcatggatatgatggcgaccctagcatgaacggttcccctgcagataacgggtagggccacctgtggccgcatttggaagagccccaccggggtcccacttcggtgtacaaccggttgtgcccttccagcaagcccctttgtgaaaggcccttgataacaagaatcccgctctg

SEQ ID NO: 697642 - DNA, 233 bp, Homo sapiens
tgaatagagcaagataaaggtcagcgggttttttacatctgactggatgggagagatggactcactaatccattcattgatttgatatttacctatctctcctcaccatgaagtgtcatgatcataccattttggcctctagccaatctcacaaattttcaacgaaaagcacagatgcaataaatccatgatcaaacatgatttgcatcattgcaaacaagtgtattgggcga

SEQ ID NO: 697643 - DNA, 317 bp, Homo sapiens
gctgcctagaggacccataggttacacaaactatattttgtacccactaacaaaaccgcttcaatcccccctccagccactaccacactaccattcccagcctctggtaaccatcattctactctctatctctgtaagctcaatttttttttaaaaaatttagtttccacaaataagtaagaacatgtgaagtttgtctttctgcaccacacttattccacttaacataatgacctcctgttccatccatgttgttgcaaatgacaggatctcatacttttatatggctggatagtattccattgtgtaaactgatt

SEQ ID NO: 697644 - DNA, 545 bp, Homo sapiens
cctatgtaggaagatatgtgaataaatccaccgtcgccgatcattctcctccttcacccttcgtaaaacgattgatctcctccattgtcagccccatcacagaaccacccaacttccctgggcctttctcccgggctgagcccacgaggttgttcatttccgcatcactggccgacattggacagcaacgctaaggtttcaggaaagggtttcgcctggaagactcaaaggtgggataaaattggacgagttgatgcccgctgggcaggatcttggcacaaaaaatcctacaacagtgaacatatctgaaatcatactggctttaatctttaagtccagaggcgcatcacaggccaaagaaggagagagattcacttccaacaaaccatggcttcagagtagaatctatgagcacgtcaaagccatagagttcaaaacaactgctgcgatgaggcacaaaggttttacaggccgtagcaatagctagttcagcagagattctagtcttaatgatcaggtcttctacatgggccatcgggacgagg

SEQ ID NO: 697645 - DNA, 714 bp, Homo sapiens
  misc_feature (362)..(362): n is a, c, g, or t
  misc_feature (424)..(424): n is a, c, g, or t
taacaaacccggtctggggtgggtgtgggtataatactaagttgaaatgatttcatttacgggggaaggcgctttgtgaagtaggccttatttctcttgtcctttcgttacagggaggaatttgtgaagttagaattagaaaccgcaccgtggatttacctccggctctgaacctcagaactcacgttaggacttttaactcgtgtgacacaaacgacacctttaaatagcggcgtgccaccattgtgggattgtctccgtgactccaacatctcggaggctcgtataacacccttattgtggtgtgattattggcacctctatagaaatatagagattgtgcgcgcagtgtgtatatctcncctatgaggagataactgtgtgtgtcccccgtgtggctcacaagttatattgtggaatctcnaagtgtgcaggatatctagactagttctcgccttgtgacacgtgggtgtgaaagtctctttgagcctgtgtgtcacgtggcctcgcgagagagtgtgtgcgagttctcgtggcccccgagagggtctcggccccacaacgcgcgaaattcttgttacatgtgcgcacggggttgtgagatagaattatgagaacccgtggtggcgcattgtgtgtcagcgctaccgtggtgtgtggcatattaaactacaattttaagaggcccccaataggggagctcttctcggtcct

SEQ ID NO: 697646 - DNA, 899 bp, Homo sapiens
ctcttaccacccttgacgagtaggcgtgtgcgtgactcaaatgtggaacttactcgttgatttcctagattctacgcctcttgactgtgcataacttaccttaccccacgtgttcagcctaacatttcagtcacttagaacgccatgtccgggcaggagtcttttgtgttttcctccgcaagcggttacacaactcttagtctgaaattacgggtactgaatccacaaaatgtcctctaggtcaccagcaagtgtatgtatcaatagtgaattcttctgtataagtgtgactgaaatctatgtggctctcgaacaagtacaccctctatcctcagtcaccgctcagtatacaccatcgagtagccattttgcgggaataagacaatagcaatattacgaaatgttcattttcagacctccgtcatggtcacgatcatatcataatgtaatcaggtcggtaccgtttacattgcctcattagtaatccatcattagtccaaatgctcactattaggcataaatgtacaacgagttattcagaatacccagaaagagtatttcgtcattgtaaacattcaggacaagctgactgaaataagtgcatcaccttgaatttgaactttcaaggcacatcacctgaagtcaactcagatatgtcagaacactcttctataataatctcaagttagtaaaattcctgcctctcccgtaacacaggagttggagggagttccaatatctgaatctttctgaattcactgtaactgcgaatataaatcttgatgacagtgtgtattctaaaatttcatgccgttaatacatacgcatgccactataaccacattagttactgctttatgcaatccttaatcatacgtcaaaatctgtaaaattactcc

SEQ ID NO: 697647 - DNA, 617 bp, Homo sapiens
  misc_feature (565)..(565): n is a, c, g, or t
ccgcgatccggaagtttttttcttttgaacaaaaccctcctctttggcccgggttggaaatgattggcagttatttggccagggtaaactttccccagagggttcaagcggttcccttcaatggtatgttcaagagtgggggtcggtgtccaaagcaaggggttctcggtctgggtaaaatccgactatcagtaggagaggagttttccccatggtgttcagacgggtaaaatgcccctaacgttgttatcaccggactcaaccgcctcagtgagttcgagggtgttttgtgaacaatacgtgcttactggtaaaagcaggattgtaaagcagtctgtatggccacatagcaaagttcctcaacactgcagtgtccactctcatttaataagctgtcttccagcacatcttcacgtggtcctctggaaaatgacatgtcctctacatggttttgacacaagtctatctgcctgcctgcccactcgctgatctataatctcagtgcatgtagcagtctcatttctcaatgtatgggatatagatggcgctcatgcatatggtaatnagggcagatgcagctacgtgtatttcctcctcgcctgccatctctacaatcg

SEQ ID NO: 697648 - DNA, 239 bp, Homo sapiens
caatagcgcgtggaaaattcactagctcttcccaatcttccaaatctgccagtggcagtcagctatcagacaccagagcctcttgtccaggcatgcggcagtcacgtgccagctgctctgcacgcttgttgtgacctgccaagaatgagggtggtcacttgtgtcatgtagagacaggtctaggaactggccccccagctcgtcttctaggcgccgctgaagccgttaggccgatctga

SEQ ID NO: 697649 - DNA, 367 bp, Homo sapiens
  misc_feature (203)..(203): n is a, c, g, or t
  misc_feature (206)..(206): n is a, c, g, or t
cccgggtttttttccccccccccccccccgcccggggggggggtggtatattaggacccccctttccccccccccccccccccgggggggtaaaccccacccccccccccccccccccccgggggggttttttttttttccccccgggggccccgggccttccaaaaggcccggggggcccggggggggttttaaattccctnccnggtttcaaaccccccccccggggccataccccggggtttttcctttccccggggccgtttttccctttttttttttttgttttttttttttttttttccgtttgaaaaaggggaattaaaatcccccccaaaaagattcccccttttaaattaaaggggga

SEQ ID NO: 697650 - DNA, 647 bp, Homo sapiens
  misc_feature (185)..(185): n is a, c, g, or t
  misc_feature (200)..(200): n is a, c, g, or t
acgccgagcgcgttcaaagttgagaacggggaagaagtgtcaagtacgaggcaccttaccaaagctactaatgcaggcacttggcatttcaggagtttgtcttatggtagcataagaattatccctttcacccagacctggaccctttatgttacaaagttaagaacgggaagaatgggtggcanggtggctcctggaanagctcacccagcacaggtgccctgagctcggagccttggtttctgtccctggggagatatatattaaataaattatgatataattacactgagcagtagaaaatataacatctgaggggtgggggaagaaacgtgaggtactcagcaggaagccgagagctgaagagtgtccattcaggccagtttgacttcctccttgacccgttggtattcgggtttctcgtccttggtttgctcgtcttcggtcagttctatcttctcctctgggcctgtcccttatccatcctctgttctgactctcttggctttgctgaagtcggcagagttctggcggtcccgctctccttcctcttcagattcggagaagtcttcctctcgtgcatgccgtgggcagaggagcagatcgggatgcgcttgccagggtcgacttcgtcccgttcgccactc

SEQ ID NO: 697651 - DNA, 186 bp, Homo sapiens
actatcacattactagtaggaaaaaatggcctgctataagtacaataaagctactactaggaacctagccacacccatatacattatatacatatgactatagtaatatttactaccctcataacgggacagagctagagtaattagcaaacagactagtctagcctatgcaaaatatataaaata

SEQ ID NO: 697652 - DNA, 953 bp, Homo sapiens
tcaggctgcccgcatatcctttgacgaggtgggtggtgcttcctcactctagctaatgatcgtcgtgtgctaccttctggtgcctcactgccagagtgggggcgcgttacggatgatggcttgatgccttacttactcacatgccccctctcacgggagagctgaccctgtctgctctgtttgtttaggaacggtaccgtgcgtgcatacgacaccccgcccttcacatctgatgttacgtctctccgctgcagcggtcttacgtctcactcaccacacgatttacgtctttccagagcaggcgttggttctcacttatacacacacgcacgtccccgtcgtcgcggcgtagtttgttctgccgcgccccggcggcggctgcctcacccagctagtctgtcgtcttgcgtcatttgcttactacgtccgtcgcggtgtgtggggctcacgccaccccccacccccttgtttgtggtgggtcctcgcccgcgcggtgcgctagctactttcttcttgggtgcgcgccgggcgcctcgacgtgtgtcctgccatctgacatcttgtgtgttggctgacgcctacgtattcttgttgtgacccctgcctacgttgtgttctaatactgtactcgcgacgagcggcgggccgctcactagatctgttgtcctccgcactagcatacgtaatgatggggggaccgctcagtgtgctgttcctccaccgctggggggggtgttaggaggaggtgctgtcctttctttgttcgctcactgctttgttcagcaaataatttgctgctcgtaagaacactcctggcgcccctctctcaccccgattctgaagcagaggttcttctgcagtacctccccgctttttttttttgtcttttccccccccccctttttttttttttctcccccctcgggggtgggcgttttaaggtgaggggagga

SEQ ID NO: 697653 - DNA, 489 bp, Homo sapiens
  misc_feature (17)..(17): n is a, c, g, or t
  misc_feature (158)..(158): n is a, c, g, or t
  misc_feature (274)..(274): n is a, c, g, or t
  misc_feature (308)..(308): n is a, c, g, or t
  misc_feature (332)..(332): n is a, c, g, or t
  misc_feature (348)..(348): n is a, c, g, or t
  misc_feature (372)..(372): n is a, c, g, or t
  misc_feature (410)..(410): n is a, c, g, or t
ttttggcgacccagcgnccgctaactccagggccccagcgcagctcgggagcccgcgcaccgaggcgctaggggcaccgcgcactagagggacacccgccgcgcctggacagcccccggcgggcgcccccctcgcacctcctgccccgcgcgggccgngctcccctcccccgcgcctgtgtccccagggcgcagggtcgcgcgtccagccccagacccgccggggtccctggggacgcgccagcccggcagtggctcgacgatggaggagccgnagcgcgcccgctcgcacacagtcaccaccaccgncagctccttcgcagagaacttctncaccagcagcagcagnttcgcctacgaccgggagttcctncgcaccctgcccggcttcctcatcggggccgagatcgntctggggctgctggtatggacgcttattgctggaactgagtacttccgggtccccgcatttggctgggtcatgtttgga

SEQ ID NO: 697654 - DNA, 458 bp, Homo sapiens
caggcgcacttcggaacccacgcgcgcttctgcacccaggcacaccttctagcacccttgtgcgcactatactagctcgttcctagccacctgctgctgctagctagctggacgtccccacggcggcagtagcaggcgtcccctactagcaagcagtaagactatctattagggaatagggccaccgagttaactacaacgacaggcaatctaatacctagcggtgggcccctagaagaagtccaaatgcaccggcttgtcaatagtagaccctactactatacaagcactgtgcggtaggctgccaagccttccgtgatccggagagctctatcccaacattggcttgttaggtcatggaagatcctacaatagtcacgctggttgccctaacggaaaacgcacaaggaacaaaatgtacagtggcacggtgggagttcaaagtgccagcctaggag

SEQ ID NO: 697655 - DNA, 521 bp, Homo sapiens
  misc_feature (114)..(114): n is a, c, g, or t
  misc_feature (143)..(143): n is a, c, g, or t
tgctggtgtattaggtgtactgtgtatatatagagagagatcgtgtgtgtgttagcagtgtgtagtaatccccattacagatgagaaactaggacgcaggatgagtcacttttnccaggcttgctcagccagcaagtggcagnccccagtctagaggtcacatcccctaagcctcagtcagtgttctgttagacaaaccaccctgcctctgatggttgcttctagacttgtagacaacaggctcttcctacttctctcatcccttgtccgtggcggaaaacagaaacacaacttgtcccctcatggtttccatgtcatgcagaccaggttctcggcttcacctgggcccttccgcaaacctatgagatccaggccctgaggagttcctcaggagacatcacagccgtggcacaggcatccacctcctcccttctgcagctgattaacttctggggtgaattggttattttcaaggtgtctgggaggaccaccacgggtcaacaggagtactggagcagccg

SEQ ID NO: 697656 - DNA, 353 bp, Homo sapiens
acctcctaccccacggttaaagcagagatgaaaattttgtgggaaagacatcggcggaataaatttgcttgcaatgaattgggatagacggcttggccctcaggtccagacctccctaacataataaatgaaccagttatagaccagacaaagagatttcccttaagtgctctcttaattttaaagcagaatagctttaactggctcttgatgaagaaatcatcttaccattcttagctgtcctctcttctgcatatgcagtgccaggagtgcttttgggcatttgctgtgttagggtagtgatatgttttggaaagataacggtatcgaaatcagggtactttcacgagaaa

SEQ ID NO: 697657 - DNA, 807 bp, Homo sapiens
  misc_feature (22)..(22): n is a, c, g, or t
  misc_feature (61)..(61): n is a, c, g, or t
  misc_feature (64)..(64): n is a, c, g, or t
  misc_feature (67)..(67): n is a, c, g, or t
  misc_feature (69)..(69): n is a, c, g, or t
  misc_feature (72)..(72): n is a, c, g, or t
  misc_feature (83)..(83): n is a, c, g, or t
  misc_feature (95)..(95): n is a, c, g, or t
  misc_feature (97)..(97): n is a, c, g, or t
  misc_feature (103)..(103): n is a, c, g, or t
  misc_feature (107)..(107): n is a, c, g, or t
  misc_feature (143)..(143): n is a, c, g, or t
  misc_feature (163)..(163): n is a, c, g, or t
  misc_feature (170)..(170): n is a, c, g, or t
  misc_feature (173)..(173): n is a, c, g, or t
  misc_feature (175)..(175): n is a, c, g, or t
  misc_feature (179)..(180): n is a, c, g, or t
  misc_feature (183)..(186): n is a, c, g, or t
  misc_feature (194)..(194): n is a, c, g, or t
  misc_feature (224)..(224): n is a, c, g, or t
  misc_feature (232)..(232): n is a, c, g, or t
  misc_feature (249)..(250): n is a, c, g, or t
  misc_feature (271)..(272): n is a, c, g, or t
  misc_feature (275)..(276): n is a, c, g, or t
  misc_feature (278)..(278): n is a, c, g, or t
  misc_feature (280)..(280): n is a, c, g, or t
  misc_feature (290)..(290): n is a, c, g, or t
  misc_feature (293)..(293): n is a, c, g, or t
  misc_feature (307)..(307): n is a, c, g, or t
  misc_feature (320)..(320): n is a, c, g, or t
  misc_feature (334)..(334): n is a, c, g, or t
  misc_feature (346)..(346): n is a, c, g, or t
  misc_feature (361)..(361): n is a, c, g, or t
  misc_feature (373)..(373): n is a, c, g, or t
  misc_feature (395)..(395): n is a, c, g, or t
  misc_feature (412)..(412): n is a, c, g, or t
  misc_feature (433)..(433): n is a, c, g, or t
  misc_feature (440)..(441): n is a, c, g, or t
  misc_feature (473)..(473): n is a, c, g, or t
  misc_feature (486)..(486): n is a, c, g, or t
  misc_feature (546)..(546): n is a, c, g, or t
  misc_feature (668)..(668): n is a, c, g, or t
  misc_feature (738)..(738): n is a, c, g, or t
  misc_feature (764)..(764): n is a, c, g, or t
gatgttttcgtggagcttgttntggatgctttaggcgcaatcggttatgggcatatggggnatntcncngtntagtgcatggncagtcacttggnantgctgnctcngtaaaaggttgcttttttgtaattaattgtactctnggtgtccacttaatcggaanagtggtnttntntgtnngtnnnngggggggngtgtggggtggggggggggggggggggggngggggggngtgggggggggggtggnntgggcgccctcagttccgccnnggnntncncatggggtcngcngtaagcggggggcngctgggaggtggnactgcgttggggcncacggaggtgcngctgttgctggtgtngaggggggtggnagggccgctgtggcgagggcgncgttgggaatgaggaangcaaactggccatcgggtgcnggtaccnnctgggagcctccgaacaccttagccgcctctncagcctggctgcncagcttgcgtgggggcgccgccgggagggggcgccgcgccccggtggatgggcacgagtngcggcggcggcgcgaacggcgcgtgctgggggccgccgggtcccggtgggggcggtggcggcgctgcaaggagagtgcggctgcccggggtaggtcatggcattaatctgggtcatgcagtnggccaggtggccgagcagccgagtgcgcacctcggtattaacgccctcgcacgtggacaggaagcgggtnacctcgttcatgcactcgctgaagcnggctcggtacttccccagcacacttgggtctgttctcagcgca

SEQ ID NO: 697658 - DNA, 261 bp, Homo sapiens
atgcttagtcgctctgggggggtcgtgcgcatggtcgttccttccgttctcaggtatctgcggagcctgtcaggcatgttccctccaggtaggctctctgtgctccgccaaatggccgctccaattgcgcttggtgatctgagccgccatgctcgccgcgatccaaagagcgcaggtcctcgtccaggggcgatttgaaggccaagagcgagtgacatgccaagatgcgattgacagggccaagagcgattgacaggggga

SEQ ID NO: 697659 - DNA, 435 bp, Homo sapiens
  misc_feature (259)..(259): n is a, c, g, or t
  misc_feature (262)..(262): n is a, c, g, or t
  misc_feature (298)..(298): n is a, c, g, or t
  misc_feature (315)..(315): n is a, c, g, or t
  misc_feature (338)..(338): n is a, c, g, or t
gggtcagaatgttagcccttcaacggtgatggcaatcggtgcgccctggtaagcacgcgccaggaagttgctttgcccgagcataatgcctttaccgccggtaatatccatcgcatcaataatcgactgctgcccgcggtgggtacagtgatacttaacgatagccgacagcacggcaggtttttcgccgagcataatgccgtagtaatcagcgatgccgcagcatccatcacgtaggcattaccggcaatacgcgcangcntcttcaatcccttccatcttaccaatagagattttnaactgacggcgaatgtnagcatacggccggttgccagcgntaccgatttcacgccgccggttgagttggaaggcagggtgatgccgcggcctaccgagaggcactccaccagcatccgccagccttgccggccattt

SEQ ID NO: 697660 - DNA, 116 bp, Homo sapiens
tcggcgtgagtgccacatctaagagatctactcagatacacgtgtgagaggcatgggttggcggtgaggcccaagctagatacactgtgtaggagtcatggcgggtacctgagctc

SEQ ID NO: 697661 - DNA, 182 bp, Homo sapiens
  misc_feature (16)..(16): n is a, c, g, or t
  misc_feature (101)..(101): n is a, c, g, or t
  misc_feature (124)..(124): n is a, c, g, or t
ctgcaggaaattcggncaccgaggcctaaataaagatgatttaagcttagagtggtgctgaagcataagcttcaggtccagaagatgggtttggatccagnctctccacttctctctggacctnagattattcttccagccaccccactcctgagctgaataaagatgatttaagcttaaaa

SEQ ID NO: 697662 - DNA, 412 bp, Homo sapiens
agagagctagcatagttcttaagggccctagggtttttgaaatggtaaacgatcattggcttcaacttaatgtcaccaattgcattagcccctaaccaaagagtcagcctgtcttttgatgctttgaagccagatattgacttctcctctctagctatgcaagtactaagtggtatcatcttccaatagaaagctgtttcatctacattgaagatctgttgtttagggtagccactttcatgagtgatcttagctagatcttctgaataacttgctgctgtttctatgtcagcacttgctgctttcgcgttgcactttttatgatatggagaaggcttctttccttaaaggtcggtgaaccaacttctgctaccttcccaacctctgcagcttcctcacctgtcaagccgtc

SEQ ID NO: 697663 - DNA, 302 bp, Homo sapiens
taatgatccagagagtcatagaagaaacttttctctccttctgtatacccagcttgtctacagtagacaagtttatttccgcccaaaggacaaagttgctaaatggctgcaagttggatctatattttatcattgaatatctttggtcaaatatatccatgccttttatattttactatgagcctttacagatactaatgacttccatattcagagtctttcaactcaaagtgatcatccatggggcattcccttcatatttttcctctaatttattctcagactttcttatagacagtggg

SEQ ID NO: 697664 - DNA, 201 bp, Homo sapiens
accgtaaatgtacagaaggcagctataattattagaactggaagtaaaccaagataatagatgagaaaagaaaatgatgacttcactgtatattaacagatgaaaattgagcaattatacaataaatttcatttggaaaataatttccataatttttttatactttaagttttagggtacttctgcacaatgtgcaggtta

SEQ ID NO: 697665 - DNA, 399 bp, Homo sapiens
  misc_feature (369)..(369): n is a, c, g, or t
gcacacgccctctctttaatggaagccatgaggtgctttcacacaagaaaccagcttagtcaagaaggtacagcctcaccaccaggtcagaatgtggtcctcctcctctgccttggccccggggaagcacaggcgtgctggccagaggtctcagaagatgtcgggcacgatatactcagtgtaggccccatcgatgagtccagccccattgttgtgattgacccaccggcacacctcggccccatgccacgggtccttgctgtagtctttttgcaaacctctggtgaccgtgagccggcggttcctcaccaccatcgtggcatctgcctgtgtgggctcgagagcctgggtgtatctcacacacttcanaaccgatggggtggaaatattgccacagct

SEQ ID NO: 697666 - DNA, 252 bp, Homo sapiens
taccaacaatgcacaggctcaattctctgcatcctgaccaacatttatttctctctctctctttttactttttatttttagagacaaggtctcgcattgtcatccaggctggagtgaaattgtgcgatcacggctcactgcagcctcaacctcctgggctcaagcaatcctcccacctcagcctcaaaagtagctgggaccacaggtgtgcaccgccatgcctggctaatttttgtattaatgttagagata

SEQ ID NO: 697667 - DNA, 1308 bp, Homo sapiens
ggcgcgggctgtggagcccagagccagagagcgcgctggtgcgcgtgctgtggcacccgacggagtggaactggggctggtgtgaatgcacatgggtctgcagctgcttgggccaccctcggtcagagtggcgccgtgtccagcagagcaaactgggctgcccctggagccttgcttgagaggccagttctggtgctttcccagctccgaagtcaatacttgagatcccagatgtgtccagcagacatcctgaacgaggctcggcgggctggacggacgccttcgctgtgtccacaacacgggactcctgaaactgactgatagccacgtggatttgccagcagctctgagccttctaccgcagctcttccccccaactcaactccctgctagctactggacgactacccaatgcgaaccggcacgacctgcctactgagcagcctgccgctgcccggtgctgacaggcctctccccctgcccacctctctcacccgcccactcagtgcctcatgcgcgggccaattgtccatggagcctgcaggcccatgagcaccccagcacctgcaacgactatcgccggcgaccagcgcctacacctgcgcccgtcgacctgcccaacctccgtcacactgtccccttcctcctcatcggacaactgtactcctcgctcaggcccgatacacttcgacacgccatgctcctcgcatacgcttggagaacaggaccatcaggataccctgccaccagcctgtcaccaacagccgttacattcgacccccctaatcactgtctgtatactacaaagaaaccggtggtgctctacagaccctcacgcccagaccagggcagcgcaagtctgagcaatacagccacgacacgacactcgcgggcacattgagacacctgacggcacgctcccgcgaaacccgccatgctagatctcacgtcacgcactcacaagccccgcactccgcgaagcactaccacccacgcaaccggcccctccacagctccccccaccgctgccgcccacactcgaccagccaaacagcgacccgcacacacactaccacacccacacaaaaactcccaccaccccactccaaacaacataccccccaaccccacaaactcaccccccaccccccacaacccacacccacacaacccaccccacccgcaccacaccccctcctaaccaacccaccccaaccctccccaccccacacaccctcccccccaatcaacaatacccccatcactcccccccgccacaatccacaacccacacaacacccacacaca

SEQ ID NO: 697668 - DNA, 285 bp, Homo sapiens
  misc_feature (3)..(3): n is a, c, g, or t
  misc_feature (7)..(7): n is a, c, g, or t
  misc_feature (38)..(38): n is a, c, g, or t
  misc_feature (83)..(83): n is a, c, g, or t
  misc_feature (114)..(114): n is a, c, g, or t
  misc_feature (122)..(122): n is a, c, g, or t
  misc_feature (129)..(130): n is a, c, g, or t
  misc_feature (135)..(135): n is a, c, g, or t
  misc_feature (182)..(182): n is a, c, g, or t
  misc_feature (243)..(243): n is a, c, g, or t
  misc_feature (251)..(251): n is a, c, g, or t
  misc_feature (284)..(284): n is a, c, g, or t
cgngcgnaaaaagatgaattgtaaattatactctcacngtttggatccggtgtggagagggaatgtaaatttacatcatttcnttttgggagagacttgttttggatgcccccnaatccccntctcccnngcgcngtaaaatgtgggattatgggtcggggaaaaagtgggttttttagttnaattttttttaacattccgcgtgaatgtaaatttgtactatttaactgactattcgtgatntaaaatcntgtcgtgtgtataaaaataaaaaagatccgggnt

SEQ ID NO: 697669 - DNA, 367 bp, Homo sapiens
cccacattgactcagtctggggcttgatgtggccctgggtggtacagagccacatcaagcgccacattgactcagtctgggccttcgagaaggtggctgatgccatgaggaacagatgcaggagaagaacgaatgtgggcaaggtcctcctggttccagggccagagaacggagaactatgggcaagtggctgtgatgaccctacgagaccagcgaagggagaagttgggaacgctacgttctgttggacaccagacttgcatttcagcctctgtcataatgctctgccctcgctccacccgaagtgctctgtggtgatgaccagatactacgctgccactccatgtagcgtactctagaagacgga

SEQ ID NO: 697670 - DNA, 875 bp, Homo sapiens
  misc_feature (9)..(9): n is a, c, g, or t
  misc_feature (72)..(72): n is a, c, g, or t
  misc_feature (75)..(75): n is a, c, g, or t
  misc_feature (96)..(96): n is a, c, g, or t
  misc_feature (125)..(126): n is a, c, g, or t
  misc_feature (132)..(132): n is a, c, g, or t
  misc_feature (136)..(137): n is a, c, g, or t
  misc_feature (145)..(145): n is a, c, g, or t
  misc_feature (163)..(163): n is a, c, g, or t
  misc_feature (165)..(165): n is a, c, g, or t
  misc_feature (168)..(168): n is a, c, g, or t
  misc_feature (176)..(176): n is a, c, g, or t
  misc_feature (179)..(179): n is a, c, g, or t
  misc_feature (195)..(195): n is a, c, g, or t
  misc_feature (201)..(201): n is a, c, g, or t
  misc_feature (214)..(214): n is a, c, g, or t
  misc_feature (217)..(217): n is a, c, g, or t
  misc_feature (274)..(275): n is a, c, g, or t
  misc_feature (280)..(280): n is a, c, g, or t
  misc_feature (286)..(286): n is a, c, g, or t
  misc_feature (299)..(300): n is a, c, g, or t
  misc_feature (322)..(322): n is a, c, g, or t
  misc_feature (338)..(338): n is a, c, g, or t
  misc_feature (343)..(343): n is a, c, g, or t
  misc_feature (379)..(379): n is a, c, g, or t
  misc_feature (390)..(390): n is a, c, g, or t
  misc_feature (414)..(414): n is a, c, g, or t
  misc_feature (420)..(420): n is a, c, g, or t
  misc_feature (422)..(422): n is a, c, g, or t
  misc_feature (430)..(430): n is a, c, g, or t
  misc_feature (447)..(447): n is a, c, g, or t
  misc_feature (450)..(450): n is a, c, g, or t
  misc_feature (490)..(490): n is a, c, g, or t
  misc_feature (492)..(492): n is a, c, g, or t
  misc_feature (522)..(522): n is a, c, g, or t
  misc_feature (606)..(606): n is a, c, g, or t
ctgcactcngggaccgtccctgcgcgctctgggcgcaccatggcccgcggggctgcgctggcgctgctgctnttnggcctgctgggtgttctggtngccgccccggatggtggtttcgatttatnngatgcncttnntgacaatnaaaacaagaaacccactncnatncccaaganacncagtgctggggatganttttanttaggagatgctnttnttgatggagaaaattacgacccacgaccaccgaacccacccaaaccgatgctaaatnnaaacnccaacnaccctagttcctnnggtagctttttagatgctgacnttgcggatggcgtttnaggtngagaaggaaaaggaggcagttatggtggaggcagcnacaggaaaganggggaagaggccgacgccccaggngtgatntncgggattnttggggctgttgtggtngcngtggctggagctatctctagcttcattgcttactagaaananaagctatgcttcatagaaaatgcagaacanggggaggtggacatggagagccaccggaatgccaacgcagagccagctgttcagcgtactcttttagagaaatagaagattgtnggcagaaacagcccaggcgttggcagcagggttagaacagctgcctgaggctcctccctgaaggacacctgcctgagagcagagatggaggccttctgttcacggcggattctttgttttaatcttgcgatgtgctttgcttgttgctgggcggatgatgtttactaacgatgaattttacatccaaaggggggataggcacttggacccccattctccaaggcccgggggggcggtttcccatgggatgtgaaaggctggccattatt

SEQ ID NO: 697671 - DNA, 1068 bp, Homo sapiens
  misc_feature (423)..(423): n is a, c, g, or t
  misc_feature (429)..(430): n is a, c, g, or t
  misc_feature (435)..(435): n is a, c, g, or t
  misc_feature (439)..(440): n is a, c, g, or t
  misc_feature (442)..(443): n is a, c, g, or t
  misc_feature (452)..(452): n is a, c, g, or t
  misc_feature (461)..(462): n is a, c, g, or t
  misc_feature (468)..(468): n is a, c, g, or t
  misc_feature (472)..(472): n is a, c, g, or t
  misc_feature (518)..(518): n is a, c, g, or t
  misc_feature (520)..(520): n is a, c, g, or t
  misc_feature (532)..(532): n is a, c, g, or t
  misc_feature (539)..(539): n is a, c, g, or t
aacaaggcttggatggtggcaaaagacctacctgcaccaagtgtgaaaaaaggggccctttcaaggctgagccaggttggaagagggcagagctgcttccaggacaccagagagtgcagcaagtatgcagagaaaacctgggcaccaagagacctgggagagaggaggcagatgggtgggccaaagttctggtagttgggaaaggtgatagaaagcactgcattaatgctgggtcctctgcccttgtactaagagcagcacatggctgcctctgaatcctgcccatggagtaacatttgcttccatatgccacaaagatgagatggggccctgatgtgcctgttataggagggcagagcatcctgtgtgctctgtgagaagagctgggccacgtatctccaggtcaaagcccgcacagcagtnatcccnnccctntctnntnncttcaaccnttcctttcnnattggnaagnatttccgtatttccaagagcctgctcaagtggggtcagcatgtgtntntggtcaccaacntctcccntgtggaaggctgacaactctcccatctatacaaaattgaaaccaccaattatatgattgacactattacactggaacaatttcctgtcagactcccccaccagactctttacaggccggtgcttcatctacatctctctgtccacagcacttggtgtagtattcgcaacctagcaggaatgaaagagtccgtgtggagtcaagcacctcagggaaccccttgaaagcagtgacacatacctccaacaagaattgcctcttccttccttctgtggctttgcacagcatttttctttaattataaacacagttggtctctctatgctgtttaggctaagcacagcacagcttcaaactggaaggttaaatatttgtggtaaaaataacttatttgtgcccatgcaaatgtggcaacacaaactcaggcatgtagtgttctatgcagagaagctaaaaccaaggaatgacattaatttccggtgaaaatatgtgatgacaatcttagaattctggcttttcagaaaaaaaaa

SEQ ID NO: 697672 - DNA, 238 bp, Homo sapiens
gcggccgcctactactactactaaattcgcggccgcgtcgacccaaaagcacaggcaacaaaagcaaaacaaacaagttggacaacgtcaaactaaaaagtgtctgcacagcaagggaaataatcagaatgaaaaagcaacctacagaggggaagagaatatttgcaaaccatatatctgataaaagggctagtatccaaaatgtataagaaactccaacaactcaatggcaaaaaaa

SEQ ID NO: 697673 - DNA, 348 bp, Homo sapiens
tctagagttccccgagatccccatacagagtaactcacacatataaagctcttagcatgatatctggtacacatgaagggcttcataaatgttaaaacaggaagcacagttcatattgtccctcctcccccaacgaatacagcagcacacttagaagtacaatagaggctggtttcagtggctcacacctgtaatccaagcattttgggaggccgagtagaaggatggtataaggtaaagagtttgagaccagctaggcaagacagtaagacctcgtctccacagaaaaatttaaaaatttttcaagcctggtggtgcatgcctgcagtcccagctactctgtatggg

SEQ ID NO: 697674 - DNA, 437 bp, Homo sapiens
tcagaatatactccattttcttgatccattcttctgtcagtagacacatgagttgtttccgtatcttggccattatgaataatgcttcagtgaacacgggggtacagatacctctttgagatcctgacttcgtccttttggccatctacccatggattaaagacttaaacacaggacctgaaactgtaaaactcctagaaaaaaaacatagggaaaaagcaatgatattttagatgtgacaccaaaagcacaggcaacaaaagcaaaacaaacaagttggacaacgtcaaactaaaaagtgtctgcacagcaagggaaataatcagaatgaaaaagcaacctacagaggggaagagaatatttgcaaaccatatatctgataaaagggctagtatccaaaatgtataagaaactccaacaactcaatggcaaaaaaa

SEQ ID NO: 697675 - DNA, 553 bp, Homo sapiens
  misc_feature (505)..(505): n is a, c, g, or t
tagtttatcggatgccatgacaaagtgatttagaaaaaaaaaaaaagaacctaggattagatctaacgaaaatatggtgcaagaccttagtataaaatgttcattggcgagcactatagacaacccaatgggagtgacttaggacttccacagataacatgactgaatatagtaaaggtgtcaattctctccaaaaggtaaatagagggaaggcaatggcaaccataaccccaaggggaattttgcagggacctggatagggcagttggaggggctatcggaaggagcaagggaaaagaagacccaaggtgctgtgaaaaagaagcggggtctccacctcatagcaccacaaaagtccatttcggagggatgaagacctggaacttgaaagacgacctcggaaaccctttagtaggaaatatgagagggtgcacgggtgtactacaacttggaagacggtaaccattccttagtggcttaagacacaaaagggacaacccataanggaaagactagtaaatccaggtcctttaaattgaaaggcttctgtcct

SEQ ID NO: 697676 - DNA, 113 bp, Homo sapiens
cttttccacagggataataaacaagtataaatgtcaaaatatttttttaaaagtataattggccaggtgctggctcacgcctataatcccagcactctaggagactgaggcag

SEQ ID NO: 697677 - DNA, 405 bp, Homo sapiens
  misc_feature (105)..(105): n is a, c, g, or t
gggacccaaaggccccaggtggggttttttaaaagggggttttaaacccccctccccaagggtgcgctggggaagtttcttgtgcccctttttaaaaaggccccncgggctttcgggtttaaaagtggggttaaaaaacaggggtttttgggagcccccccccagccctttccgggtttcacaagggggggggggtcaattgccctttcccaggggggcccgggggcccggccttttcccccccccgtttaaatgtgttttttcttgggtgggggggggttcccccccctaagggggggggcttttttttttttgggcctttttttccccgggggaggggggggcccccccccttttttgttcccttttttttcgcctgaataaagggcccttggtttgttttta

SEQ ID NO: 697678 - DNA, 189 bp, Homo sapiens
tcccccacgactgctgtctgctgtctcctgtgggttgttgctgtactgctcgagcacgggctccacattctgcctcacagtcttggtgccctgctcctgcagcagggtccacttggtgtccagaaccttgttctgctgctccaggaaccgcaccttgtcgctgacggaggcaaacttcttgttgagggt

SEQ ID NO: 697679 - DNA, 217 bp, Homo sapiens
attcatgcggtgagccatcctttcatagtgttttaatgttattaactatttcaaatcatcttggtaaataagctgtaaaaatttaggccaatagtggctcattcctgaaattccagcaccttgagaggccaagacaggaggactgcttgagcccaggagtttgagatcaacctgggcaacaccccaactctacaaaaaaaaaaaattggccaggctt

SEQ ID NO: 697680 - DNA, 191 bp, Homo sapiens
ggcggggcgtttgcgtgcttgcggttttttcattgcgcagcaattctaatcacctcaatatctatcactagatagtgaacaatcagcggcatttagtacatccagtaacgttgtgtaggcaccacctctgtcacgttccggaacattctgtcatcaccctgtgcagcaatcatttcccctttcgtcccccg

SEQ ID NO: 697681 - DNA, 129 bp, Homo sapiens
cggaccgtgccttaaaaatacaaagtggaagttaagtttacatatttgaaaatcacatatcactaaattaccattatctagaattttccaaagacaaattgcaccatgacatgctacaaaaggcatagg

SEQ ID NO: 697682 - DNA, 1226 bp, Homo sapiens
gcatcatcactgggccatcagatatatgcagacatcaataaccactatgaggatatctatctcgatcaccagattagtgaatggtcatcaattaaagaagttcaggagaaccaacatggctgcctggtcgtagtgactggtggatgaaaatatggaacatgttttaccactagtaggtctgcgggactggtaatgctatgattcaacccacttgtggcaagctcagttgttggcgaatatcctcagggcactcgtagaagcatagcaaatagccactccgatgcccagccataccgcagttagctggcggtatatagcccaacaggaccgtataatacgtcagtgctgtcgtagtaaaagcagcagcatggcacacatgatcttacttgcgggcgactagcttcatcgaaatatgcagatacgaccttgcgacacccaaacgcccagaagtgatcccagaacgaactagaatatgacctggcgaatctaagcgaagaaatcgtggcacaattattacgatccaatgagaagtactagtggcgaggcccagtaaaaggagaacatggattagacgatttcgaatgttccctattaagttagcggcgagcactgggacttgacataactggagaagatccatccatgtgcctcaggtaataactaatccgcaaagaagcaaaataaacccaagaacacgcggcattagtgtctcaacttcaattagagggtggggatctttggcaatgcaaatggaagaattcaaccacttgggacaacaggggcacaggggtggaaattaattcatcaacttccgttgagggtgacccttggtgggattggggagggatcgaagggaggaacgtaagcggcgggccacagagacataggccatttagtgtggaaagacaattggtacgccataaaatggcactcacagaggagacaaccaaccggttcacgacggagaggtgtgacaaggcggcaagacaggggccgtgtggggacaccaaatggctcagtaaccaggtagtggggtaagggtacacacccaggacagcatagggggaccaaacaggggtaacccaccaagaaaagccacagcagagaaaaaagggcacacaagaagcaagagagagaacacaccgaaaaagtcagaaaccacaggaccaaatacaggccaattcatggcacgacagaccaagaacaatataggacggcagaacgga

SEQ ID NO: 697683 - DNA, 233 bp, Homo sapiens
aatatttatattatgacgtcttcttattcacagcctagccaggcagtaagccatgattactgttccttttggcgtagttttggtgtcccgggggttaggaatgatcttgacttttctgcttgctttgttttctaagctttgggatttatttttattttgattttttttgaaacagagtctcactctgtcgccactgcactccagcctgggtgaaagagtgagactcagtctca

SEQ ID NO: 697684 - DNA, 352 bp, Homo sapiens
acctccataatgtgtgcccactctccgacataaaacaatgtgtaagatgtacattggtttggtccaggaaggcgagacaactcgaggtgaggtacggggcgttccagggcacaggtggataagagacaaacagttgcattctgttgagtttctgattagcccttccttgtggaattaggtatttccttgtgggcaaattatgagcaaggtgtgtagctttttttttttaatctttgtagctctcttatttaggaaataaaatggggcccaggtttgcctgaaagttctcagcttgactccttggcttagtgattttgggttccttggaaaatgatttattttccattcacat

SEQ ID NO: 697685 - DNA, 471 bp, Homo sapiens
  misc_feature (137)..(137): n is a, c, g, or t
  misc_feature (153)..(153): n is a, c, g, or t
  misc_feature (210)..(210): n is a, c, g, or t
  misc_feature (215)..(215): n is a, c, g, or t
  misc_feature (221)..(221): n is a, c, g, or t
  misc_feature (296)..(296): n is a, c, g, or t
  misc_feature (298)..(298): n is a, c, g, or t
  misc_feature (433)..(433): n is a, c, g, or t
gctttaatattttttttgtttaccacttaatttttatcaactttgattttagttagggcttaggtcatggttgaagaaaagtggaaaataacaagtgcccatttaggtttgaagaatccagaatgttttacctttgnctttatgagttatagnagcttggctttgctctaggtttcatgttgagagatgagaggggtggcagtattttcnttttnttcttnctaatttcagtttcctgtaaaggaaacaagttacatattgatgcttaaatccagaaagtgtcaaaggttttcttnanctgttaaaatatagtgtctgatatcaaggatgtaagttactcagctttttgcttcctaaagcaactagtgagtgtgaggcaggagaatctcttgagcctgtcaggcggaggctgcagtgggctgagatcgtgccnctgcacttcagcctgagctacaaagaaattccgtctcc

SEQ ID NO: 697686 - DNA, 134 bp, Homo sapiens
ggatcactagtactggctgcagttgtgctggaattctggttatgctggctgccctttttttcccagctactcgggagtgatgagtgcaggagaatggctgtgaaccctgggaatgtggatgcttgcaaataatg

SEQ ID NO: 697687 - DNA, 765 bp, Homo sapiens
ggaagaagactcgaagttcgaagtggaacaactggaagaccagaagtacgggacaggcgaagaaaacgaactagacgacagatacgggacacttagacagactaaaaaccatacttttagaacgacacaaacgatacactttaacaccctgaacaacgtacggacagtcagacagaacacaaagacacagctaggcaaacacaaaaggctaaggggcacaacatgtaccaaacgttagcaagcaaacatctggacagcatagcaaacgacagatcagacaacatggaagaatcatctggtcaacgaggtttcgagaatacgaacacatgaacaaacgaaggctaagggacaaggtacttggcacgcaagtactagaacgcatcagcaaaacatcaaaaggccaacaaattcggcatacaacatacgcacgtgaaacaacatgaggaacattcattggctaacccaatattatatctaaacagccgcatcgaatttacatttcctggtgggtgcagcacagttagcaacggtaacacgcttgcagacacgatgaggcgtgtcatacagtagcacccagacaccacatcatcgcaacgacataccttgacacgctagaacggggacacgttcggttcacaaaatcacatcaaacaagctactaaacaggactggttgtaatgtaaaaaacaaactaaaggcagaaggcttaatggaagagttagaagaatttggaaggccttaaatatagtagactacgttgaaaaa

SEQ ID NO: 697688 - DNA, 355 bp, Homo sapiens
  misc_feature (28)..(28): n is a, c, g, or t
  misc_feature (279)..(279): n is a, c, g, or t
agcttttaaaagattttttttttttctntcaaccccatgattcctttaacaacatgtttccagcattcccaggtaggccaaggtgtcctacaaaaaaaccttgggttaaacctacagggggtttggctggtgttaacaaaagggagggcaaaactggtgcggctggccatggaaaaaacttacttgggtggtgtggtacaaaaaaaccagcttgtttacatgcttattccatgactgcttgccctaagcaaaaagtgcctttcaggatttatttttggnggtttattacgtatgtttggttttcaattcccccagtttaatgaagatttaaataaaatggtaggttttcccttta

SEQ ID NO: 697689 - DNA, 271 bp, Homo sapiens
atctgccagtgcttagctcttggactgctcagcccttcgaaactatcagaaataaatttctgtggtttataaggcacccagtttacagtattttgttgcagcagccagaacgggctaagacaacaaggatgaggtgaagcatcctggatatcctctgcctgtaatccggtctgatgtgcggcacttcatgtccgagcctatccatttggttatggtcttcggaaaagacaacgttagtcacttactagtggcagttgcatggagaagaggg

SEQ ID NO: 697690 - DNA, 151 bp, Homo sapiens
  misc_feature (100)..(100): n is a, c, g, or t
  misc_feature (112)..(112): n is a, c, g, or t
  misc_feature (130)..(130): n is a, c, g, or t
aagacttcatactgccttccatagtgactagaccattttacattcccaccaacaatgtacaagggttccagtttctccacatcctctccaacacttgtantgtgttgttttntcataatggcatcttaanaggtattaggtgatattacta

SEQ ID NO: 697691 - DNA, 134 bp, Homo sapiens
aacggatggattagccccgtatgctctccatccaatgaatatctaatacacaagtatatctccacaactctatccatatccaagcatgaggatggctactcatatcctatacctatacagctatacagtgctac

SEQ ID NO: 697692 - DNA, 512 bp, Homo sapiens
tctacgatggcagcagatgagcggcatctgacatacgaccgcagggaatggaatgagcctcaacatggcgcggatgacggtgccgtagctctgtgtgcgggaggcggagcccgggtactccacatacacgacaggcacgtggagcaggaacctgtgtgagaggggctttcttccaggctctgtgaggggattacaagaccccaacaaactggattctccccagcttcacccatgtgagactctgaggtacggataaaagcctccgtgctccaccatctgtctgatgaaggatatgaccctctgggtcccatattaatccatatctggcacgttgatctacatcacagaacaacaccagccactttccaagttgaacaggagccacaaccaccccattaggtgtgcgcctgtactcgcagtagtgatcacaaagtcttcagaagcagctctggacgtagtcacactggagaagttgagacccaccacctccatgtcagggaaggcccggaggg

SEQ ID NO: 697693 - DNA, 279 bp, Homo sapiens
  misc_feature (123)..(123): n is a, c, g, or t
  misc_feature (131)..(131): n is a, c, g, or t
  misc_feature (161)..(161): n is a, c, g, or t
  misc_feature (203)..(203): n is a, c, g, or t
  misc_feature (225)..(225): n is a, c, g, or t
  misc_feature (232)..(232): n is a, c, g, or t
  misc_feature (250)..(250): n is a, c, g, or t
  misc_feature (258)..(258): n is a, c, g, or t
tggctgttgagttgcaggtgttccttatataccctggatattaacccctcattagatacatggtttgcaaatattttctcccattccatagattaccagttcagtctcttaacctgttttccnttgctgtncaaaaagcttttttaattagatgcagtccngtttgtctatttttttaaattgctttcgctgtagctataagntgtgttctgttaagactttggnaaccacnaagaaaatacctatatgnacgatacncggaaggatgcaaaaaaaggg

SEQ ID NO: 697694 - DNA, 237 bp, Homo sapiens
ctgtagaggatcccggcacaggagactgtaccaccatggtgacacgggtgatggggaatcagtgcttcgatatcctggagagggcgccatgagaaacggataccaccatccaaggaaggcagcagcgcgcgcaaattacccactcccgacccgggaaggtagtgccgcaaactcacactaccggactctttcgagtgccctgtaatgggaatgacgtccaatttaaactcctttacc

SEQ ID NO: 697695 - DNA, 166 bp, Homo sapiens
  misc_feature (32)..(32): n is a, c, g, or t
  misc_feature (74)..(74): n is a, c, g, or t
  misc_feature (87)..(87): n is a, c, g, or t
ccatctctacaaaaaatacaaaagttagccantcatggtggtgcgtgcctgtggaaggctgaggtgggaggatnacctgaccctganggcggtcgaggctgcagtgaagctgtgaacatgctacctgcacctccagtccgggtgacagagtgagaccctttcgcaa

SEQ ID NO: 697696 - DNA, 762 bp, Homo sapiens
  misc_feature (3)..(3): n is a, c, g, or t
  misc_feature (88)..(88): n is a, c, g, or t
  misc_feature (103)..(103): n is a, c, g, or t
  misc_feature (230)..(230): n is a, c, g, or t
  misc_feature (243)..(243): n is a, c, g, or t
  misc_feature (249)..(249): n is a, c, g, or t
  misc_feature (257)..(257): n is a, c, g, or t
  misc_feature (264)..(264): n is a, c, g, or t
  misc_feature (277)..(277): n is a, c, g, or t
  misc_feature (289)..(289): n is a, c, g, or t
  misc_feature (291)..(291): n is a, c, g, or t
  misc_feature (305)..(305): n is a, c, g, or t
  misc_feature (314)..(314): n is a, c, g, or t
  misc_feature (352)..(352): n is a, c, g, or t
  misc_feature (404)..(404): n is a, c, g, or t
  misc_feature (429)..(429): n is a, c, g, or t
  misc_feature (442)..(442): n is a, c, g, or t
  misc_feature (450)..(450): n is a, c, g, or t
  misc_feature (501)..(501): n is a, c, g, or t
  misc_feature (503)..(503): n is a, c, g, or t
  misc_feature (630)..(630): n is a, c, g, or t
  misc_feature (681)..(681): n is a, c, g, or t
  misc_feature (736)..(736): n is a, c, g, or t
ggnaggggggcccggacacagagacgcacaggttggggacgctgattgcagacgcggacgagcagggcgggcgcgggaggcagggttnaggccgccgcggggntcccccagcctctgggcccgttctggggggggtggaaggcgcagacagcccccgaaggagccagttggaagtagggagccacggctggactgcatcctcacttgccgcccttgcgggacagaaaccnggggaggcaaganaaagtntgtttgangcgcgcnagagcggcagcgnccggtgggcttncnggggggtgcgcggnaccaggggntgcagggtttcctcggaggctgctgagtgcggcccggnggaggaggccgaggtcgcggagccctgccggcagcgcttgcacagcggcagnagcgcgcgcaaattcttcttgttgnggaaggggctctngccgaagngctccttcagctgctggcgaagttttgggaactggcccagccaaactcttnanctgctgtctaaagtctgggttggggttggcgatgggcctggtggccttgatggcttcaagcacgtcccgccagcctagccccgtcacagtcatcacatacgctgtcacaatcgtggtgctgcgaganatgcctgcaaagcagtgcacaaggcagttctccccattaaggcggcagagntggatgaagttgatacattctttgaagtgctttttgatgggtactcaggggtatnagcgactgggatgcgaaggtaggtga

SEQ ID NO: 697697 - DNA, 591 bp, Homo sapiens
  misc_feature (400)..(400): n is a, c, g, or t
  misc_feature (587)..(587): n is a, c, g, or t
cttgcaaccagctttggagaaagcccagctcctgtgtgctcactgggagtggaatccctgtctccacatctgctcctagcagtgcatcagccagtaaaacaaacacatttacaagaaaaatgttttaaagatgccaggggtactgaatctgcaaagcaaatgagcagccaaggaccagcatctgtccgcatttcactatcatactacctcttctttctgtagggatgagaattcctcttttaatcagtcaagggagatgcttcaaagctggagctattttatttctgagatgttgatgtgaactgtacattagtacatactcagtactctccttcaattgctgaaccccagttgaccattttaccaagactttagatgctttcttgtgccctcaattttntttttaaaaatacttctacatgactgcttgacagcccaacagccactctcaatagagagctatgtcttacattctttcctctgctgctcaatagttttatatatctatgcatacatatatacacacatatgtatataaaattcataatgaatatatttgcctatattctccctacagaatatttttngctc

SEQ ID NO: 697698 - DNA, 434 bp, Homo sapiens
  misc_feature (201)..(201): n is a, c, g, or t
  misc_feature (402)..(402): n is a, c, g, or t
cctgctggggggtacagatggggagactgaggcttggggagcctgaaatttctgttgctcactggtgtgtggcagctgtacacaggcctcttggggaagtgcggacaggccttcaatcaggagtgcttttattttgccccctcttgaaatttaatatgttgcttattattagaaaattaagcagctgggcgcggtggctcntgcttgtaatcccagcacttcgggaggccgaggtggaaagatccattgagcccaggagttctgtaccagccctgggaaacatagcgaggccctgtctctaccaaaatttttaaaattaagctgggcatggtggctggcgcctgtaatcccagctactcaggaggctgaggcaggaggattacttgagcctaagagttcaanggctacagtgaagccatgatcatggccattgg

SEQ ID NO: 697699 - DNA, 1226 bp, Homo sapiens
gagtactgtcctttctctctccccgtgacagcatgagcttcaccgactcgctccaccttctccacacaacatacctggtccctggtgctctgtccagtgcgcccagctacgtgtgccctggcctggtcagcagctgctggcagctgtctatgcatgtgctgctggaggcgcatctgtgattccctgtgactctcccgtgatccctgctcacaaccaagcattcagaggatgcggcattggcggtcctggggagaccctgtgggcaacctgcgagatacgccaggggcgtacttggcgacggagactggggacgcgcatacccagcacacgggcagacaggacggacccaattgatacacacgcccttgaacactgaacctgcacttgtggccttccttacactcgggacccgcacgtgcagtgagacccttgcgacgaaaccggaacgacacccagggaagggctaggccccgaagccaacacactcccccggcgacgcaacctaatggggcaggacaacgaaacggggggaaccaccagtgctcccagcacccacctacggcacggcccactccaactctccaagactgacttcgcactccgacactgggacgcaatcgcagcgggcactctaccgaaatccttccccggcgaacacttaacctggttgggacaaaacatggaccccggcactaccggtgacatggcaagcactttggcccaaactgcccccgcacaatctcgctcggcctcgagttgaacctctttaccgaccgctcccgaccgcttaattggacggcaaccacgcagctcttcgtggcccaatgggctagccccaacggtcagtggatcgggactcgacaacggcacaagtccacattgcgcccttccccggcccaaacggtggtcacatttggaatttcgcactacccacaactacatacaacagccgacctcgggccggccacggtgcacgcaaccacgcacaattcggaaggtgccctccatccgacggtgtcatggatgccatggcattctgttccactggaataacagaaactcccacccgccacatgcacgggcggggccacacaggggcgccatcacaaagccccgccaccattgggccacgaccatccgtggcgattgtgcccccgcatggcagcgcgcttgaaagtggcgccccccagaatctcagggccaccagtcgcacacagcatacacgt

SEQ ID NO: 697700 - DNA, 332 bp, Homo sapiens
cggatcccggaaataacagagcctgtgcagtaaccgcttggcaagtaataaatatatccgaatttatgtcctaaatccatatcaactccaccacttgactatgctctctgcatcttcttgcttaccctctataccattatgagtggagcccttcaaattcacatgtaaaattgaacatgaaatctatatgcctcaaacaccaatacctatatatctataggaaaacaagtagcaacatgccatcctgacatagacaaaaagtaaatagacatttgcactccaactttataaccagctgcaagtatctttctatctttctttctttaaatcga

SEQ ID NO: 697701 - DNA, 769 bp, Homo sapiens
gctgaagtgccgccgccgccgtggtcagccacggggaatccgcccgcatctgccgccctcgccggcgtggcgtgcgtggggcccagagcgccggaggccaggctggggcggcaccgcgcagcgggccacggggttcccgttagagcagcgcccggcggctatgccgatgtagccccggaagtcggtccggtagtgtagcagtatgggtgccgtgcgggaagggagggaaacccttttctgcgaggatacgaagccataacccggtcaaggaaccccgaacttgaattggctcgggcattggggcgcaaaatactgacacagcgcgagggcaaggcgaagctactgacacggggcagggttattgctcccccttgttgccaaccggcccccttggcagggactcggcagccagggcagaattgcagctaggccattgtggcagcatttggccttttcctaagcaggggaagggcttccttgcattggcctttgcaggcattgattccttgttgcgcaccttcgcagcatttggagacacaacaaaccgcctttcggagggaagctactcacgttgggctgttgcgaccggcaaggccgggcattaccgggggcccagccaagttcttcctggggaacgggtgggctttcccggagagcctctggctttcattcatttttgccaggcgcgccaagagagaaaccccgggacccgtgattgcttgacttgggatctgtggcatgggcgatgacactctggagtatgggaagc

SEQ ID NO: 697702 - DNA, 619 bp, Homo sapiens
  misc_feature (338)..(338): n is a, c, g, or t
  misc_feature (381)..(381): n is a, c, g, or t
  misc_feature (398)..(398): n is a, c, g, or t
  misc_feature (405)..(405): n is a, c, g, or t
  misc_feature (412)..(412): n is a, c, g, or t
  misc_feature (428)..(428): n is a, c, g, or t
  misc_feature (443)..(443): n is a, c, g, or t
  misc_feature (447)..(447): n is a, c, g, or t
gctaccatctccccggtgtccctgagctctgggggggctggcattcggcccggggaaaagcgtgagcaggtctgcgaggctaacctgtctccgcgttgacgcacctcgcgggcgatgaatccggcagcgacgaaggaagactgccaatggataggcccaggaaaacgaactagatggagcagcctatgacagaatggagaggaacaccgccctttggggagagaggtgaagggatagcagtcgtgtacgggaaatcgagggtggacaaggctcgtccgacttgcccctaattttcgatgggcacatacccaataggcagatcaatgatgggatgggtngagatggagatgatatggaaatattcatggaggagatgagagnaatcagaagaaacttanggagctnagttgangaattgtctgcgtatncttatggggagctcnctantcaccatgaccatcatgatggaatttcgccttatgccttgacgtccgtgccatttagtcatgagattacatactgtgattacccggtgtttgctaatagtccttgcattttcctaatatgcctttagctgagtccgtgtggtgtgaaccctatgttatgtccactgtgtcag

SEQ ID NO: 697703 - DNA, 504 bp, Homo sapiens
gccgttgtagtccacatcaatgcggcggtgcaggtccacggagttcggggtgcctggcttgtcgccgaacttgccgcggtcactgagggggtgcttggaaaaatcgtggtcgtagtgcacgtggggggcggaggtccacatgaaaatgctgcggtcaatcacttcgcccatggagtgcaggtggctgcgttcctgcaggttcagcatctgcccacccaccagggttggggtgcgcgcgtagcgggctgcctggagggcacggagcacggcatcgggttcgatggcgatgtcatcgtccatgtacaggatgtagggggattgttttgcggctgcctctctagtgccgtcggggccacccatggcctcatacatgatgcgggagtagccgccggaaccgccgaggttaccctgctggtacacgaacagccgacctttgaaatgctccgcagcatcggcgaagcctggttcgtcagccctcgatccgcccgcgaatttagtagtagt

SEQ ID NO: 697704 - DNA, 1006 bp, Homo sapiens
  misc_feature (99)..(99): n is a, c, g, or t
  misc_feature (154)..(154): n is a, c, g, or t
  misc_feature (338)..(338): n is a, c, g, or t
  misc_feature (342)..(342): n is a, c, g, or t
  misc_feature (344)..(344): n is a, c, g, or t
  misc_feature (353)..(353): n is a, c, g, or t
  misc_feature (355)..(355): n is a, c, g, or t
  misc_feature (359)..(359): n is a, c, g, or t
  misc_feature (364)..(364): n is a, c, g, or t
  misc_feature (376)..(376): n is a, c, g, or t
  misc_feature (381)..(381): n is a, c, g, or t
  misc_feature (423)..(423): n is a, c, g, or t
  misc_feature (496)..(496): n is a, c, g, or t
  misc_feature (541)..(541): n is a, c, g, or t
  misc_feature (543)..(543): n is a, c, g, or t
  misc_feature (545)..(545): n is a, c, g, or t
  misc_feature (549)..(549): n is a, c, g, or t
  misc_feature (594)..(594): n is a, c, g, or t
  misc_feature (642)..(643): n is a, c, g, or t
  misc_feature (674)..(674): n is a, c, g, or t
  misc_feature (846)..(846): n is a, c, g, or t
  misc_feature (912)..(912): n is a, c, g, or t
  misc_feature (987)..(987): n is a, c, g, or t
cgtgccctgtcccatccgccccacaagcccatccaggagccacacaccctgcctgggctgtgagcactaaactcctgagtgacacagagcgctcagccngaaagagaacctgggaacaaagaagacaagctaatgatccagcattagagaggcnctaaaaggagagccttgggggctctgagcagcaggtacaccgtcctcccctcctgccagcctggttctgccctcactggaagagtcaaccccgccagcagcgcccacagccccagccccatcgtccaggctgccatgtcccggcgggcagtgcccaggcccagatagatatattttagcggacnggcngnactataaanancggnaggcngggccttcctgnatctncactctccgtaccggatgcggccgaagacctggcctcgctanaaagcctggctctgctgctccaggccgctgctcagccgcctgccttgctgtcggcgagggtggtcctggggangcctccagggactagggagacgcgggtgggaggagcctgtacttnantntctncagaagcagcagggccctcagtgccagcgtcctgcagtcctcgtncgggtctttctcagccacgtccgccagccaggaccgggcttccagcanntcgtccatcaggtcctccagcaggcgcgcanagagcaggctgagcaggacggaggagacggccgacaacagcccctggcgcacgtaggcatcgatgtggaagcgaagggcccacacgaattccagcagggccttgcccatggccacagccaccgtggtgttaacagccaggcacatcagggcccctaaggtgtgcgccacctntccgagaaccagctggtcttctcccaagaggtcgaaggtcaccagaggactgtcaaagcgctgaangaggggggaagaagaagtggccggccacggagttgaatctgctagggctgcctgccgggccctgcctctgggcanccttggagagccgctgggt

SEQ ID NO: 697705 - DNA, 148 bp, Homo sapiens
ataaagtagggcaaatatactatagtggccctcatggttgctatcgaacactagatcttactccgtctatgtgactgtatatttgacccacgaggcatgccctttctactccgctttgcactaccctattgcagactctgctaaccgg

SEQ ID NO: 697706 - DNA, 499 bp, Homo sapiens
gtccgtggaggaaaaagaggcgaggctttaccgagatcgtctcagcgatggcgcttcggtcgcagttttgggggttctcggtttggaggaaccctgggtgcaggttccgcagccctgtcaaccagctccgagccgggcgcgaaacctgaagtggaccctgtggaaaatgaagctgtcggcccagaaattcaccaaccggaacccccggaaactgagcttttatctgtagccaggaaagagcggggctggcggacggtgtttccctcccgtgagttctggcacaggttgcgagttataagggctcagcatcatgtagaagcgcttgtggagcatcagaatggcaaggttgtggtttcggcctccactcgtgagtgggctattaaaaagcacctttataataccagaaatgtggtggcttgtgagagtataggaagagtggtggcacagagatgcttagaggcgggaatcaacttcatggactaccaaccaaccccgtggg

SEQ ID NO: 697707 - DNA, 453 bp, Homo sapiens
gaggtattgtatggggaatggggatatctggataggtgttctttggcagtaggcataggatatgtggcatttgtgggtgcagctgttgttgttgctttgccgtggttgtgactgttgttgtggtggccttggatttcttcatatctgttacaaaaagctgccttcggacaatcaaggtgtacactttggacttgtccctttgttagattctcctatgcaccgttgaatctcaatgaactggttgttgttcttgggcttgacttttaccaacctgctttatttatcctgacaaaccactgctattctgattgctatggcgaggcaccatgtgaggcttaggcgagttagtagctctggcagggctcaaaggcctgacaggaaacggaccccaagtggattgagctggtggaaaagtacctccaaagtgggtcatgggcaaccttggtggacgga

SEQ ID NO: 697708 - DNA, 157 bp, Homo sapiens
ccggcagagaggagaaggagaaggagcgggtgcctatgctcagatcgactggcatgattttgtaggtggtggaaacagtggacttccaacccaatgagcaagggaacttccctccccccaccacgccagaggagctggggacccgaatcctcattca

SEQ ID NO: 697709 - DNA, 166 bp, Homo sapiens
gctccctgtggtgcttggttgtggctggcctgcgggccgggacggcgtttgcctggaacctccaccactcacgaactacgacgcgcacgtttcactgggatcacctccatcagggaaaccaaagagctccccacaaacagctttctgggctgcctgaagaactttc

SEQ ID NO: 697710 - DNA, 361 bp, Homo sapiens
agggtaccgtgacatcaggtgactggcagtatacatatcgaccaatttcatctgtagctcctgcgcctgcttcgactcattgagcgtcgatacgtcttgcaaggccacaaatccttcgcagctataattgcgggtattcatcacaatttgcgtgttgtccgaatcaaggatctgaaagcccatagcttggtagaaagcgactttggctggtgtgcacctaagctcgacatgaggataccgtgcaatcactttttccatcatcgttctgccaataccaagcccacggtgttgatgatgaacaaccatatacgttagcccgcaggcgtctggatggcttggtaccggaaggtagagcacatat

SEQ ID NO: 697711 - DNA, 586 bp, Homo sapiens
  misc_feature (12)..(12): n is a, c, g, or t
  misc_feature (18)..(18): n is a, c, g, or t
  misc_feature (178)..(178): n is a, c, g, or t
  misc_feature (519)..(519): n is a, c, g, or t
  misc_feature (526)..(526): n is a, c, g, or t
  misc_feature (530)..(530): n is a, c, g, or t
  misc_feature (537)..(538): n is a, c, g, or t
  misc_feature (557)..(557): n is a, c, g, or t
  misc_feature (567)..(567): n is a, c, g, or t
gaattgggacgngcccanccaaaaccctcccagacgtctcctctcctgcctgggcaaagtccagcttggcaccccgtctggggcctgcctgtggtcagggcaagtgttccctcctccaggaaagcctttaccctcctcatgccctgtagtcaggaggccgcctgctgtaaccctccgngtcgcctcgggtgcgaaatcagacccacctgacaccatcacgcggaggcccagcagcacctgcacccacccccaccttccccagcaaccacttccagctgctctggccaaaatctccgctcggccaggccccgtggctcacacctgtaatcctagcacattgggaggccaaggcaggcacatcacctgagttcaggagttcaagaccagcctggccaacatggtgaaatcccgtctctactaaaaacagaaaattatccgggcgtggtggcacatgactgtaatcccagctactcaggaggctgaggcaggaggtcacttgaacctgggaggcggaggttncagttangttnaggtttnngcatttgaattcaagcttngggaacaagnggaaatttttgcttaaaaa

SEQ ID NO: 697712 - DNA, 179 bp, Homo sapiens
  misc_feature (59)..(59): n is a, c, g, or t
  misc_feature (110)..(110): n is a, c, g, or t
cccggtcaacttcaagctcctaagccactgcctgctggtgaccctggccgcccacctcnccgccgagttcacccctgcggtgcacgccttccctgggacaagttcctggncttctgtggagcaccgtgttggaccttccaaattaccgtttaagctgggagcttcggtagccgttcctt

SEQ ID NO: 697713 - DNA, 651 bp, Homo sapiens
  misc_feature (12)..(12): n is a, c, g, or t
  misc_feature (18)..(18): n is a, c, g, or t
  misc_feature (178)..(178): n is a, c, g, or t
  misc_feature (627)..(627): n is a, c, g, or t
gaattgggacgngcccanccaaaaccctcccagacgtctcctctcctgcctgggcaaagtccagcttggcaccccgtctggggcctgcctgtggtcagggcaagtgttccctcctccaggaaagcctttaccctcctcatgccctgtagtcaggaggccgcctgctgtaaccctccgngtcgcctcgggtgcgaaatcagacccacctgacaccatcacgcggaggcccagcagcacctgcacccacccccaccttccccagcaaccacttccagctgctctggccaaaatctccgctcggccaggccccgtggctcacacctgtaatcctagcacattgggaggccaaggcaggcacatcacctgagttcaggagttcaagaccagcctggccaacatggtgaaatcccgtctctactaaaaacagaaaattatccgggcgtggtggcacatgactgtaatcccagctactcaaaaaaaaaaaatagtaataatacaaaaattagctgggcgtggtggcacatgccagtaattccatctactcgggaggctgaggcaggagaatcgtctaagcccgggaggtggaggttgcagtgagcccagatggcgctgctgcactcaagcttngatgacagagcaagactccgtttc

SEQ ID NO: 697714 - DNA, 1157 bp, Homo sapiens
cattgtaacttttcatttaaactctagggcagtgctgtgtctgatcgctctgatagtaacttgctgtatcttctttcacttatactttacaaggtcgacgctgttgatgcccacatgttggctgagactcgctgggaggcctcaagtgcgctactccttcgactagctgcacagaagctactggacagcgattactaaccaagggcacaggggactcgacccccacgtcctctaataacctgggtattacgggactcacgaatgacaacactaccgggttcacaatggttccccccaatgggcagcggcacctactgggcctttggggcctacggggaacaccggaaatattccttaaaaccggtggggaacttcttggacacttagcgggctaatccaaacattccccgaaaggaaccggctggctggccgtataaatgagccccttccagcaaatatctgggtacccaaggccggtttgagccacgcgggcccaattaaagacccaataatctatcctattcccaaggaaacggctcgttgggcgacgttgatacaccgggtacttttcactttggtactactccggttgcacacccaggggggccgactcccgttatgataaaaagaagaaacgtgaatacaccagccaagacacaccatagggcccccactgaaaagttactatgatgccctgtatagagtcatcagttggttctatccaacttgggggggggcgaatatatcactatcctgtgcattacagtggattattagtatcctccgttgtacctatgaactataaagcgcaaatttacacaatagcatcgcttagatctcgcgtccaaaagagtgtcagaaccccctgtgggaaagagcgtcattctcaacagggtttgggaaacataccttgtaacaccggggggggtatggagacatcaaatcttcctttttgctacacggagacaccacgcagcagccgtatagtcctaccccaagtatgagtagtattattttccacgttttaaaacacaggttttacacgggggggaaaaatacgcccgcaaaagcagtggttttactcacaggagcgaggacgaacgacactgtaaacccccctgtgtggccaaaccgttgccatctaacactgtggggaa

SEQ ID NO: 697715 - DNA, 322 bp, Homo sapiens
  misc_feature (20)..(20): n is a, c, g, or t
  misc_feature (22)..(23): n is a, c, g, or t
  misc_feature (31)..(31): n is a, c, g, or t
  misc_feature (154)..(154): n is a, c, g, or t
  misc_feature (166)..(166): n is a, c, g, or t
  misc_feature (182)..(182): n is a, c, g, or t
  misc_feature (223)..(223): n is a, c, g, or t
tttggtgagtttcccgctantnngcagcgtngcgggttgaagctggtgtctgcggggttccagactgctgaggaactcctagaggtgaaaccctccgagcttagcaaagaagtggggatatctaaagcagaagccttagaaactctgcaaattntcacaggagagngtgtctcacaaataanccaagatatgctggtacatctgagtcacacaagaagtgtanagcactggaacttcttgagcaggagcatacccagggcttcataatcaccttctgttcagcactagatgatattcttgggggtggagtgccccttaatga

SEQ ID NO: 697716 - DNA, 446 bp, Homo sapiens
  misc_feature (8)..(8): n is a, c, g, or t
  misc_feature (124)..(124): n is a, c, g, or t
  misc_feature (148)..(148): n is a, c, g, or t
  misc_feature (227)..(228): n is a, c, g, or t
  misc_feature (230)..(230): n is a, c, g, or t
  misc_feature (236)..(239): n is a, c, g, or t
  misc_feature (256)..(256): n is a, c, g, or t
  misc_feature (258)..(258): n is a, c, g, or t
  misc_feature (260)..(260): n is a, c, g, or t
  misc_feature (276)..(276): n is a, c, g, or t
  misc_feature (278)..(278): n is a, c, g, or t
  misc_feature (282)..(282): n is a, c, g, or t
  misc_feature (284)..(287): n is a, c, g, or t
  misc_feature (289)..(289): n is a, c, g, or t
  misc_feature (292)..(292): n is a, c, g, or t
  misc_feature (298)..(298): n is a, c, g, or t
  misc_feature (301)..(302): n is a, c, g, or t
  misc_feature (304)..(305): n is a, c, g, or t
  misc_feature (307)..(308): n is a, c, g, or t
  misc_feature (313)..(313): n is a, c, g, or t
  misc_feature (317)..(317): n is a, c, g, or t
  misc_feature (319)..(319): n is a, c, g, or t
  misc_feature (322)..(322): n is a, c, g, or t
  misc_feature (372)..(372): n is a, c, g, or t
  misc_feature (376)..(376): n is a, c, g, or t
  misc_feature (381)..(381): n is a, c, g, or t
  misc_feature (423)..(423): n is a, c, g, or t
agaaaganaaaacacataaatttcatatggtatgaccatatttaatcaaatgataatttactggtgaaatttaaattattaaatttatgcatggtttctcatgcatggtttatataaataaacnccttaaacagtataaacatttganaaactttactttccttggttttttataagtttagtggtctccaacccacaatgtcttaggaaataatttaacaataggnnancccttnnnnccatctatctctatgtnancncaaacatatacctgtnantggngnnnngnagntacatnganngnngnngcgtncccngnggngaacatttctggctttaataaattgattagctttttaaatcagtcaaganagtnaagancttttaaataaatccccttattcattcattgtactgcaatcnaacacaataaaatgggagtcata

SEQ ID NO: 697717 - DNA, 216 bp, Homo sapiens
gtggcagtcacagatttgagcttgaatgtcgggcgacgacgcgatgtgggcagtgaggggcgcaatgatctaggcataaatacgagaaggtagcggtaagtaacactgtacttagaatatagtagatgcgaataaagcgtgatatcgacggcgcagatttgcatgatgatcatgcaatggatccatatatagggccgggtaaaataacctcaggtc

SEQ ID NO: 697718 - DNA, 350 bp, Homo sapiens
  misc_feature (13)..(13): n is a, c, g, or t
  misc_feature (154)..(154): n is a, c, g, or t
  misc_feature (343)..(343): n is a, c, g, or t
  misc_feature (349)..(349): n is a, c, g, or t
tttcggcacggangtatacctgccacctcagcctcccaagtagctgagaccacaggcacacatcactacacctggctaattttttgtatttttggtagagacgaagttcaccatgttgtccaggctggtcttgaactcctgagctcaggcgatnctaccctccttggcctcccaaagtgctgagattacaggtgtgagccaccccgcccggctgtagtttttcatattatttgtataatagggttagggttccagcctggggtggacagaggcaaggctcttattcttcaaacaaacaaacaaacaaacaaacaaaaaacctttgggaggaaaattgggggantttgcnt

SEQ ID NO: 697719 - DNA, 365 bp, Homo sapiens
gtcaagtatctggctgagctctagggatctacaaggacttgggctcctggtcccatctgcagggtatactacaggtaaatcgatgccataatatacattgagaagaaccttctgcagcatgaaggtggttggttaccttatctaatacagcactacacgtaggctgcactgaatgactttctttgaattccttgccatacagagtcactacaatgctatatatgcacactgagatctaagacagatacccaatggactggagtcttgcctgtaccctcagactactgtttgacaccgatggataaatccagtggctgctggtagaacacactgctaaaaagcagactagctgtccacgtccataa

SEQ ID NO: 697720 - DNA, 412 bp, Homo sapiens
aattcatcatctctctcactagggttactataataaccaactaagtggtcagcatggtccagccaacctactttatccactagactatcttatggttatgttcttgtgacaaggtcttactctattacccaggctggaatgcagtggcataatcatagctcactgcagccttgacttcccaggctaagccatcctcctacctcagcctcccaagcaggtgggaccacacataggcaccaccatgcctggctaatttttgtatttatagtagagacaggaattcactatgttggccaagctggtctcgaactcctgacctcaggtgatccacccacctcagcctcccagactgctgagattacaggtgtaagccaccactcccggacaaccttcagcaacttcatctactgcc

SEQ ID NO: 697721 - DNA, 443 bp, Homo sapiens
atacaggatgcggaatataacactgtcactaagatcaaataatacaaaaaaaatcacatcatttaaatttgatgcatggcgaacaaagtggcttctttagaattattatgtacacaacttgcaaagctcaaaaagtaatagcacagagccataaatctgataaggcactttaaagatagcaatcaaacatatacaaatatcaaatacaaacactgttaaactgcaaaagcagtaaccacagaaataaatagggaaaaaatatgcattctttctaaacagtctttccctttctgaagtaaagtctttaaaaaaaaatcaaacaagtacaaaaaatatttatcatatatttttaaaacctatcatcaaagtccaaatctctgtaaaaaaagaatgtttttcttcaagtcaaaaaagttcagattcatacatttcctagaaaaaca

SEQ ID NO: 697722 - DNA, 200 bp, Homo sapiens
atgttggaaacacggcgagggaaagttggcccgaattcaaagacttggattggcggctatggttttgcctttttttttcccccagtttgtggttcaaaacgggggggcgggggaggggaaaaaaaccacccgtttccgaattgaaaaggccagggccggtttttaaaattaaggaaaaaagatggtttttttagggggga

SEQ ID NO: 697723 - DNA, 267 bp, Homo sapiens
gtatgctctagaggaccccgcctcattttattctgtgatccaccacgcccgggtgagacagacatttcttaatgttaataatggacaagaccattttggatatgcagtaaacgacgcgagtatacaagagtaacggcaccagctgcacaacatagcaagaccctgtcccccgcctccagaaaaaaaaaaaaggttaactgataaaggctaccttacttgggctagacaggaagagatctcccagggaagacccctgtaaactgagcc

SEQ ID NO: 697724 - DNA, 865 bp, Homo sapiens
  misc_feature (487)..(487): n is a, c, g, or t
agcggggtgtagcgcccttcatgacggaaggccgctgcacccgaggggctcctccaggcacccatgcgcagaatcccactcagccagtcaagtctaagagcactggcgggccatccccgtccagtcgggcatcgcatccgatgcgtgcacccatcagatctacttaccggcagccgaccatgagcttccactatccaagcaacacgcgtccgtgcagcattaccgcagtgccccgtggacatcctattcctccatcactcctctaggtcatccgcacatagggctagacccagaggttcgacttcgtgtgtgtgccaggtctattctttatttgaccggagatatgtacacagcggactacccacggtattcagtggggctccaccagagcaggtttgggcgaagttccctgttacgcatgttcatccatacgagaccacacattcacactcgtgcgtcttgccaaggccagaccttagaacactgncgtatagcttgggcacatagcgtctccagggggatcggccccacctgaagtgcaaacggcaggtcgcaggccagcgggttcaaggtcccaaggacgacggaagcacaaagcgcgccgttcgtgctccccctctgtggtgctctgaacccgttgaaaggccggtgataaccacatcctcagtaaccccctatcgggtcaattccgacgaagagtggcttggtgtaccagtccaaagagggcccacaaaacgtggcaagagagtttgcggtgtaatttgggtgtccagagaatcccgggagtggggaattattctttggaacccctaaccgagtggggccgttggggaaaggaagtaagcggtgggatgagttccccacg

SEQ ID NO: 697725 - DNA, 166 bp, Homo sapiens
gaagaaagaaattcagagctcgaccacaaagtcttcaatttgacccaatccaaccaagcacaaagagaaccacataggagaatatgaacacagcctccaaaaactctgggattatgttaaatgaccaacctaggattatttggcattgctgaggaggaggagaatt

SEQ ID NO: 697726 - DNA, 180 bp, Homo sapiens
ccttgcgcaacctgcggaaatcatcgcgtcagcgactatgtgcagacagcatgtgggttagacgcaattattatatttgcgccaggcacagcacgtcgtgctgagagcattgccgcttgttctcagtgcgatgtgtctgtgcctgggcggccaattattcttattggcgttaacggggtt

SEQ ID NO: 697727 - DNA, 265 bp, Homo sapiens
  misc_feature (156)..(156): n is a, c, g, or t
cgtgcaggcagggggaccatgtccctgcgcacacccggtccacagtgtgatcacacacatgcagacgcttggtcctggtttcccttgctgaatagaaacacaatcccaatggtaagttccacactgggacgatgggctgtgggacatgtgtgccancctgtcaccagtgagtctcgtgcgctgtgggcctgcctgtctgcggtcctggaagccctgtctgatgcgtgaggagaccctgcgaggccccgctgccatggactatcac

SEQ ID NO: 697728 - DNA, 474 bp, Homo sapiens
agaccacacgaaggagaaggggggtaagaaggaggtctctgtaccatggctcgtacaaagcagactgcccgcagggtcgccgaggggaaagcacaaagaaagcaactggctacaaaagccgctcgcaagagtgcgccctctactggaggggtgaagaaacctcatcgttacaggcctgttactgtggcgctccgtgaaattagacgttatcagaagtcactgaacttctgattcgcaaacttcccttccagcgtctggtgcgagaaattgctcaggactttaaaacagatctgcgcttccagagcgcagctatcggtgctttgcaggaggcaagtgaggcctatctggttggcctttttgaagacaccaacctgtgtgctatccatgccaaacgtgtaacaattatgccaaaagacatccagctagcacgccgcatacgtggagaacgtgcttaagaatccactatgatgggaa

SEQ ID NO: 697729 - DNA, 120 bp, Homo sapiens
cgaaaggtaccagcacatcactatctctgtgtcctcctcctcctcctccttctatctcgttctcgttctcctattccttcttcttttcttctcattttccttcttcttcttcatcttttt

SEQ ID NO: 697730 - DNA, 138 bp, Homo sapiens
  misc_feature (19)..(19): n is a, c, g, or t
tatacttccgtgagcaggnctctcccttcatctgagataggacactcagtctataatcaggctccactgggaaagtttgaagacaggtctctgggaagtgcagaaatattttttaggtatagtttggagctgtgcttc

SEQ ID NO: 697731 - DNA, 214 bp, Homo sapiens
  misc_feature (79)..(79): n is a, c, g, or t
  misc_feature (168)..(168): n is a, c, g, or t
  misc_feature (209)..(209): n is a, c, g, or t
ctagaggatcccctcaacggcttatattctcatttcatttcccggtatgaagtataaagcgtggagaagtataaagcgntgagaaagtataaagcgtagagaagtataaagcgttgagaagtataaagcgttgacgaagtataacagcgttgacgaagtataaagcgnttgagaagtataaacgcgttgacggggtaccgacgctcganattcg

SEQ ID NO: 697732 - DNA, 329 bp, Homo sapiens
tcgagcctcggccctggtccagtcggctcatctgggtaggatttctggtaataaacagttattttttttagatggaattttgctgttgttgcccaggctggagtgcaacagcatgatcctggctcagtgcaagctccgcctcccaggttcaagcaattctcctgcctctgcctcccaagtagctgggattggcacatgccaccacacctggctaattttttgtatttttagtagagacaggctttcttgatgttggctaggctggtctagaactcctgaccttaggtgatctgcccaccttggcctcccaaagtgctgggattacaggc

SEQ ID NO: 697733 - DNA, 284 bp, Homo sapiens
cgcctcgggtgttttctaaagccacctccttctcggaattcttctcttgtgttaaggggttctccaatttgagggaccacttcactctttcttcaccccgccccacttagcccacctcgaggaggccccgcggaatgtcctaccacggaataagtttcactaagtgaccacggtggcaccttggctaaatatgaatattggctgaatattgtcacttaaatcacttttgtaccctgaacctgggttgtctataataaaactcggagccctttttgtgaaatcca

SEQ ID NO: 697734 - DNA, 103 bp, Homo sapiens
  misc_feature (55)..(55): n is a, c, g, or t
atttaccatatgagccccccaggagatcagcctggaccggtcacgccaccccacnccccagtcgaaagcctgctcaaccatctccttccacagtgcccctttt

SEQ ID NO: 697735 - DNA, 267 bp, Homo sapiens
cacacagcctgggcgacagagcgagacttcatctcaaaaaaaaaaaaaaaaaggggggaaggatttttctttcttttttgggaaaggccccgggagggcagaggttctgtataccaaaacaattttggaggcttaagggggacttaataaggttggggctaattaagggggaaaaaacaaaaaacaagggttcatcattgggaaaacatcaggttggtttggtaaagggaaaataaagtttttttaaaacacctgcaaccggggttg

SEQ ID NO: 697736 - DNA, 235 bp, Homo sapiens
gtgtgtagttgcagtagttgctgttgctcttctttcctcttttttttcttgagaccgagtcttgctctgtcgcccaggctggagtgcagtggcgcgacccggtcaccgcaacctccgcctcccgggctcaagcgattctcctgcctcagcctcctgagtagctgggattacaggtgcacaccaccacacctggctgatttatgtatttttttcgtagagacaaggtagagccgag

SEQ ID NO: 697737 - DNA, 501 bp, Homo sapiens
  misc_feature (14)..(14): n is a, c, g, or t
  misc_feature (63)..(63): n is a, c, g, or t
  misc_feature (66)..(67): n is a, c, g, or t
  misc_feature (81)..(81): n is a, c, g, or t
  misc_feature (97)..(97): n is a, c, g, or t
  misc_feature (103)..(103): n is a, c, g, or t
  misc_feature (105)..(106): n is a, c, g, or t
  misc_feature (118)..(119): n is a, c, g, or t
  misc_feature (123)..(124): n is a, c, g, or t
  misc_feature (133)..(133): n is a, c, g, or t
  misc_feature (135)..(135): n is a, c, g, or t
  misc_feature (148)..(149): n is a, c, g, or t
  misc_feature (153)..(154): n is a, c, g, or t
  misc_feature (158)..(158): n is a, c, g, or t
  misc_feature (167)..(167): n is a, c, g, or t
  misc_feature (173)..(174): n is a, c, g, or t
  misc_feature (187)..(187): n is a, c, g, or t
  misc_feature (203)..(203): n is a, c, g, or t
  misc_feature (220)..(221): n is a, c, g, or t
  misc_feature (225)..(225): n is a, c, g, or t
  misc_feature (259)..(259): n is a, c, g, or t
  misc_feature (299)..(299): n is a, c, g, or t
  misc_feature (343)..(343): n is a, c, g, or t
  misc_feature (377)..(378): n is a, c, g, or t
  misc_feature (390)..(391): n is a, c, g, or t
  misc_feature (432)..(432): n is a, c, g, or t
  misc_feature (436)..(436): n is a, c, g, or t
  misc_feature (482)..(482): n is a, c, g, or t
aagtatcttttttntttgtcaaattatactgtttccaaacattttggaaataaatagctggtnttnngtcggtcacttgcnctggttgacaagattngaacangnngtacacttttgnngttnnttttttttngngggggtttcaganngggnntggnttataaaangcaaanngggccaacgtccncaccaaattcttgatnaggaccaccaatgtcanngggngcaatatctacaataggtagtctcacagccttgngtgttcgatattcaaagactgttttgctccattccccagngtgtttcgtgcaaccatcctccagaactgtgtaggtgaatttgntatttccttcagccttgaattcaccttcatttgnncccatcagcttnngggccttctttacatttccactggcctgatccatgtatgcnatgntatttttgcagtgatatgtgatgttctgggaagctcggctggaganaagtcgaaggaatgccagc

SEQ ID NO: 697738 - DNA, 899 bp, Homo sapiens
tgctgttactggtctggaattttagggcattgcggcggctggcggtggtcgaaagcggagtgaaagagggagtgcagtggagcctgtgagagcctggaacctggagtctgcagcgtgcgtgagacccctgtgcgtgtgctgagagtggtgtgctggctgtgcccctgaactctgaccctgcgccgggggtgggccatggccggaggatcagctgacctggaccggcagatcgagcgagctgctgtcgctgacgagctcatcgactggagagcgaagtcaaggccctgtgcgctaagtgccagagagatcttggtagaggagagcaacgtgcagaggtgtggactcgcccagtcacagtgtgcggcgaacatccatggacaattctatgacctcaaagagcttgttcagagataggtggcgacgtccctgagaccaactacctcttcatgggggactttgtggaccgtggcttctatagcgtcgaaactgttcctccttgctgctggcacttaaggttcgctatcctgatcgcgtcacacatgatccggggcaaccatgagagtcgccagaatcacgcaggtctattggcttcatacgatgagtgcctgcgcaagtacgggctcggtgactgtgtggcggctacgtgcactgagatctttgactaccatcaggcctgtcaaggcatcagtcgatggcaagaatcttcctgcgttcacggggggccttctacccgcctccagtcgagaacccttgtatcagaatacggacgaatcgaagcggaaggcaagcaggtgcctcagatgatgcgcccatgatgtgaccgtacctcttggtctgacccagtaagaacaccacaggggctggggagttagacgccgaaggagccgggataactattg

SEQ ID NO: 697739 - DNA, 540 bp, Homo sapiens
  misc_feature (338)..(338): n is a, c, g, or t
ggaattgaagaaattcacagtttatgacccagtgacactgtgccttgtctcagtatcctatagtgtgtcatactctgttctgcacagaagttttgctcatcctattcctttgtttgcagaggtcccttccccatcccctatctctcaggcagactcctcatctcagtttatttacgacttcctcagggaaagccttccacacttccctgacggatgactttcccctgttgtgtgtgcccatagcaccatttacctacttcgtatacttgtgtggttattttatgtttatttgtgtgattctttgattggtgtctgtgctgccccaagatttaaaaaanctttcaattgacgacgcaacgcaaaacacacacacaacaacaacaacacccacaccacacacacccacaaacaaaccaaaccacgacacgagaacaataaaaaagaaaatcacaacacaacaacaagaaatcacagcagcccacaaccaccagcggccggcgccatcaggaccccgcacacaggcaacaacacacgagaacg

SEQ ID NO: 697740 - DNA, 116 bp, Homo sapiens
gctcggtaccttcctctcctcccacctcacagtggtttatgtgtccccctgtacatggtgccagcacctgcctccctgtactctgtcctctcccatctgtatagttatcctcttag

SEQ ID NO: 697741 - DNA, 577 bp, Homo sapiens
  misc_feature (137)..(137): n is a, c, g, or t
tatacaccataccaccgagattacgtcttcgtatcatgtctctattgatgaagacttcatttttcatcttcagccttctgacatatgtattttcagtttcttaatgtattcactttgaatgtccactgtcacctaanatgtaacatgcctaaaacataattttattttgaatttattattttaaaaaataaaccactggagaatttagacttaatggaaaagttgagaagacagcacacagagttcccatatgccttctcattttcccctattgttaatagcttactttatatagtgcaatctgtcacaactaaagaaccaacaatggtacacattttattcagattgtactaggtattttatgaggatgatggttaattttttgtgtcaacttcactgggccacacgcgtttcgccaaacattgttctgggtgggtctacggtgctgtttatggatgagattagcacttggacaggcagactagcaaagcagactgtccttcccaatgtgggtgggtcccattccatcagttgaaggtctgaatagaacaaaaaggctgaagctcccccaggactc

SEQ ID NO: 697742 - DNA, 175 bp, Homo sapiens
aatttggttctttggtatttatttagggtattttatgattcttttcatatttctactttctagttatgtgaattcattaacagagctaacttgggattatgtctatgaagctgggatctgtgcttgagaaggaaatcttctgccaatttggtgtttatatatgtagaaaaaaaaa

SEQ ID NO: 697743 - DNA, 784 bp, Homo sapiens
  misc_feature (315)..(315): n is a, c, g, or t
  misc_feature (719)..(719): n is a, c, g, or t
ccgttccgtctggcgcacctgaccacagcccctgtcccgagtcctggaccgctcgtcgtatgactgtagcggaccgccgatgttctcccggctggaccgatactccgctgccgggcgcccgccagaccctgctggcaagaatgcctgagctaccttccttggatcaatgagagcatttctaacgccttccaagaatgccaaactacagtcgaactggacacacatacagtgattatttccccggtatcgtctatgtagagttactccattgcctgtcgataccatcaaccatgagatcctcagctcaggagcagngcagacccatcactgtgtggactacctggtgctccattccacgccctagctatgccaatggcctctctcctctttccggatactcctcatctttggggcgagtgagtccccctcctccatctgacacctcctccaaggaccacagtggctcagaaagccccattagtgatgaagaggaaagactacagtccaagctttcagacccccatgccattgaagctgaacagtttcagtgcaatttatgccatatgacctattcaactttttctgggctggccaaacattagcagctgcactgcgatgcccagtctagaaaatctttcagctgtaaatactgtgacaaggaatatgtgagcctgggcgccctgaagatgcatattcggacccacacattaccttgtgtntgcaacgatctgcggcaaggcgttttccagaccctggttgcttcacggacacattagaactcaca

SEQ ID NO: 697744 - DNA, 976 bp, Homo sapiens
ggacctggttcggactggctggagcgcgggtgagagtctcgttccaagtttggatgagagagagaagagcgcctcagagcctcgtgtacccgcgagcggcgaggaggcggaaagaagtgacgcggcgtctgggagagcgaccaggcagacaagactgggtccgggcttccgacaggggggagtctgtgactgctgctctggtgacaggcagtgagctgccagaggtccgttgctgctcttgcgtcgtaacagagcaggagtccgaggcgggttgacagagtcgcgcgaagcgaccccgacgcgtatgatggcgagtacagagatgttgagggatacatgtggagggagcgtgtcaatcattgaagaatatacaaagtcgtgcaagaatgaattacactcctggtgtctactcttcatccctcggtgagattgatccggtgccttgtttcacgagtggggcccaagtctggaccttgtgcacgtcgggatatcccgtggatgttgacttatagcggcttgaattggaacatgattaagttgccctttcgcacggctttatgttagcatggggggacctcaatagccggtctgattagaaggcacgtatacctccattcgtggggttcggactgtcttccgaaagggaaggagttatgcgcccgaacttgcacttattgtccagcggagctcttggggttgcctctcgcgccaattatgtgtgaccaggtgcacaacagggggttgagcatttgccgctggcctctaatggatttccttgtaaacccagtggcttgctagttcgcccttgttgggcacttttaccacactggaaatacagtggagcgcgtagaaaggtgaacgccggtgggggcgcttgcaaatgcacgatctattcgtgcacactgtatccgggtagctatgtcgcgtccatccttgctgatgttgttgggtcccctgtactgtccaaaaatacaca

SEQ ID NO: 697745 - DNA, 333 bp, Homo sapiens
  misc_feature (7)..(7): n is a, c, g, or t
aaactanatcaaattacatataggaaccaaacaaaaagcccatatcgcccagacattcctaagcaacaagaataaaggtggaggcatcatgctacctaacttcaaactatactcacaaggctacagtaaccaaacagcatattaccggtaccaaaacagatgtatagtccaatggaactgaacagaggcctcagaaatactaccacacatctacaaacatctgatctttatcaaacctgacaaatacaagctatggggaaaggagtccctatataatcaatggtgttaggtctacctggccaggtagacctaacccaggtagaagtagaggtt

SEQ ID NO: 697746 - DNA, 684 bp, Homo sapiens
ctgggcgtgaggacagtgtacccatgggcagtggctgggttcagtgttctcacgctcagaggaagaaaatggcatgtggctgggttcagtgttctcactgctcagagtgaatgaaaaggcagtggtgaacacccgcctgactgccttacccatgatctaaacgacaccatcatcctcccccaaggaagacacatgccctgtgatgtgaacctaggatgggtgggaatggcttatgtcactcggtcattatgaggcagagcttgggcttggggttgcaggggcatcagccaatctgctctcaaggagacaaaaacttgggcgtaaaatggatacgggcagctggggctatgccaggcatgtctggaggtctggagatgacctggcagcacggatgcttctcccccgaacaacaccgaacacacactccttgacacttccaggtgatttatctacataactaagactgaacatccaagcagccattaatcaaggggaacaaaagattgggaaaacacaaagagagaagcacggccagcacagcgagcatgcatgaagcaaatccaacgcagaaggactggaaggacgggaacgaagcacgggcacaacagctgagcacccaacggaacacggcggagatgtcacatgtggcctgccaaggcccccaacacccaggccccatggggc

SEQ ID NO: 697747 - DNA, 210 bp, Homo sapiens
gttaggtaagctatattagggtgctagtccttccacgagacacatcaacaagttcatagggggtcgcctgtaaatagggtcctagtgactatgcctcttatttaggaggtcagtcttcgaatattattggaacaatgtacggtattcaggcctactccagaatcacatttattactatgtaccctatcctatttctagagtagactctat

SEQ ID NO: 697748 - DNA, 227 bp, Homo sapiens
tcggagaggccaaggtgcacttccttcggtcgtcccgaatccgggttaatccgaaacagccgcctcaccatgccgccgaggttcgaccccaccgagatcaaagtcggtatacctaggtgcaccgaggtaggtcggtgccacttctgccctggcccccagatcggccccctgggtctgtctccaaaaaagttgtgatgacattccaggcacgggtgactggagggcct

SEQ ID NO: 697749 - DNA, 146 bp, Homo sapiens
  misc_feature (87)..(88): n is a, c, g, or t
aaaaaggagaaaaaccggaagcgtaggaaccgaaagaagaagaaaaagccccagcggttccgaaggggtgtcctcttagagctcttnnggaccgggagaaagactcaacccgtttcccgtggctctgattccccagcagctgatgt

SEQ ID NO: 697750 - DNA, 337 bp, Homo sapiens
ctgatcctcatcaccctaaatttattatgcattaggaagctaacctaaaaacatagcatagtaaaagattgttatctctgtcatagcagaacaggtttcaaaatatattttcttttaaatgtattcagtcagtacacaatcctttataaaagttgtatatatttttttctgtcatataccttcattacattttataaattacaagaatttacacagtcaccccattcaagaaaaaaaaaaatttaaaaccctttcacaaattatctacattttttttcataccttttaaaacttttcaaagggggtgctcgtgtaaagaggtgggcccttagtttaa

SEQ ID NO: 697751 - DNA, 393 bp, Homo sapiens
ctgcgcggctcgagaagtgtctgaagcctgaaagaaaatttttttaataggaccaaagcatctaccatatttcaggaatggttaaggatgtaaaaaaaaaaaccccaaacggcctttggaggaaaacatgaaaccccagcccggggggattaattgggggatttatttcccagatgttccaggccccaacactaaagtctttggggggtttggcaggccacactaaagatgtggttaggggatgtccactgcacccacatcctttaaaaaaaaacgtagaaaaaggtctcagggctgagagttaatgttcctgagccttaagggtagaacccacagttttgggggctggtttcctttaggacaatcatttggggattttaaagcgtttttaaa

SEQ ID NO: 697752 - DNA, 2009 bp, Homo sapiens
ggcggccccagtcagacgcaggcagccccaaagcctgaacaggcagggccagacccagcttcttcgcctccgccagcggggaccccgagctagagccgcagcgggacctgcccggcccccggcgcccggcggccgccgccgcgatgtttccccgcgagaagacgtggaacatctcgttcgcgggctgcggcttcctcggcgtctactacgtcggcgtggcctcctgcctccgcgagcacgcgcccttcctggtggccaacgccacgcacatctacggcgcctcggccggggcgctcacggccacggcgctggtcaccggggtctgcctgggtgaggctggtgccaagttcattgaggtatctaaagaggcccggaagcggttcctgggccccctgcacccctccttcaacctggtaaagatcatccgcagtttcctgctgaaggtcctgcctgctgatagccatgagcatgccagtgggcgcctgggcatctccctgacccgcgtgtcagacggcgagaatgtcattatatcccacttcaactccaaggacgagctcatccaggccaatgtctgcagcggtttcatccccgtgtactgtgggctcatccctccctccctccagggggtgcgctacgtggatggtggcatttcagacaacctgccactctatgagcttaagaacaccatcacagtgtcccccttctcgggcgagagtgacatctgtccgcaggacagctccaccaacatccacgagctgcgggtcaccaacaccagcatccagttcaacctgcgcaacctctaccgcctctccaaggccctcttcccgccggagcccctggtgctgcgagagatgtgcaagcagggataccgggatggcctgcgctttctgcagcggaacggcctcctgaaccggcccaaccccttgctggcgttgccccccgcccgcccccacggcccagaggacaaggaccaggcagtggagagcgcccaagcggaggattactcgcagctgcccggagaagatcacatcctggagcacctgcccgcccggctcaatgaggccctgctggaggcctgcgtggagcccacggacctgctgaccaccctctccaacatgctgcctgtgcgtctggccacggccatgatggtgccctacacgctgccgctggagagcgctctgtccttcaccatccgcttgctggagtggctgcccgacgttcccgaggacatccggtggatgaaggagcagacgggcagcatctgccagtacctggtgatgcgcgccaagaggaagctgggcaggcacctgccctccaggctgccggagcaggtggagctgcgccgcgtccagtcgctgccgtccgtgccgctgtcctgcgccgcctacagagaggcactgcccggctggatgcgcaacaacctctcgctgggggacgcgctggccaagtgggaggagtgccagcgccagctgctgctcggcctcttctgcaccaacgtggccttcccgcccgaagctctgcgcatgcgcgcacccgccgacccggctcccgcccccgcggacccagcatccccgcagcaccagccggccgggcctgcccccttgctgagcacccctgctcccgaggcccggcccgtgatcggggccctggggctgtgagaccccgaccctctcgaggaaccctgcctgagacgcctccattaccactgcgcagtgagatgaggggactcacagttgccaagaggggtctttgccgtgggccccctcgccagccactcaccagctgcactgagaggggaggtttccacacccctcccctgggccgctgaggccccgcgcacctgtgccttaatcttccctcccctgtgctgcccgagcacctcccccgcccctttactcctgggaactttgcagctgcccttccctccccgtttttcatggcctgctgaaatatgtgtgtgaagaattatttattttcgccaaagcacatgtaataaatgctgcagccca

SEQ ID NO: 697753 - DNA, 2069 bp, Homo sapiens
ggcggccccagtcagacgcaggcagccccaaagcctgaacaggcagggccagacccagcttcttcgcctccgccagcggggaccccgagctagagccgcagcgggacctgcccggcccccggctccagcgagcgagcggcgagcaggcggctcacagaggcctggccgcccacggaacccggggcccggcggccgccgccgcgatgtttccccgcgagaagacgtggaacatctcgttcgcgggctgcggcttcctcggcgtctactacgtcggcgtggcctcctgcctccgcgagcacgcgcccttcctggtggccaacgccacgcacatctacggcgcctcggccggggcgctcacggccacggcgctggtcaccggggtctgcctgggtgaggctggtgccaagttcattgaggtatctaaagaggcccggaagcggttcctgggccccctgcacccctccttcaacctggtaaagatcatccgcagtttcctgctgaaggtcctgcctgctgatagccatgagcatgccagtgggcgcctgggcatctccctgacccgcgtgtcagacggcgagaatgtcattatatcccacttcaactccaaggacgagctcatccaggccaatgtctgcagcggtttcatccccgtgtactgtgggctcatccctccctccctccagggggtgcgctacgtggatggtggcatttcagacaacctgccactctatgagcttaagaacaccatcacagtgtcccccttctcgggcgagagtgacatctgtccgcaggacagctccaccaacatccacgagctgcgggtcaccaacaccagcatccagttcaacctgcgcaacctctaccgcctctccaaggccctcttcccgccggagcccctggtgctgcgagagatgtgcaagcagggataccgggatggcctgcgctttctgcagcggaacggcctcctgaaccggcccaaccccttgctggcgttgccccccgcccgcccccacggcccagaggacaaggaccaggcagtggagagcgcccaagcggaggattactcgcagctgcccggagaagatcacatcctggagcacctgcccgcccggctcaatgaggccctgctggaggcctgcgtggagcccacggacctgctgaccaccctctccaacatgctgcctgtgcgtctggccacggccatgatggtgccctacacgctgccgctggagagcgctctgtccttcaccatccgcttgctggagtggctgcccgacgttcccgaggacatccggtggatgaaggagcagacgggcagcatctgccagtacctggtgatgcgcgccaagaggaagctgggcaggcacctgccctccaggctgccggagcaggtggagctgcgccgcgtccagtcgctgccgtccgtgccgctgtcctgcgccgcctacagagaggcactgcccggctggatgcgcaacaacctctcgctgggggacgcgctggccaagtgggaggagtgccagcgccagctgctgctcggcctcttctgcaccaacgtggccttcccgcccgaagctctgcgcatgcgcgcacccgccgacccggctcccgcccccgcggacccagcatccccgcagcaccagccggccgggcctgcccccttgctgagcacccctgctcccgaggcccggcccgtgatcggggccctggggctgtgagaccccgaccctctcgaggaaccctgcctgagacgcctccattaccactgcgcagtgagatgaggggactcacagttgccaagaggggtctttgccgtgggccccctcgccagccactcaccagctgcactgagaggggaggtttccacacccctcccctgggccgctgaggccccgcgcacctgtgccttaatcttccctcccctgtgctgcccgagcacctcccccgcccctttactcctgggaactttgcagctgcccttccctccccgtttttcatggcctgctgaaatatgtgtgtgaagaattatttattttcgccaaagcacatgtaataaatgctgcagccca

SEQ ID NO: 697754 - DNA, 2367 bp, Homo sapiens
ggcggccccagtcagacgcaggcagccccaaagcctgaacaggcagggccagacccagcttcttcgcctccgccagcggggaccccgagctagagccgcagcgggacctgcccggcccccggcgcccggcggccgccgccgcgatgtttccccgcgagaagacgtggaacatctcgttcgcgggctgcggcttcctcggcgtctactacgtcggcgtggcctcctgcctccgcgagcacgcgcccttcctggtggccaacgccacgcacatctacggcgcctcggccggggcgctcacggccacggcgctggtcaccggggtctgcctgggtgaggctggtgccaagttcattgaggtatctaaagaggcccggaagcggttcctgggccccctgcacccctccttcaacctggtaaagatcatccgcagtttcctgctgaaggtcctgcctgctgatagccatgagcatgccagtgggcgcctgggcatctccctgacccgcgtgtcagacggcgagaatgtcattatatcccacttcaactccaaggacgagctcatccaggccaatgtctgcagcggtttcatccccgtgtactgtgggctcatccctccctccctccagggggtgcgctacgtggatggtggcatttcagacaacctgccactctatgagcttaagaacaccatcacagtgtcccccttctcgggcgagagtgacatctgtccgcaggacagctccaccaacatccacgagctgcgggtcaccaacaccagcatccagttcaacctgcgcaacctctaccgcctctccaaggccctcttcccgccggagcccctggtgctgcgagagatgtgcaagcagggataccgggatggcctgcgctttctgcagcggaacggcctcctgaaccggcccaaccccttgctggcgttgccccccgcccgcccccacggcccagaggacaaggaccaggcagtggagagcgcccaagcggaggattactcgcagctgcccggagaagatcacatcctggagcacctgcccgcccggctcaatgaggccctgctggaggcctgcgtggagcccacggacctgctgaccaccctctccaacatgctgcctgtgcgtctggccacggccatgatggtgccctacacgctgccgctggagagcgctctgtccttcaccatccgcttgctggagtggctgcccgacgttcccgaggacatccggtggatgaaggagcagacgggcagcatctgccagtacctggtgatgcgcgccaagaggaagctgggcaggcacctgccctccaggctgccggagcaggtggagctgcgccgcgtccagtcgctgccgtccgtgccgctgtcctgcgccgcctacagagaggcactgcccggctggatgcgcaacaacctctcgctgggggacgcgctggccaagtgggaggagtgccagcgccagctgctgctcggcctcttctgcaccaacgtggccttcccgcccgaagctctgcgcatgcgcgcacccgccgacccggctcccgcccccgcggacccagcatccccgcagcaccagccggccgggcctgcccccttgctgagcacccctgctcccgaggcccggcccgtgatcggggccctggggctgtgagaccccgaccctctcgaggaaccctgcctgagacgcctccattaccactgcgcagtgagatgaggggactcacagttgccaagaggggtctttgccgtgggccccctcgccagccactcaccagctgcactgagaggggaggtttccacacccctcccctgggccgctgaggccccgcgcacctgtgccttaatcttccctcccctgtgctgcccgagcacctcccccgcccctttactcctgggaactttgcagctgcccttccctccccgtttttcatggcctgctgaaatatgtgtgtgaagaattatttattttcgccaaagcacatgtaataaatgctgcagcccagcctctgcccactttgtgtgtatgtgaccgcctgcttacttgcagtgagagcctggtggccagggtctggccctaccttggctgaccagcctctccacagctgcaggccaggtctcccagcgtcgcactcctgggcctggcatttggaacctgccaggctggcctgggaacacccccctacaggcacatatgaacgtactgcattcctgccgacccccctgtctaggatgcatccacaccccccccaattttgcccagcagcctcctggctgacccttggccacagccttctgagggccaatggaaatatttgggaccaagattcttggtaaataaaaacgaaaatgtttgcaaaagg

SEQ ID NO: 697755 - DNA, 825 bp, Homo sapiens
  misc_feature (324)..(324): n is a, c, g, or t
  misc_feature (378)..(378): n is a, c, g, or t
  misc_feature (394)..(394): n is a, c, g, or t
  misc_feature (468)..(468): n is a, c, g, or t
tcccgagtttttcttttaggttctttgccgcaacattcttttcctatgaggtttcccaaaccctcggttatacacagtggtgaggtcccaccaaagcaaaaagaaatttttttgcccacttgaaaaaatggccacgtcggaatttttagatatgttacgcacccacgccccatccgcaatgcccgtgttaagagggcccaataaatgaccttttctctgaggttctaaaatgtttaatcatgtctatttgaagcgacccaaaatcggcccttgaaccctggcttagcgaaaaaatttcttaagtataaacttccacatggaccntggttgttcggcggtccaataagcaaatgtggtccgaagagtttctattgcgtnacacatgtcttctcangaatgatgtgccaatgcatgttaatgaagaatgtatcaagtctctcacctgaaagccatgcgaatatagtatanactctcgcaatacatggttattgtccagaacagtataactcttccacttttctaaaagcttcgaagacatggattagtgcttgtatctactgacaattaagtagtcagatatggctcgttagtcccttgagggatcctacacatgtggaatgccacattaatagaggcgttctgaagagcaagaatatgtctctctttctctgatcatgtacaaaggctgtgttgctcttcataagatattattgcgctatgacatgttaccaccgtggcactatgtctcggccatatgtttatgcattgaaaataaatttttcccgattaaatatgttaatgcttacataaattattaaaaattat

SEQ ID NO: 697756 - DNA, 2327 bp, Homo sapiens
  misc_feature (2013)..(2013): n is a, c, g, or t
ggcggccccagtcagacgcaggcagccccaaagcctgaacaggcagggccagacccagcttcttcgcctccgccagcggggaccccgagctagagccgcagcgggacctgcccggcccccggcgcccggcggccgccgccgcgatgtttccccgcgagaagacgtggaacatctcgttcgcgggctgcggcttcctcggcgtctactacgtcggcgtggcctcctgcctccgcgagcacgcgcccttcctggtggccaacgccacgcacatctacggcgcctcggccggggcgctcacggccacggcgctggtcaccggggtctgcctgggtgaggctggtgccaagttcattgaggtatctaaagaggcccggaagcggttcctgggccccctgcacccctccttcaacctggtaaagatcatccgcagtttcctgctgaaggtcctgcctgctgatagccatgagcatgccagtgggcgcctgggcatctccctgacccgcgtgtcagacggcgagaatgtcattatatcccacttcaactccaaggacgagctcatccaggccaatgtctgcagcggtttcatccccgtgtactgtgggctcatccctccctccctccagggggtgcgctacgtggatggtggcatttcagacaacctgccactctatgagcttaagaacaccatcacagtgtcccccttctcgggcgagagtgacatctgtccgcaggacagctccaccaacatccacgagctgcgggtcaccaacaccagcatccagttcaacctgcgcaacctctaccgcctctccaaggccctcttcccgccggagcccctggtgctgcgagagatgtgcaagcagggataccgggatggcctgcgctttctgcagcggaacggcctcctgaaccggcccaaccccttgctggcgttgccccccgcccgcccccacggcccagaggacaaggaccaggcagtggagagcgcccaagcggaggattactcgcagctgcccggagaagatcacatcctggagcacctgcccgcccggctcaatgaggccctgctggaggcctgcgtggagcccacggacctgctgaccaccctctccaacatgctgcctgtgcgtctggccacggccatgatggtgccctacacgctgccgctggagagcgctctgtccttcaccatccgcttgctggagtggctgcccgacgttcccgaggacatccggtggatgaaggagcagacgggcagcatctgccagtacctggtgatgcgcgccaagaggaagctgggcaggcacctgccctccaggctgccggagcaggtggagctgcgccgcgtccagtcgctgccgtccgtgccgctgtcctgcgccgcctacagagaggcactgcccggctggatgcgcaacaacctctcgctgggggacgcgctggccaagtgggaggagtgccagcgccagctgctgctcggcctcttctgcaccaacgtggccttcccgcccgaagctctgcgcatgcgcgcacccgccgacccggctcccgcccccgcggacccagcatccccgcagcaccagccggccgggcctgcccccttgctgagcacccctgctcccgaggcccggcccgtgatcggggccctggggctgtgagaccccgaccctctcgaggaaccctgcctgagacgcctccattaccactgcgcagtgagatgaggggactcacagttgccaagaggggtctttgccgtgggccccctcgccagccactcaccagctgcactgagaggggaggtttccacacccctcccctgggccgctgaggccccgcgcacctgtgccttaatcttccctcccctgtgctgcccgagcacctcccccgcccctttactcctgggaactttgcagctgcccttccctccccgtttttcatggcctgctgaaatatgtgtgtgaagaattatttattttcgccaaagcacatgtaataaatgctgcagcccaaaanaataaaaaaaataaatttaaaaaaaaaatatatctcaacgggatctgtaagctttttatatatttctaatccactgtaacagtaagacatcagaaccagctgttattctcaaataaatcgaagaataatcccaacactgaggatgcttctttacactaaagtcacaacatatgctttttgatcatttgctacaaagattggcgataccctcctttaaacattgtgaaagtatgcccaacaaagttaccgcggataatgtcaaacacaagtgagcttcttcttccaaagtaatccaaatagatctgagacttttt

SEQ ID NO: 697757 - DNA, 3679 bp, Homo sapiens
  misc_feature (799)..(799): n is a, c, g, or t
  misc_feature (1186)..(1186): n is a, c, g, or t
  misc_feature (1738)..(1738): n is a, c, g, or t
  misc_feature (1784)..(1784): n is a, c, g, or t
ggcggccccagtcagacgcaggcagccccaaagcctgaacaggcagggccagacccagcttcttcgcctccgccagcggggaccccgagctagagccgcagcgggacctgcccggcccccggctccagcgagcgagcggcgagcaggcggctcacagaggcctggccgcccacggaacccggggcccggcggccgccgccgcgatgtttccccgcgagaagacgtggaacatctcgttcgcgggctgcggcttcctcggcgtctactacgtcggcgtggcctcctgcctccgcgagcacgcgcccttcctggtggccaacgccacgcacatctacggcgcctcggccggggcgctcacggccacggcgctggtcaccggggtctgcctgggtgagcggggccgggggcggcaggcggggggctggcgggaaggccgtgcggggccgggggatggtctccgtgagcggaggggccccgcggcgagtcggtgggtaccgtggggagggttccggtccgcgcctggggaacccggcgaggatccaatccgggtcgctggcctgggggcggggcctggtttgttttgctccgagggtgcccggggcccgcctgtcgggcgcaaaggtttgggggcgggcaggtgcagcaaaagctgcttaattggacagaaaaagtaactcgtgggcgggaccgtgagaatccgaggagggacctaagtcaccccgtggccctggatattacaaccggtgccagcggtcggtcacagtgtcctgggcttcgcagttgcaggctgctatcaggnggcctggcatggggtagcctcttgagaggcgtctgggaaccgtgacctggtccttcccaagggcccggaggaggagccccgctgaggtcagggctgggcgcgaaggggctctcctgccctctccttgcacacggtgccctgtggcctggctccccgctgcggcccaccgcgtttgcacacttcatgggtgagggtgcttctgggctctggtgcctgggtcaggagtggatgggtctctgtgtgctgggctggcctcggctcgcaccatcggctgccatgagggagtgatgtttacagcacacgacttcaggagcctgtgaggacacccaagatgacaggggcactctgctcagcaggagcctgtccggggctcacccctgccctctncctctcatggaggccttcagacaagcgcctcagtcggccccctggcttcaagatacatcaaggtccctgctacccgagccaaggacacctctcccacagtgcttccccaccctgctcccaacaagactccttctcacgggtggtcttgcacagctggagcccatagtgcagcaggtgctggctgaagagcccctggctccacactgccccactcctgaccagggtgatgcactggaggagggcttggacctcagctcctccctcagtgctcccgaccacttccaggactatccccaagctggccagcactcctgcgccccaagaggagtgtttggggtgcttcctcttggctgcagtgggacacaggtgtgccttcctaggaactgggccctgactacttccagcccaacactcccgggcctgtgaactgtgacctgtgtgccgggatgggttttgtgggtctgccccatccccgcactgctggatctggccaagtgggtgaaggctaaggccggtcagagttgagtttctgccttgtcccctctcctgggntagatgccacaccaggcccagtgactcatagggcaggcagttggantcaggcagagggcaggtcctggtctcagctggccagcctctgctgtctgccatcccaggggaggtggccaaagtcccaactgtgagccaggccccacattcactgggcctcctccagggtctgtatgccatggaaccctggacatggggctatgaaggaaggtgggtgttgctaagcccaggagcatgggcccctaaccttggccctgtgccccaggtgaggctggtgccaagttcattgaggtatctaaagaggcccggaagcggttcctgggccccctgcacccctccttcaacctggtaaagatcatccgcagtttcctgctgaaggtcctgcctgctgatagccatgagcatgccagtgggcgcctgggcatctccctgacccgcgtgtcagacggcgagaatgtcattatatcccacttcaactccaaggacgagctcatccaggccaatgtctgcagcggtttcatccccgtgtactgtgggctcatccctccctccctccagggggtgcgctacgtggatggtggcatttcagacaacctgccactctatgagcttaagaacaccatcacagtgtcccccttctcgggcgagagtgacatctgtccgcaggacagctccaccaacatccacgagctgcgggtcaccaacaccagcatccagttcaacctgcgcaacctctaccgcctctccaaggccctcttcccgccggagcccctggtgctgcgagagatgtgcaagcagggataccgggatggcctgcgctttctgcagcggaacggcctcctgaaccggcccaaccccttgctggcgttgccccccgcccgcccccacggcccagaggacaaggaccaggcagtggagagcgcccaagcggaggattactcgcagctgcccggagaagatcacatcctggagcacctgcccgcccggctcaatgaggccctgctggaggcctgcgtggagcccacggacctgctgaccaccctctccaacatgctgcctgtgcgtctggccacggccatgatggtgccctacacgctgccgctggagagcgctctgtccttcaccatccgcttgctggagtggctgcccgacgttcccgaggacatccggtggatgaaggagcagacgggcagcatctgccagtacctggtgatgcgcgccaagaggaagctgggcaggcacctgccctccaggctgccggagcaggtggagctgcgccgcgtccagtcgctgccgtccgtgccgctgtcctgcgccgcctacagagaggcactgcccggctggatgcgcaacaacctctcgctgggggacgcgctggccaagtgggaggagtgccagcgccagctgctgctcggcctcttctgcaccaacgtggccttcccgcccgaagctctgcgcatgcgcgcacccgccgacccggctcccgcccccgcggacccagcatccccgcagcaccagccggccgggcctgcccccttgctgagcacccctgctcccgaggcccggcccgtgatcggggccctggggctgtgagaccccgaccctctcgaggaaccctgcctgagacgcctccattaccactgcgcagtgagatgaggggactcacagttgccaagaggggtctttgccgtgggccccctcgccagccactcaccagctgcactgagaggggaggtttccacacccctcccctgggccgctgaggccccgcgcacctgtgccttaatcttccctcccctgtgctgcccgagcacctcccccgcccctttactcctgggaactttgcagctgcccttccctccccgtttttcatggcctgctgaaatatgtgtgtgaagaattatttattttcgccaaagcacatgtaataaatgctgcagccca

SEQ ID NO: 697758 - DNA, 2211 bp, Homo sapiens
ggcggccccagtcagacgcaggcagccccaaagcctgaacaggcagggccagacccagcttcttcgcctccgccagcggggaccccgagctagagccgcagcgggacctgcccggcccccggctccagcgagcgagcggcgagcaggcggctcacagaggcctggccgcccacggaacccggggcccggcggccgccgccgcgatgtttccccgcgagaagacgtggaacatctcgttcgcgggctgcggcttcctcggcgtctactacgtcggcgtggcctcctgcctccgcgagcacgcgcccttcctggtggccaacgccacgcacatctacggcgcctcggccggggcgctcacggccacggcgctggtcaccggggtctgcctgggtgaggctggtgccaagttcattgaggtatctaaagaggcccggaagcggttcctgggccccctgcacccctccttcaacctggtaaagatcatccgcagtttcctgctgaaggtcctgcctgctgatagccatgagcatgccagtgggcgcctgggcatctccctgacccgcgtgtcagacggcgagaatgtcattatatcccacttcaactccaaggacgagctcatccaggccaatgtctgcagcggtttcatccccgtgtactgtgggctcatccctccctccctccagggggtgcgctacgtggatggtggcatttcagacaacctgccactctatgagcttaagaacaccatcacagtgtcccccttctcgggcgagagtgacatctgtccgcaggacagctccaccaacatccacgagctgcgggtcaccaacaccagcatccagttcaacctgcgcaacctctaccgcctctccaaggccctcttcccgccggagcccctggtgctgcgagagatgtgcaagcagggataccgggatggcctgcgctttctgcagcggaacggcctcctgaaccggcccaaccccttgctggcgttgccccccgcccgcccccacggcccagaggacaaggaccaggcagtggagagcgcccaagcggaggattactcgcagctgcccggagaagatcacatcctggagcacctgcccgcccggctcaatgagggtgcgcacctgggggacgggaggggaggaggggaggcaggagggaaagagagagaggagaggacggtgagcaggggagggaagccgagcgggtcctgggccccgctgcctccactggccgccgacctcccgcccacccgcagccctgctggaggcctgcgtggagcccacggacctgctgaccaccctctccaacatgctgcctgtgcgtctggccacggccatgatggtgccctacacgctgccgctggagagcgctctgtccttcaccatccgcttgctggagtggctgcccgacgttcccgaggacatccggtggatgaaggagcagacgggcagcatctgccagtacctggtgatgcgcgccaagaggaagctgggcaggcacctgccctccaggctgccggagcaggtggagctgcgccgcgtccagtcgctgccgtccgtgccgctgtcctgcgccgcctacagagaggcactgcccggctggatgcgcaacaacctctcgctgggggacgcgctggccaagtgggaggagtgccagcgccagctgctgctcggcctcttctgcaccaacgtggccttcccgcccgaagctctgcgcatgcgcgcacccgccgacccggctcccgcccccgcggacccagcatccccgcagcaccagccggccgggcctgcccccttgctgagcacccctgctcccgaggcccggcccgtgatcggggccctggggctgtgagaccccgaccctctcgaggaaccctgcctgagacgcctccattaccactgcgcagtgagatgaggggactcacagttgccaagaggggtctttgccgtgggccccctcgccagccactcaccagctgcactgagaggggaggtttccacacccctcccctgggccgctgaggccccgcgcacctgtgccttaatcttccctcccctgtgctgcccgagcacctcccccgcccctttactcctgggaactttgcagctgcccttccctccccgtttttcatggcctgctgaaatatgtgtgtgaagaattatttattttcgccaaagcacatgtaataaatgctgcagccca

SEQ ID NO: 697759 - DNA, 711 bp, Homo sapiens
gccaagagatacatgaaatctacatatgaacaggtggacctgatgggtaaaaagagactcagaaaacggcaataactgtggagcatctggctattaagtgccactggactcagagggcagcagatattggggatgtcatccgagtatatagtggtcatcaaggacgcactatcatcttttgtgaaaccagagaaagatagcccaggagctgtcccagaattcagctcataaagcaggatgctcagtccttgcatggagacattccacagaagcgaaagggaaatcaccctgaaaggtcttagaaatggtagtgttggatgttgtgggtggataaacaatgttcgtcgtgcacagtgggttagacatccctgaggttgattggaggttatacacagagctctccatcgaaaggatgtaaagtcattacattcatcgatccgggcggacaggcagagctggaaggacgggggtgtgcatctgcgttttatcagcacaaggaagaatatcaagttacgtacaagtggagcacaaacagcgcggaattaagttcgaaccgagataaggtgtacctctctggcaggaggaatatacctaagcgcttccagacgggagatggcatcaggctttgggcattccgagcctcccagtggcatgagtcacttgaaacgaatcagcatgataagctgatagaggagaaggggggctgcggaa

SEQ ID NO: 697760 - DNA, 2443 bp, Homo sapiens
  misc_feature (813)..(813): n is a, c, g, or t
  misc_feature (847)..(847): n is a, c, g, or t
  misc_feature (855)..(855): n is a, c, g, or t
ggcggccccagtcagacgcaggcagccccaaagcctgaacaggcagggccagacccagcttcttcgcctccgccagcggggaccccgagctagagccgcagcgggacctgcccggcccccggctccagcgagcgagcggcgagcaggcggctcacagaggcctggccgcccacggaacccggggcccggcggccgccgccgcgatgtttccccgcgagaagacgtggaacatctcgttcgcgggctgcggcttcctcggcgtctactacgtcggcgtggcctcctgcctccgcgagcacgcgcccttcctggtggccaacgccacgcacatctacggcgcctcggccggggcgctcacggccacggcgctggtcaccggggtctgcctgggtgaggctggtgccaagttcattgaggtatctaaagaggcccggaagcggttcctgggccccctgcacccctccttcaacctggtaaagatcatccgcagtttcctgctgaaggtcctgcctgctgatagccatgagcatgccagtgggcgcctgggcatctccctgacccgcgtgtcagacggcgagaatgtcattatatcccacttcaactccaaggacgagctcatccaggccaatgtctgcagcggtttcatccccgtgtactgtgggctcatccctccctccctccagggggtggtgagtattcctagccctggacaccttctatggggtgggccgtgggatgagggacagaggaggaggccgcctagagccatccttcaggcccttgctctgccaccgcctgttacccacttccccntgtgttactcaaaaacagctgtggcaacgcacgnttcctggncccccattcccttcctccgtccctgccttcccccgtctaccatctgctcagtgcccaggctggcccacagccagtgcccagtgggtaaaacgctcaaatgaggtagccactgaatggggcccttggtggccgggtggggtggctggggtgggtggccagtgcagccacaggccctcacatacggtcctgtctgtgtgtcccgtggaagcgctacgtggatggtggcatttcagacaacctgccactctatgagcttaagaacaccatcacagtgtcccccttctcgggcgagagtgacatctgtccgcaggacagctccaccaacatccacgagctgcgggtcaccaacaccagcatccagttcaacctgcgcaacctctaccgcctctccaaggccctcttcccgccggagcccctggtgctgcgagagatgtgcaagcagggataccgggatggcctgcgctttctgcagcggaacggcctcctgaaccggcccaaccccttgctggcgttgccccccgcccgcccccacggcccagaggacaaggaccaggcagtggagagcgcccaagcggaggattactcgcagctgcccggagaagatcacatcctggagcacctgcccgcccggctcaatgaggccctgctggaggcctgcgtggagcccacggacctgctgaccaccctctccaacatgctgcctgtgcgtctggccacggccatgatggtgccctacacgctgccgctggagagcgctctgtccttcaccatccgcttgctggagtggctgcccgacgttcccgaggacatccggtggatgaaggagcagacgggcagcatctgccagtacctggtgatgcgcgccaagaggaagctgggcaggcacctgccctccaggctgccggagcaggtggagctgcgccgcgtccagtcgctgccgtccgtgccgctgtcctgcgccgcctacagagaggcactgcccggctggatgcgcaacaacctctcgctgggggacgcgctggccaagtgggaggagtgccagcgccagctgctgctcggcctcttctgcaccaacgtggccttcccgcccgaagctctgcgcatgcgcgcacccgccgacccggctcccgcccccgcggacccagcatccccgcagcaccagccggccgggcctgcccccttgctgagcacccctgctcccgaggcccggcccgtgatcggggccctggggctgtgagaccccgaccctctcgaggaaccctgcctgagacgcctccattaccactgcgcagtgagatgaggggactcacagttgccaagaggggtctttgccgtgggccccctcgccagccactcaccagctgcactgagaggggaggtttccacacccctcccctgggccgctgaggccccgcgcacctgtgccttaatcttccctcccctgtgctgcccgagcacctcccccgcccctttactcctgggaactttgcagctgcccttccctccccgtttttcatggcctgctgaaatatgtgtgtgaagaattatttattttcgccaaagcacatgtaataaatgctgcagccca

SEQ ID NO: 697761 - DNA, 2031 bp, Homo sapiens
  misc_feature (1717)..(1717): n is a, c, g, or t
ggcggccccagtcagacgcaggcagccccaaagcctgaacaggcagggccagacccagcttcttcgcctccgccagcggggaccccgagctagagccgcagcgggacctgcccggcccccggctccagcgagcgagcggcgagcaggcggctcacagaggcctggccgcccacggaacccggggcccggcggccgccgccgcgatgtttccccgcgagaagacgtggaacatctcgttcgcgggctgcggcttcctcggcgtctactacgtcggcgtggcctcctgcctccgcgagcacgcgcccttcctggtggccaacgccacgcacatctacggcgcctcggccggggcgctcacggccacggcgctggtcaccggggtctgcctgggtgaggctggtgccaagttcattgaggtatctaaagaggcccggaagcggttcctgggccccctgcacccctccttcaacctggtaaagatcatccgcagtttcctgctgaaggtcctgcctgctgatagccatgagcatgccagtgggcgcctgggcatctccctgacccgcgtgtcagacggcgagaatgtcattatatcccacttcaactccaaggacgagctcatccaggccaatgtctgcagcggtttcatccccgtgtactgtgggctcatccctccctccctccagggggtgcgctacgtggatggtggcatttcagacaacctgccactctatgagcttaagaacaccatcacagtgtcccccttctcgggcgagagtgacatctgtccgcaggacagctccaccaacatccacgagctgcgggtcaccaacaccagcatccagttcaacctgcgcaacctctaccgcctctccaaggccctcttcccgccggagcccctggtgctgcgagagatgtgcaagcagggataccgggatggcctgcgctttctgcagcggaacggcctcctgaaccggcccaaccccttgctggcgttgccccccgcccgcccccacggcccagaggacaaggaccaggcagtggagagcgcccaagcggaggattactcgcagctgcccggagaagatcacatcctggagcacctgcccgcccggctcaatgaggccctgctggaggcctgcgtggagcccacggacctgctgaccaccctctccaacatgctgcctgtgcgtctggccacggccatgatggtgccctacacgctgccgctggagagcgctctgtccttcaccatccgcttgctggagtggctgcccgacgttcccgaggacatccggtggatgaaggagcagacgggcagcatctgccagtacctggtgatgcgcgccaagaggaagctgggcaggcacctgccctccaggctgccggagcaggtggagctgcgccgcgtccagtcgctgccgtccgtgccgctgtcctgcgccgcctacagagaggcactgcccggctggatgcgcaacaacctctcgctgggggacgcgctggccaagtgggaggagtgccagcgccagctgctgctcggcctcttctgcaccaacgtggccttcccgcccgaagctctgcgcatgcgcgcacccgccgacccggctcccgcccccgcggacccagcatccccgtttttcatggcctgctgaaatatgtgtgtgaagaattatttattttcgccaaagcacatgtaataaatgctgcagcccaaaanaataaaaaaaataaatttaaaaaaaaaatatatctcaacgggatctgtaagctttttatatatttctaatccactgtaacagtaagacatcagaaccagctgttattctcaaataaatcgaagaataatcccaacactgaggatgcttctttacactaaagtcacaacatatgctttttgatcatttgctacaaagattggcgataccctcctttaaacattgtgaaagtatgcccaacaaagttaccgcggataatgtcaaacacaagtgagcttcttcttccaaagtaatccaaatagatctgagacttttt

SEQ ID NO: 697762 - DNA, 264 bp, Homo sapiens
tcttaatcagggggggaagaacgggttcaaaactggttggttccaatggcccctttagtttaggaggaaaaggctgggttatgataaccatggcttggtaaacccttcaaaggaaaggggaaaggtttgggggcccccttgggttttttttttgggggggggcggttttaggtattaggtttttaaaaccgggcttttttaagggaaccacctggcccaaaatttggccccgaatttttgggcccctttaaaaaggttaatgga

SEQ ID NO: 697763 - DNA, 1321 bp, Homo sapiens
ggcggccccagtcagacgcaggcagccccaaagcctgaacaggcagggccagacccagcttcttcgcctccgccagcggggaccccgagctagagccgcagcgggacctgcccggcccccggctccagcgagcgagcggcgagcaggcggctcacagaggcctggccgcccacggaacccggggcccggcggccgccgccgcgatgtttccccgcgagaagacgtggaacatctcgttcgcgggctgcggcttcctcggcgtctactacgtcggcgtggcctcctgcctccgcgagcacgcgcccttcctggtggccaacgccacgcacatctacggcgcctcggccggggcgctcacggccacggcgctggtcaccggggtctgcctgggtgaggctggtgccaagttcattgaggtatctaaagaggcccggaagcggttcctgggccccctgcacccctccttcaacctggtaaagatcatccgcagtttcctgctgaaggtcctgcctgctgatagccatgagcatgccagtgggcgcctgggcatctccctgacccgcgtgtcagacggcgagaatgtcattatatcccacttcaactccaaggacgagctcatccaggccaatgtctgcagcggtttcatccccgtgtactgtgggctcatccctccctccctccagggggtgcgctacgtggatggtggcatttcagacaacctgccactctatgagcttaagaacaccatcacagtgtcccccttctcgggcgagagtgacatctgtccgcaggacagctccaccaacatccacgagctgcgggtcaccaacaccagcatccagttcaacctgcgcaacctctaccgcctctccaaggccctcttcccgccggagcccctggtgctgcgagagatgtgcaagcagggataccgggatggcctgcgctttctgcagcggaacggcctcctgaaccggcccaaccccttgctggcgttgccccccgcccgcccccacggcccagaggacaaggaccaggcagtggagagcgcccaagcggaggattactcgcagctgcccggagaagatcacatcctggagcacctgcccgcccggctcaatgagggtgcgcacctcttttgcatggccgagcggccggcggaggctcagtggtcctccgtgcgtcccagaacttcgcccgcggggagcggagaagccgtctggagctggagctgcagatccgcgagcaggacctccgggcccgcctcccgcccagctcctccgtccttggacgggatgggcccttgctgggctattggcgcccc

SEQ ID NO: 697764 - DNA, 1261 bp, Homo sapiens
ggcggccccagtcagacgcaggcagccccaaagcctgaacaggcagggccagacccagcttcttcgcctccgccagcggggaccccgagctagagccgcagcgggacctgcccggcccccggctccagcgagcgagcggcgagcaggcggctcacagaggcctggccgcccacggaacccggggcccggcggccgccgccgcgatgtttccccgcgagaagacgtggaacatctcgttcgcgggctgcggcttcctcggcgtctactacgtcggcgtggcctcctgcctccgcgagcacgcgcccttcctggtggccaacgccacgcacatctacggcgcctcggccggggcgctcacggccacggcgctggtcaccggggtctgcctgggtgaggctggtgccaagttcattgaggtatctaaagaggcccggaagcggttcctgggccccctgcacccctccttcaacctggtaaagatcatccgcagtttcctgctgaaggtcctgcctgctgatagccatgagcatgccagtgggcgcctgggcatctccctgacccgcgtgtcagacggcgagaatgtcattatatcccacttcaactccaaggacgagctcatccaggccaatgtctgcagcggtttcatccccgtgtactgtgggctcatccctccctccctccagggggtgcgctacgtggatggtggcatttcagacaacctgccactctatgagcttaagaacaccatcacagtgtcccccttctcgggcgagagtgacatctgtccgcaggacagctccaccaacatccacgagctgcgggtcaccaacaccagcatccagttcaacctgcgcaacctctaccgcctctccaaggccctcttcccgccggagcccctggtgctgcgagagatgtgcaagcagggataccgggatggcctgcgctttctgcagcggaacggcctcctgaaccggcccaaccccttgctggcgttgccccccgcccgcccccacggcccagaggacaaggaccaggcagtggagagcgcccaagcggaggattactcgcagctgcccggagaagatcacatcctggagcacctgcccgcccggctcaatgagacctggtgatgcgcgccaagaggaagctgggcaggcacctgccctccaggtgagccgccgaccgcgcgtccacccggggcccgcggtgctagcgccgggagctgaagccctccctgccgcatccctgccccgcaggctgc

SEQ ID NO: 697765 - DNA, 1049 bp, Homo sapiens
gggagtaacgggagtgctctctggacaacgtgggctggttcgtccgcaagctctcggtgctgctcatcctgcgtggtgctcttcgccatctggctatttcctgcagcgcatcatctgccccagtccacgcaggtacccgcgcgtgcaggcgcgcccgggacagcggcccgggcctccggggggcgccggaccgctggggggctgctggggcctgccctgacgactgactgactgactcgccctgctcgtgcttgctgctgactgaggcggcagcctggctctcaggactcacttgcttggacatgttggctggctggctggccgggggccgggggaggcggtgggcgctcggacccctcctgcgcctcagagcacgagatgcgtgtagtgtcgccggtcttcctgcagctgcccagctacgaggaggtcaagtatctgcccacctacgaggagtccatgcggctgcagcagctcagccccggggcaggtcgtgctgccagctgtcggtgcttggccgccctcgaggcgcggggtcgccgcggagcccgacggccggcgagggccggataccctcttatctgagcgctcgcggggatcggcggcctggttgcaagggctgcggggctgcgggtggctatgcaccggccgggggtgcctgccgcaactgtgctcagaccttatctggcaccctggcctaactgcccggtaccccgccgactgggcttggcggtcactcgtctccctcgcgttctcccgggatctcctgtccctctgcgtttcatttccggttcctagcgacacgttggtgccactccgctggccgcgcttgcggcatgctcgcaggctaccccttctaggtcgcagccgtttggactggccgttctctttcgcctcatgccccattgcgctccgatatctgcagtcctcacctagtatcgttcccctcgcttccctaccttcactcgcgcaccccctccagccccctctcgttgcctccctcgtacccgcccgccttcttttttcgctcattcctcatcggaccgcttgtc

SEQ ID NO: 697766 - DNA, 702 bp, Homo sapiens
cacacacacacacacacacacacacacagagtaatctgtaactctcaattccctgaaaaactagtaatacgtgtcttatcgtgctataaactatacatattgtgtctatgtgtcagagatgctacaagtgggaaaccatcgtcgtgggttactcatcttcaagagcgggagaaacagtgtagatattgagtcttctctcccaatcttcttttataccacccagtttaagggaacttcgtgaagatgtgtccactctcgttgatttacagtgtagtgttgctgtgtgtgtactcatttagcaacaagtagtgctatagtggagcgacactcatacgctcctagagaagcaattctcgtgggcgacgaagtcgaaagcacgtgagaccggtacttaaagatgtaaccccccaataacagtcgttgcggtgggcacaactacgttaagatgttcaactcatactccctatacagatgtttcttcctgatgggggcctattaaggggtcaaaaccacagagagggcttcccttagttatcacaaatgttcagaaggtcaacgttgggtagatcaccaatattaaagtgcccctatcatcgcgttaattcctggtgtgttacgaattcaagcgttgcaactagtggatatacataggtaactgtaccaggaacaaggtcagcaggtttacacacgggtagtgtcctc

SEQ ID NO: 697767 - DNA, 841 bp, Homo sapiens
  misc_feature (9)..(9): n is a, c, g, or t
  misc_feature (11)..(11): n is a, c, g, or t
  misc_feature (15)..(15): n is a, c, g, or t
  misc_feature (408)..(408): n is a, c, g, or t
  misc_feature (501)..(502): n is a, c, g, or t
  misc_feature (507)..(508): n is a, c, g, or t
  misc_feature (513)..(514): n is a, c, g, or t
  misc_feature (520)..(521): n is a, c, g, or t
  misc_feature (536)..(536): n is a, c, g, or t
  misc_feature (564)..(564): n is a, c, g, or t
  misc_feature (574)..(574): n is a, c, g, or t
  misc_feature (599)..(599): n is a, c, g, or t
  misc_feature (622)..(622): n is a, c, g, or t
  misc_feature (666)..(666): n is a, c, g, or t
  misc_feature (717)..(717): n is a, c, g, or t
agcgggctngnggangcggggtcgagatggcggcgcctttgaggattcagagcgactgggcgcaagccctcaggaaggatgaaggggaggcctggctgagctgtcatcccacgcagcctgtaggctctcatcaagaagctagtatgctgtgtgccgatgcattcattgtacgagttctgctagaactcgggaaacgcatctttgttatgtgctagccatgactttgtcagagggaaattaggtcgtatgatggctgtccctaggtagggttacatgcgttcacggaaggcatttacgtgtgcaatgacaaataaaccaagataaaagcgattccactatttcgatggtcccaagagggaaaagtgcaatcattcctaagagtagtatggcgaccgagtatgactgacnttgtctgtcccagagactctcaatacaagaaggaggtcatacacgatggccctggcaccatgttccagcagaggaggtcttggtgtgtcttcnnaggtnnctgannaggcanncatgaaagatctggncaggcttccaactggatgaactcaggangcagtatctnggaaggacatgtgtttgatgtgaanttgttgcaggttctttcccatcnaggccttgtggtcctgagtgggggaatgggatgcccagctgaangatatggtcagctgaagatgctagctgcgtggtgaccttcaaaggtcacanaggaggtatcctggatacagccatcgttgatcggcggaggaactgtggtgtctgctctctcgagatgggcacagcaccgactttgggatctgtgggcgctcagcctgctggggaagtcccttgc

SEQ ID NO: 697768 - DNA, 794 bp, Homo sapiens
  misc_feature (9)..(9): n is a, c, g, or t
  misc_feature (11)..(11): n is a, c, g, or t
  misc_feature (15)..(15): n is a, c, g, or t
  misc_feature (265)..(265): n is a, c, g, or t
  misc_feature (273)..(273): n is a, c, g, or t
  misc_feature (277)..(277): n is a, c, g, or t
  misc_feature (303)..(304): n is a, c, g, or t
  misc_feature (328)..(328): n is a, c, g, or t
  misc_feature (356)..(356): n is a, c, g, or t
  misc_feature (361)..(362): n is a, c, g, or t
  misc_feature (381)..(381): n is a, c, g, or t
  misc_feature (400)..(400): n is a, c, g, or t
  misc_feature (407)..(407): n is a, c, g, or t
  misc_feature (454)..(455): n is a, c, g, or t
  misc_feature (460)..(461): n is a, c, g, or t
  misc_feature (466)..(467): n is a, c, g, or t
  misc_feature (473)..(474): n is a, c, g, or t
  misc_feature (489)..(489): n is a, c, g, or t
  misc_feature (517)..(517): n is a, c, g, or t
  misc_feature (527)..(527): n is a, c, g, or t
  misc_feature (552)..(552): n is a, c, g, or t
  misc_feature (575)..(575): n is a, c, g, or t
  misc_feature (619)..(619): n is a, c, g, or t
  misc_feature (670)..(670): n is a, c, g, or t
agcgggctngnggangcggggtcgagatggcggcgcctttgaggattcagagcgactgggcgcaagccctcaggaaggatgaaggggaggcctggctgagctgtcatccgcccacgtggcaagcacgccgtgaggctcctcagtacagtaagtcagaatgctggtgcgcatgcttcttgtagcagtctgcagcaaccggaaaccatcgtttgtatggcagactgacttgctcagagagaattggcgctagcatggcatcccgagnaggttacnggcntcaggaaggatttactgtgaatgaanntaaacaagaaaagcattcatattncatgtccaaaggaaaatgcatcttctanagttnnttggcaccatatactactnttgtccagaattcatacanaagagtntaacatgcctggacatttccagcagaggaggtcttggtgtgtcttcnnaggtnnctgannaggcanncatgaaagatctggncaggcttccaactggatgaactcaggangcagtatctnggaaggacatgtgtttgatgtgaanttgttgcaggttctttcccatcnaggccttgtggtcctgagtgggggaatgggatgcccagctgaangatatggtcagctgaagatgctagctgcgtggtgaccttcaaaggtcacanaggaggtatcctggatacagccatcgttgatcggcggaggaactgtggtgtctgctctctcgagatgggcacagcaccgactttgggatctgtgggcgctcagcctgctggggaagtcccttgc

SEQ ID NO: 697769 - DNA, 238 bp, Homo sapiens
  misc_feature (8)..(8): n is a, c, g, or t
cagacggntagcatgagtgtgaagtaatggaaccctattgatgcagtgtattttatgcagcctgattgaatgcaggggatttaatggagcatgattgaatgcaggggattttatgcagcatggcccaaagcatactgattgaatgcattggattccatgcattgtgattgaatgcagtgtactccattcagcgtggtaaaatgcatcccgattgaatgcattgaaacacggtctctca

SEQ ID NO: 697770 - DNA, 719 bp, Homo sapiens
  misc_feature (9)..(9): n is a, c, g, or t
  misc_feature (11)..(11): n is a, c, g, or t
  misc_feature (15)..(15): n is a, c, g, or t
  misc_feature (189)..(189): n is a, c, g, or t
  misc_feature (197)..(197): n is a, c, g, or t
  misc_feature (201)..(201): n is a, c, g, or t
  misc_feature (227)..(228): n is a, c, g, or t
  misc_feature (252)..(252): n is a, c, g, or t
  misc_feature (280)..(280): n is a, c, g, or t
  misc_feature (285)..(286): n is a, c, g, or t
  misc_feature (305)..(305): n is a, c, g, or t
  misc_feature (324)..(324): n is a, c, g, or t
  misc_feature (331)..(331): n is a, c, g, or t
  misc_feature (442)..(442): n is a, c, g, or t
  misc_feature (452)..(452): n is a, c, g, or t
  misc_feature (477)..(477): n is a, c, g, or t
  misc_feature (500)..(500): n is a, c, g, or t
  misc_feature (544)..(544): n is a, c, g, or t
  misc_feature (595)..(595): n is a, c, g, or t
agcgggctngnggangcggggtcgagatggcggcgcctttgaggattcagagcgactgggcgcaagccctcaggaaggatgaaggggaggcctggctgagctgtcatcccccagggtagaaccactctttgtatggacacggcctgcagcttgtcatggatattagtgcccgtagatggcatcccgagnaggttacnggcntcaggaaggatttactgtgaatgaanntaaacaagaaaagcattcatattncatgtccaaaggaaaatgcatcttctanagttnnttggcaccatatactactnttgtccagaattcatacanaagagtntaacatgcctggacattttccagcatgaggaggtctcgcgtgtgtcttctagtatctgacgggatccatgataaatctggtcaggcttcccaattcggatgaactcaggangcagtatctnggaaggacatgtgtttgatgtgaanttgttgcaggttctttcccatcnaggccttgtggtcctgagtgggggaatgggatgcccagctgaangatatggtcagctgaagatgctagctgcgtggtgaccttcaaaggtcacanaggaggtatcctggatacagccatcgttgatcggcggaggaactgtggtgtctgctctctcgagatgggcacagcaccgactttgggatctgtgggcgctcagcctgctggggaagtcccttgc

SEQ ID NO: 697771 - DNA, 849 bp, Homo sapiens
  misc_feature (726)..(726): n is a, c, g, or t
gcggccgctactactactactaaattcgcggccgcgtcgacattgtggtgctgtgctgcagttactgtgctgatttaagtgagatcagggtgcgctgctgtgcccggaggacaaggcgtctcatgctgcgggcggtgcgaatcatcgctgaggagaccactgccatgttgtattcctgcaggacggagcggcggcggcagcagtttattcgcgcgctgctgcagcaccaccgccctatcctgatgcacgattatgactctacccccatgtaggcgtggacttccccttcgccgcccgttgagcaaccgcaagttggacagcagcctgtggctcagcagctggacagcgacatgaacttaagcgagctgcccggggagtttattaatatcactgatgagcgtttggctcgacaggaaaccgtgtggaatataacacctaagaatatgtctgttacccatgatatgatgctttttaaggccagccggggagaaaggactgtgtactctgtgtgttgggagggaggtggcaggttgaatactagggttctgtgagtttgattaaggtacggtgatcaatataagctatgtggtggtggggctatactactgaatgaaaaatgacttgaaattttctgcaattgaaaaataaacacgttgaaacataacatgcaacaggttcacgattctttattcctgggcaatgtaggagaaggtgtaagagttggtngcaaaagtttcagtggtgtattttccactttcccaggaccatgtaaaagacatagagtaagtgcttacctcgctagtttctgtggattcactagtaaattagtcacagctagaatgtcgacgc

SEQ ID NO: 697772 - DNA, 758 bp, Homo sapiens
cttgggacgcgaggagaggcgcgcagcgatcggctggacggaggcaatggtgtaagcgcgcgtctcggcctccccgctccccccagacgcggccgggtcctcccttcgtcttctggagacacacccctgcctcgtctcttccgcctctcttgcagtccggtccgttcctgtcctcgtgcggtaggccagccctggggaggtgcagcgcccgccaggtagtgagtgtgctccgtatcagaatctgctagagcgtcagctagcatccatcaaccggactatctcctaggcatcctctttagctttgctcagtgctgagggcttcctagatgggactcgccataccctgcaccgagtcttcatgtcacatgacgcgtgggcgtactggactaagcgcatcacctcagcaaagaattgacatacatcgggccgagcccttatggctcatgacggggaacctcgctactaccctacgcgaccacacgaattcagagtgctacagatgggctgagctaggcacggggcgcttactgcgaccgcaacgtcggaactatacgctgacggacgcctaccctaccggcaagacggggcgtatcgggagcaagaccgcgtgccaggaccaggacgccagttgtcggtgaaggaggagccgagaagcagaggtgcgcatggtgaatgggaaggccacaataaggtccgagaggccgggacgactactaccagcgacgaaactggccgccagaagcgccgaggtccaaaag

SEQ ID NO: 697773 - DNA, 201 bp, Homo sapiens
ttactgagaaaggaaaaccccaaggggctccccaagggaaaagccccacgttctttcaaagggtcccagaaaggttttaaaggttgggggaacccattccttaaggtgggttttggttttccgcaattccaccaggtagagtttcagttgtcaagttacgtctaatccaactttcaggctcctatggcatggcaagtcctg

SEQ ID NO: 697774 - DNA, 386 bp, Homo sapiens
gggacgcagcgggaaggctcagacttggcgtggacctggcaactcggggcggggctaccttctcctgtggctacagtgctgaacgggtcatccgccggcagcggttgtgatggctatgtctgtggacctgggctcgattaatatcacctgggccggccatactctacgttgttggctcgcgtcttttagaccgacgattgctatgtacgagctgacgcatacatgttcacgcaggagccgttgactatcagtgcgtgctacagtgggttgagcagcaagcatctcagtatgtagcagcaactctggtagatctactcacctcattgcgtagcgtcgctgagccagctgcaccatctgatgcatgcgaccactacgtcgtctttgtc

SEQ ID NO: 697775 - DNA, 1037 bp, Homo sapiens
  misc_feature (254)..(254): n is a, c, g, or t
  misc_feature (259)..(259): n is a, c, g, or t
  misc_feature (261)..(261): n is a, c, g, or t
  misc_feature (333)..(333): n is a, c, g, or t
  misc_feature (427)..(427): n is a, c, g, or t
  misc_feature (471)..(471): n is a, c, g, or t
  misc_feature (477)..(478): n is a, c, g, or t
  misc_feature (493)..(493): n is a, c, g, or t
  misc_feature (495)..(495): n is a, c, g, or t
  misc_feature (543)..(543): n is a, c, g, or t
  misc_feature (577)..(577): n is a, c, g, or t
  misc_feature (622)..(622): n is a, c, g, or t
  misc_feature (631)..(631): n is a, c, g, or t
  misc_feature (635)..(635): n is a, c, g, or t
  misc_feature (660)..(660): n is a, c, g, or t
  misc_feature (667)..(667): n is a, c, g, or t
  misc_feature (670)..(670): n is a, c, g, or t
  misc_feature (691)..(691): n is a, c, g, or t
  misc_feature (708)..(708): n is a, c, g, or t
gagttaattatagaatgggttatcgtgttattcttactcatgaagttacagattttagccagtcttgcttttatactttgtgaaatttaatttctctctatagcaccttcctttttcgttttcagttatcaaaagtgacttgacctcataaaagagtgagaacatctctcgtgtcacatactgcaggtgcatcagttactttgcacagattctagggggacatttttctgaataggaagacaggacaaagttancagcntnagggctcttaattctgtgagtgaggacttaaaagtatgtagcattgttggatccatgaaaaatgtattcagngggctttaaaatttccattgcagaattggtctctcaggctgttgggagctcttttttttacattttttctccttgacacctattttatggtgtntaaagtaaaggttaacatctgtagcttttccaggtttttttttntttggnntatgaaatggtcttncnccatggcagaaataagctagggaaacattaacccaaaaatttcggtanagctgtcccttgggaggcagcatcacttatgggnagtaaagactcagtataaaagcaccagcatccctactggggtganggggataantttnatagcatcccatttcctagtgcacntgtgaantgnttggaggatctaatctatatnctacccttataataaangatcaagaagatatatctcctatgaacagtctggggataggagattgaacaagtggggaggaggctcaactccaaatggggagggccggcaaaagctggggcttaccactaacggggggtgagagcaaggcatgggccctaaaggaggcaggtcccaattaattccccagcactgggactggggggaaacagcaatctttcaccggcaggacctgaatgcacaggcaggaagaaaatcgtggggaagggcccgcgatcggataagcacaaaagcgctaaaacaccgtgtggttggaggggcacgcagaggaaactgccacggagaacgg

SEQ ID NO: 697776 - DNA, 394 bp, Homo sapiens
agaacagataagctatcagtacagttacaggatacaaaatcaacatttctatatgccaacagcacataatctgaaaaagaaatcaagaaagtaatcccatttataatagctacaaatataaaaagatacctaggaataaacttaaccaaagaagtgaaagatctctacaataaaaactataaaacactgatgcaagaaactgaaaatacaacaaaatggaaagatattccatgttcatggatagggagactcaatattgttacaatgtccagacttcccaaagcggtctacagattcaatgccatctctatgaaataccaataatactctttacagaaatagaatacataatcctaaagtttatactggcaccacaaaaaacctcccgtaggca

SEQ ID NO: 697777 - DNA, 1180 bp, Homo sapiens
  misc_feature (444)..(444): n is a, c, g, or t
  misc_feature (790)..(790): n is a, c, g, or t
cgtctcatccatggacttccgcggactcgcggccggctggacaggatggctggcggtgccgggggcatcttccaggcctatgctagacaccttgcggaaggagcctgcatgcaggacggaccactagagctggcgtgttgtcaggtatgctggtgcgcaggttcattgcggttgcgttgctgatcgtcgtaggtcatatcgtggcaagttaaaagtcctggagctaggaaggagtcagtcgagaggacgctggttgcgtgtctttgatttggtcctttagatgatttcctggtgaaagacgtgttgctcctgttggtccagggtttggtcaagcgatggccgttataatagatgaccacatccagactggtccaacttgactggacagccttggtgctgattagtacaggagttccaatgccaataaaccacgggggcccactnaatgtacgtgcacccgtgtgtaattgtgacccttgtcccctggggccatttggacccaagttctggaagtgccattacctaggtaacttgtcacgaagtcggggcttttaacggtacgtatcgagcaccaagggagcttaattcgtgcgttcacgtggctggggcacttaaggctgtcaaggacaaaatttcacgcaggcggtaagggaacgtggctgaataaaaaggaattgctgggggccagtagacaagtcttatggaccgttgggttaaggtactaggaagtttacccgttccatattcaggaagacaaggaatatgtggggggaatctgattggaaatggntaaagtaagccaaaggaccaaattttcgaatcttatgagccccattcttaaaaacttttacggacccccctatgggcttcatgcgagtatacatgcggccaaatcgtcgaatcggtcactttggcgagcaaccacgagtctgggaggcgctcacaatcagcacacgtccagcctagggcaggacacacaacgggttttaagcacctttgcccaagtggaagcctgattgggcacacggggcgtcttggggcggacatgcgacaacaaaaggggataaaggccgcattccacacagcagcagaccgcccgatctattaagcccggtacgggtttagtagacccccgcgggggttataacgtttggggcctttggcgccaacaactcgctag

SEQ ID NO: 697778 - DNA, 100 bp, Homo sapiens
accggggtgacgaaactgggactacgaacgctgaaaaaaacgggagcaacaacaacgacagcagccactaggtaccgccagaagacagagggcggagcag

SEQ ID NO: 697779 - DNA, 577 bp, Homo sapiens
gcacgagatgaaccactaaattttaaagagttcaaatgaagttttattcttttaatatgaagggaatagttgtatttctacttccgggcagttctactatcacgttgcacctggggcctctatgtctgagaggtgtgtgggttataccaagaaatcatcgatgtggacgattaccgtcactggcaatggtaacctccaattcagtcactggagaagagaggtacaatttagtgtggagtcatcctttcgtctcattcagatgcttaagagcaatgcttaccgcagaatcacattaggtagagaaacggttttgcatgaaggctccagaagaagcaagggaataagcagggaaaataaagcaaaggaaaggaaggtagtcgtcaagtgatgagctattattcaaacctaccgtctgcaggacaatctagtcgagggtcttcaacaagcggtcgaaatggggtgggattagaaccattgtatccgactatctttgagataatgtcatcacaagaaatcgattcgttactgcccgcatccatccgttatctactggcaaatcatttagtggcgaacttcc

SEQ ID NO: 697780 - DNA, 196 bp, Homo sapiens
cgagaatgttatcatgttacttatactaacattagttcttctatagggtgcatagattggtcccattgggtgtgcaggcagtcagttcatatgtttgggatattcaggtcagtgggtgttgaagcttgaaacgctttcttaattggtggctgcttttaagcctcactcatgggtgttaacttttttactctctact

SEQ ID NO: 697781 - DNA, 940 bp, Homo sapiens
tcccacaatgaaaggggaccttttttgggggccccgggccccggggcccggggaggggggtgcccttcagggaaaaacccccttttttggccctttttttgtggaccccgggtggtggggggcgccccccttttttttgtggggctagcacacaccgagaggttaagggaaatcataccagcggccgaaatcctaccgtgcccccagtgtgttatttccgcggaccaagccgccggggaaaaagaagaggtcccaataatatggcccccctccgcgagggcgcaacaccgaggtgcagagggtagacactcctcttcatggaaatggttggaaactactggacaaaagttgacgagccatccctcccagcttggtgtgcgcgcgaaataatatacaaaaccctgcggtgagaccacgggtagaaacctccctcctctggatcttgagaaattgagggattatcgaaactttccctccaagaggctgctccacgtggcgtctccacacccccaggagtgaagtgtttatggcaccaaggaagggttctttcaccaaaaaaattggcattgtttgtgcatatcacaaccacaaaccgcccccaacaacaccatctaccatccattcgtgcagccacaatctacccggacacacgacgctgtgcggaacgggctgtagaagtgtccccacacaaaagagtactccccgcgcccccaaaaacatgagcgggccccccgagaatgaccggccccccgaacaagacgcacaacacacagagctacggggggaaactgcagaaaaaggcgccctcaaaggagagacccccatcccagccggggcccactaccaaagcttcgccggggaacacacagggcgggcaagacacccactatcgggcgggaagaccacagggccggacccagggacacacaagacgtggggc

SEQ ID NO: 697782 - DNA, 148 bp, Homo sapiens
agtgttcggggccggagtcgatgtcggacccaggtcgaaaccgagaccgcgtccgaggtcgaggaagttggcgtggtcgaggaggtcctggcaccaacacttcttctaggctctgtgcactacccttcaccacagactcagagactgc

SEQ ID NO: 697783 - DNA, 965 bp, Homo sapiens
gctccgagcgcagggttgggactgtctgggtatcggacagagcgaaagcctacgcttgctcgactatgacgctgatagatcgtctgtatctctgatcaagtatgcctgacggaacgtgcacggcatgggacgaatggagggaggtggaagactttttgccattcaggcatgaaatagcccaattcaatgtaccctcaatcactcaagtaacctttcctaattgcacaagacaagggagaattttaaccgtgtcgaggacgttcagagtcatcttgaatgcattcctagatggccttgggaaccaatgatgcgtcgtatgcagagacctagaacaagtaccctatcgaaacgttggaacagagggataaaaggaggctggaaaacttgcacatcaatccgccagacccatcaggaacggtacccttgacttatggctaagaagcacaagaggcagtatgggacaatgaacaccaaacggctagattctacactaaagatcaactatataggagcacaccaatcttagaccaaaagcttctagggttaactacaacggcaagtatcaatgcgcagggcctctttcaagagcctgcggatagccaagaaccgatttctttaccccaatcggactaacgcagggccaacggatttgaagaggctcgatactatgaggcatctaatacattaaatctacattcggcagcagtaaatcatatggggaacgtgcggcccaaacgaacggaaaaacacgggtggcgcatctggagatggagagcacaacagcagaaaacggcaaaaccaacacccagcgaaagagggcagatgaaaaaaccaacaggccagactgggcaactttgaggagacaaggaccagaaaccaaccggacagctgggaaagaggtccccaactccaaacccagaatagccgggctcgcaaggcacacaccagacgacaggaaagccccc

SEQ ID NO: 697784 - DNA, 136 bp, Homo sapiens
tggattgtacacccactaagtagggaacgtgtaactgggattcgaccgtcgtgatataggttagtttgaacctcctgatgatgtgttagattgccctgggtaatcctagctcagtacgcgcgagaacccgcagatt

SEQ ID NO: 697785 - DNA, 150 bp, Homo sapiens
ggctatcttcaggtggctttcagctccgagtagaaataaccagaataggcttacattaaagaaacttcatctagaaataagtcctaagatactatctctatggctcaaaaataagaggaacccagatttctttccctataactaaacact

SEQ ID NO: 697786 - DNA, 342 bp, Homo sapiens
gtcgactactagagagatcccccgtattgacattcaacacaccacaatactatattcttaaaggtgatcgtggtaaaaccccacgatcacaggggatagggggctgccacctgaacgcaccatcagccggtcatatgtcctcatccagcgagacccttacaaagtgcaggtgcagacagacgcacctcagctgcttcaataaaccaaacggcacgtgaggttggcgccctacggctcccccaggctctggggacacaatgcggcccaaggtggccttgtggatagtgcccaccacaagatgccatgcacctaggggttcaccggtcccggatggccaggtgc

SEQ ID NO: 697787 - DNA, 484 bp, Homo sapiens
  misc_feature (5)..(5): n is a, c, g, or t
  misc_feature (16)..(16): n is a, c, g, or t
  misc_feature (30)..(30): n is a, c, g, or t
  misc_feature (60)..(60): n is a, c, g, or t
  misc_feature (79)..(79): n is a, c, g, or t
  misc_feature (110)..(110): n is a, c, g, or t
  misc_feature (173)..(173): n is a, c, g, or t
  misc_feature (185)..(185): n is a, c, g, or t
  misc_feature (310)..(310): n is a, c, g, or t
  misc_feature (322)..(322): n is a, c, g, or t
  misc_feature (401)..(401): n is a, c, g, or t
aactntgtccccccgngcctaaaaaatgcnagtggccccctgtcctggggccttaactgnaaacctcccaaaacccccnggttccaaagccaaaatcctccgtgcccccnagccctccccgaaataagcctgaagattaacaggcaccatgcccacccatgccccagcctaanttttgtattttnaagtaagagttgggatttccacccatgtttgcccagggtggccctcgaactcccagacctcaggtgatctgcctgcctcagccctccccaaagtgcctggaattacaatcatgagcccaccactncttagcctctanaaaaaaaatttttttagttagcaggtgtggtgatgtgcacctttagtcccaggaggctgaggtaggaagattgcttgancctggagaggtcaaggctgcagtgagctatgattatgccactgcactccagcctgggtgacagagtgagaccctgtctcaaga

SEQ ID NO: 697788 - DNA, 631 bp, Homo sapiens
agaggggaggaggaggaaaaaaacaaaacagaaacagtcacaggatagataaaaatacaccgacaggttaccagaaccttcagcatttaacaataaaacagaaagaaaaagcagaagcagtgagcatcgacatcaactgtacaagcattacaaagactcctgtgtcgaagagtcaattgttaatagctttccacagtgtccacagactcagtttcagggacagcctggactactttcctttcacacaaacaaacctccccgtgttctctcctgggccagcggccgcctccttggtgtggtcttctctgagtgaatgtcacaaggccggtgacaggagggggtggaggtgaggggacaaagtagaggccgagggtcagtgcctttggagaaagtccagagaggaggagcctgcacatctggacatagttggaaggggaagtgaacggtaaaaagctacggtaggtaaacaacagacagtgaagaatgtccaatataagctacaggctaatctctgtggaagcactggattccgaaggacagcagcagcggacaccctcgtctgtatacactaagctctctagaagacgctggaataaaatgccttaacgtccttgtgacaggactttatggg

SEQ ID NO: 697789 - DNA, 169 bp, Homo sapiens
cgtgtctttgcccctaaaactcttcctgctctatctccccccgacttcgccaggagctccctcaagtccttctgatggcttcatctcgctgtcgtgactacacagagttactggcacaagtttatcttcttccagatttcctttcagaacactcaaaggtccaggtatg

SEQ ID NO: 697790 - DNA, 136 bp, Homo sapiens
gtgaacaggctttacatctgaagaaacgtggagggctgagtttggagttaaggagaaaaaaaaaatgaagagcctcgattctcgaaagagtgcggttctctgtcccacgtgaggttagctgatcgcaacatagagt

SEQ ID NO: 697791 - DNA, 418 bp, Homo sapiens
tcacttgtttatctgctgaccttccctccactattgtcctatgaccctgccaaatccccctctgcgagaaacacccaagaatgatcaataaaaaataaagggataataaaaaggaaagaaaagaaagaaaaaagcaatgtcacatattgccacaggataagctaaggatgaaatctctccaggacttagtgtcatagaggtcattggtgactctagtgagggccactgtatatagtgggggcaggagccatagtgggttttaagctcaaataggaggtaaggacatggaaaacatgggaaggcacttgagaagtctgactatgaagcagagataggactgtggtcagatacaaatatgagaagcagatttcttctgatgagaatggtgcgttcaactgtccatgcaaagagccaatgg

SEQ ID NO: 697792 - DNA, 282 bp, Homo sapiens
  misc_feature (132)..(132): n is a, c, g, or t
atcttctctctctatctcatgagtaattgtttgattttagatccacagtagaagacatggactactggttcttgattaacatctacacattttcagttatttgcttgtacagttatatgttatactaatcgnaattagatattggtgaattaactgctaagatgattaatccattaagtacggggagcttgcttaactactttgtactttctggttctaaatgttagggttatatagctcatctcagcactaacattattccttacgcatgtattgaacttt

SEQ ID NO: 697793 - DNA, 201 bp, Homo sapiens
  misc_feature (62)..(62): n is a, c, g, or t
cgcaatggacgaacacgtcactgactcttcttgataggttcatctcctgacactgccttttnctgcagaactacaggagcatcactcgcagataagccattgctgttattcactgtgcttcgcataagtgtctctattaccctgcgccaatgtgtgactttgcttaggacccactcaagctgcagctcctctttattcctt

SEQ ID NO: 697794 - DNA, 230 bp, Homo sapiens
tttgaaggcccatgtagcatgcctggagggcctcatccctgaagataaggttgtgctactggcaggttctcccttacagaatgaagccaccctggtcagagtggggtggaagccctgacaaccctggaagtggttgccgcagctaggaggtgagtgggctacaggggccaccaaactgtgtccagggccatacacgacactaagacttacttggtttgccctgcacgggg

SEQ ID NO: 697795 - DNA, 968 bp, Homo sapiens
ggcggcgtccgtggtctgtcgggccgctaccgccgggtcacaagtgctattgcgctgcccggccgttcgccggccctgctgcggacgccagccttgcggagtacggcaaccttcgctcatgcgctccagttcgtgccggagacgcaggttaggcctgctggacaatgtggcctgtcgtgtggcctccgcagactagtcctctcagcccacttgcacggtggtgagtgtgtgattgatgtcggccagccgttttgagactgacgaagaataatgggcgcaggctactttttggcagcatctggctttcaagggaacaaaagaatcgggcctggcagtgccctggagaagggacggtgggagagcatgggggcccatcttacatgcctacaagcacccgggagcacacagctaactacatcagggcgctgtccacggatctgccgaaagctgtggagctcctgggtgacattgtgcagaactgtagtctgggcaagactcacagattgcagaaaggaacgtgatgtgatcctgcgggagatgcaggagaatgatgcatctatgcgagatgtggtctttaactatctgtcatgccacagcataccaggcacacctctaacccaggcttgtggaggggcccaggtgagaattgtcaggaagctgtctcgtgcgagacttgagccgagtacctcagtacacattacaaggggcccctcgaatggtgcctggcagcagctggaggagtgagcacagcactgttcgacctcgccagaagccctcgtggcttcctgacctatgcgatgacgctgttgccactcttacttccggccgttcacggcgtggatccggccgggtgatgtctcctttgccctggccttcggaaaggcctgtggccaccggcatgtgctgtggtgaatgcataggctttaagctatgggtggtgcatcccccacgtctggttgcacatccat

SEQ ID NO: 697796 - DNA, 229 bp, Homo sapiens
  misc_feature (200)..(200): n is a, c, g, or t
gagcggtctagttggtaatatatagtttttttcgggttgtggtttcttttgataggtgagattggctagctattagtataagggggaggagtcatgtggttagaactagctaggggtgctgatacgtgagtcggacgaagaatgttaacggaaaaattaaggctgttttcgccttatgttggtttagtagggatagactngcatcaggctaagtgaggagactatgtac

SEQ ID NO: 697797 - DNA, 813 bp, Homo sapiens
gcacaagcgatcaaccctgggcttaaacaggatattcctgggcactatcctgcacaggaccggcctgtccccccgcagaaatgccccagagccccctcaccgaagacgaagccatttaacgccttcagggcacagagggaccgacgggagagaagaaatccactttgtggagatccaaggtgatgaccacctccaatggggccccacccatggatgactaagctccttgaccagaagagtaaccctggagtcattccagccacaagaaaggtgagccaggcccacaggcccaacagcggccggaaccacccagatcaccatatcttattcatccaggcccagggagcgggagctggagactgagagaaccacccggtccagagaaccagctccagccccccgtccagacacccagccccaatatggattttagggctctggaactgattgctccccggatctcctgcccagccccgctggcctggccccccagcttcacctctgggacccccagctgctctaagccccggatctctttcccccaggaccccagccctcgcctctgcgagaatgacataatttgatagaattttcttaaccagttagaaaattccagctcctttctgtcctggagctagccaagacttgtgtgaagcctccggcaaggggctcctgagtttctggggtgggagttttgctctctgtccggctgtgatcaaatgttggaccctccccccccccccttttttttttttaaacccgggatgtctgttgaaataaaaccttccgtctgaccaaccaagaaaaaaaaaa

SEQ ID NO: 697798 - DNA, 1556 bp, Homo sapiens
tacatcactgcttatcgtgtgggcccatatattttcgaagaggagtgttttgtcccgccgcgccagatcataatgtgcgcccaatgtctctcgttgttgtggaccccccccctgtgctattgtgggtgagattcctccacagggaacgccttgttttggtgcgcttttattatagagggtttctcgtggcgccctctgtgggggccttcttttattttgtgcgtttctatttcgagagcgactccttttattgtcttcggccaacgtgtggcccccaccccagatgcggtcctcaccacgcccagcgacctactttttggggaccatcgtgagctctccctggtgaattttaaaggattgtggaatgaggaagcttgtgagttggcgctctttttatagggagtccttccgtgtccacactctgtttgttggtggacccacaaaaaaggggggggctgagaaatttttttgtgttttgaacaaattttggaagggacccatccgaatggaaggtaaatgaatatggcccctgtgtggaacaccctcttatgaaagctgcgctgtccccctctggtggaaagattgcgcccaacaatctcgtagtatctccacgtgtaagacctttggaagaggtaatatttcttcccacagtgagatactcttctgaatagtatttgtgattactagatatagatacacagtgagactcgcctgtgtttgtgaaagacaattgaaatactgttctgtgagagaacgccgctctctttacacactgtggcaccccaccacagtttgagaggagaagtacgacagtctctgggagactccccccctcggggcgacactctgttgtgttgtttctctgtgtgtgtccctctgtgcgaccacacttagaagagagtgtgtcactgtcgcgccacacactctcacacaaagggtgtgacacacactctgcgctttgagagcccccgacgacctctgtggacacacagcgcccggcacgcactgtcttcacttctcacaggcgttctcacgcacactctcccgaggagaatgtgagatttcaccgcttctattgaatatacacacttgagaatatacaccacgcggctaacacatcggtggcaccccgcggtttcctcttcctatagagaaatgtggcacgccccacttccacgcaccaccacgcgctttctgcacccacaattctctctcgagggtataaacccgcgctgggagggctccacgccacgcgcccacgcgaggcccacaaggacacacgcgaacttggcgacacctctgaaaccccacaaggaaatttcacacttgtggggcctccctctgtcacgcttctgctgtctgttctcacgaagccacttctggaatgaagtgtcccgacacccctctctcggagagcccgggcacaggagcccaccccagctggtcacgaacttctgaatgttgggtagactggcctctgtggggattgtaagtgccctcgaggccctctgtactagaaactgctcttaataataaccgtgattattggttgctgc

SEQ ID NO: 697799 - DNA, 327 bp, Homo sapiens
ccctgcctcaccgctgggcatggtgactcacgcctgtaatcccccagcaatttgggaggcaaaggtgggagaatcgcgtgagcccaggagttccagaccaggctgggtcacatgacaaagccccatctctccaaaaaaaaaaaaaaaaaaaaaaaaaagccagatgtggtggcatgcatctgtagtccaagctacttgggaggctgaagtgtgaggattacttgagcccgagaggtggaggctggagtgaacagagatcgcgccactgaactcgggtctgggcaacagatagcgaccctgcctgaaaataaatcgataaataaactc

SEQ ID NO: 697800 - DNA, 125 bp, Homo sapiens
cgagcgcactgaggagactgggggtgtacggagggtgtaggagggtgttacggaagcgtcgttacggagggctgttaggaggcgaggaggcgctcgatacggaggcgtgtaggcgctgttacgga

SEQ ID NO: 697801 - DNA, 747 bp, Homo sapiens
ctcccatgacccagacacctctgcacttcagcctgggcaacaagagcaagactccatctaaaggaaaaagaaaaagaaaaaaaaaattcccaaaaagaaatggccaataagcacatgaaaagatattcaacattgttagtcattaggaaaatgcaaatcaaaaacacaatgagaaaccactttacatccacaagagtgggtataataaaagaagtgttggccaggtgcagtgtaatcccctcatgcctgtaatccccaaactttgggaggctgaggcaggtggatcacctgaggtcgagacttcgagaccagcctgaccaacatggagaaacccctctctcctaaaaatacaaaattagccgggcatggtggtacatgtctgtaatcccaggctacttgggagactgaggcaggagaatcacttgaacctgggaggcagaggttgcagggagccaagatcatgccactacactccagcctgggtaacaagagcgaaactctgtcttaaaaaaaaaaagtgttgcgcaaggatgtggaaaaactgaaacaactgtattcactgctggtggaacatgtaaatgatcactgtggaaaatcgttcggtggttcctcaagaacttacatagaattactatatgatccagcaattccactcctaggaatagacccaaaagaattggaagcaggtactcaaattatttacaccttgaatgttcatagcagcacctagttcacaataaaggtaga

SEQ ID NO: 697802 - DNA, 339 bp, Homo sapiens
  misc_feature (184)..(185): n is a, c, g, or t
ttttgaaatacgtggttacttgcttatcctttcccaaatacttaaaagataggccaagcgcggtggctcacaccttgtaatgccagcactttgggaggctgagccgggcggatcaccctgaggtcaggagttcaagaccggcctcaacatggagaaacccccgtctctactaaaaatacaaaannatagccgggcgtggtggtgcatgcctgtaatcccccagctacttgggaggctgaggcaggagaattgcttgaacctgggaggtggaggttgtggtgagccaagatcgtgccgttgcactccaagcccttggcacaagagcgaaactccgtctca

SEQ ID NO: 697803 - DNA, 185 bp, Homo sapiens
tagtagatcaacacttcgctgggtgtggtgtctgtgaatcgtgtcatcccagctactcagggaagctgacccaggcgaatcgcttgaacccaggagatggcggttgcagtgagctgagatttgtaccactgcactacagactgcgtgacagagcgagactccgtctcaaaaaacacccccaacaa

SEQ ID NO: 697804 - DNA, 166 bp, Homo sapiens
tcctccgtggctgattacggtcttggcgaaatatctctgtgaattttcgtcatagctcattcctggtttgtgcttctcgcgcatgcgctcggccgccgcctgcctcacgcgcgcggagacagaattcaacgttgtcaatgtacacgtcctgccccatcgacgaagc

SEQ ID NO: 697805 - DNA, 389 bp, Homo sapiens
gtgccacatcatatgcgagctgggtttgtgatacttccaggattacactactaccctgtctctgactgcaacatcttgtatctctgcgatcttccacacatcatgcgaactatggtccagcatccaggttattcaagcttagattcctctcaactgcaattatgggtggcattgtaacctgctatgtaatattgtaacccaagagctgagtaagatgggtgcctctgaaagagtactctctttcatccactggatgcatgtagattttgaccatccctggcgatcactgcagtctcttaagtcatggtggtgtcctcactgaggccaacacatgttttcagaaaagacccggaagtaatattcattccctagacggtaagggagatgag

SEQ ID NO: 697806 - DNA, 789 bp, Homo sapiens
agcgggtgctcggccgggggctggcaggccccgcggggactccggactcccagtgtcaccaacgaggaaactgagtctcaagacatctgagggacctttgcccgaggtcgcagcccctccctggaggagctgaagtgcagagtagggagccccttgcggagaccctcctgggacctccttccgcaggggcctggggcgcctccctttccctgctctgcctgcgggcactgagctcccgaaagactccagcccctcgctctcccggtgacctgctggagaagacacctgggaggaacctgcggacaatgggtgtgtgtccttgggccgccagggtcacctttcagcctgtttccccagaggtgaaccaagagtcacacccaaggcaggagagcaagagtgatgagtccgctgcaccttctccggcaagcggaggttgtcccgccgccctcactctgtgatgcttgctgtgcttgcgaggcctacgccaaagccctgcgggcagccctgggctcccgcggacagccttgctgagctcctgggaaggaggcgtgccctccccttcccccaacgcccgctggctggggttctctgcagcccaggactgtgcatgtgtgcgcacacgggttctgtgaacacgaacacaaaagtgtgctcgtggacactgcgtggtactgtgtgcacacagcgcacgtctgtgaactgaaggaatgttcctggacaccaggtgcaagtgccaagtgtgtgtatgctggcccagtgtggtgccagggcgaactggaacggagaaag

SEQ ID NO: 697807 - DNA, 358 bp, Homo sapiens
caatcaacagccaagtccagtgcaagcctggcacggcgggcccagcatttgcatcccctatgttcagccaggcacctcccaggctcaaggcacatctccattttctcagctttgcatctgggttgtccagttgggcatggccttgcccaagtgcatggccaccgcaaaggccaaatttcttgttatgctcctccatcctgtcgcttattaatcattaagaatcctgcctggaagtttaggtcaaagaggctgctaggagccaacataccgtggatgtctcatcccaaaaaattcaagccgtcaggggtaacgagatcgacattacggtaatccatggatacatagatggttaccggga

SEQ ID NO: 697808 - DNA, 230 bp, Homo sapiens
ttttttggggttccccccccccttttttttttcccccccggccccccaaaaattttccccccggttttgcggttggtccccctccctgggggggggttttttgcccccccctttggaaaaaaaggccccccttgccctcccccccccccccgcccccgggggggtttttttttttccttccgggaagggggggggggtttttcccccctaaaaattttgggcccccccca

SEQ ID NO: 697809 - DNA, 641 bp, Homo sapiens
gagacgcatgatgtgaccgtccggcttgagaacagagaatgtgcgttgtgccacgcgactaaaaagagatagctaaagtcatgggtagagtagcttgacgacacgtgctacaggaacgagttcctcactatagtgacagtgttcctcagctgaccaccacctgttgcaacatgggatggcaacgcactaaagactgggtccaatatctccatggtctcttatgggccggacagacccggtcaggcccctgggactactctttacacatgccggccaagtaagaaacaaaagcgccatcaaatctgaggcgagcagtaattacacttgatggcagtatatgggagcaactcccaacgactgttacattctccttgtaacacacacacacttgcatcctccgatccgcgcattaagcacaggcacgcccccaactgggcccggacttaatagcctaaatctcaaaaaacaccttactacatgcactacttaatctggaccacctgccacatccatctacaaacccaccacactgtctccatgactccacacaatgtataccactccctttcactagataccatacccagacatcagatcttgaatgctcgcccgcacactcccgccaccaccctatctaacac

SEQ ID NO: 697810 - DNA, 490 bp, Homo sapiens
  misc_feature (314)..(314): n is a, c, g, or t
  misc_feature (345)..(345): n is a, c, g, or t
  misc_feature (350)..(350): n is a, c, g, or t
  misc_feature (387)..(387): n is a, c, g, or t
  misc_feature (393)..(393): n is a, c, g, or t
  misc_feature (411)..(411): n is a, c, g, or t
  misc_feature (424)..(424): n is a, c, g, or t
  misc_feature (452)..(452): n is a, c, g, or t
  misc_feature (469)..(469): n is a, c, g, or t
tttagactacaggaaacagcttttcaaaaactttataccaagggttgggtatgttgcctcatgcctttaatcccagcacttagggaggctgaggcaggcggatcacttgaggtcaggagttcaagaccagcctgtgcaacatggtgaaaacctgtctgtactaaaaatacaaaaattaggagtggtggcgggcacctgtatccaagctacttgggtggctgaggcaagagaatcatttgaaactggggaggcagaggttgtgggtgagccaagatcacaccattgcactcccagcctgaacaacagaacaggantttgtcttcaaaacaaacaaacaaaaaaaantttantatcttttcaaggattgagggttgatttaatggaacnttttgnaggttcttcttggaactngagggatttaagnccttttttaagggggtttttgggtaagnttttttaaaagttattncctcccaaatttgtccacctt

SEQ ID NO: 697811 - DNA, 1499 bp, Homo sapiens
gctcagttcttttgttcgaccgtgtttctactacccaccatatgttagtgtgggtgtgcaaacagacgacaactaatcactggcagttcacaccacagctggcacagagtaagattgcctcgttcggtacaacgttggggggatgcctcagtcggcggcaaatgaatacactagatttcaccaggggcgcccttgtggggttgttcgtgtcccttacaataaccgccccaacgttgttgtgttgggtgtctgtccggcgtcagtggccttcccaacctgcagtggccatgtgttggaagtagctacgtccttggtcctctcacaaattatggtgtgcagatagttcctctctgcagatggtgtgttggcttgcaatattcgcctataattgtcgcccaattcttttttctgcggagaattttgcggctcgtttggttctgtggtcccttaggatgcgctaatttgtggggggctcccattcccgcttgttctccgccgtgggggtatcaaacgtttgtccgcgtcataatggcgtcgtccgtcggggcggctctcctgtttttgttgcccccccctcccctctggggcttgccgtgagggtgctgcaatcgcagttggatgtctggttgtctcctctggtgggccgtacccaattcttggttggggggccaccttttttctcgctgctccttggttgttgtttggtcccactgttctcccactctctagtgggtatatccccacggatggctcgtcccctcagggtgttctgtggttgcgtgtgctctctttctgcttgtcatgtgtggccgccggtgcccctctcttgtaaatggtgagggaaccttgttgaggggaatttgggtgtgcaagcacacttgggggccgctcttcattgcaagcctgtcctcaggttatctcacgaagagcatgtctcccttggttccacgggtttattatagaatttttggcttttctcgagtgctcttcgtggcgatatttctgacataccttcacttttctggtcgtgatcataccacagagtgccccacccaagaacaccacaatgggccgcgcacactgtgtgttctgtcttatctgaccgtgtctctctgtgcccacataccacgccaccacccgacacgccttttaaagcacgcttctgggctccacctgccctgttgaccacaggtcttcacggatgctcacacggcctgtatctgggcccttttcctagagctccacggctgcacgccacgtccacgacgagagatagagcctgcccacggccttatagacccacccttgtcagcccacgttcagttctgccttaccacaagatgttctgagactcatacccactttggagccaagccccaccttgctgccctacccgggctgtccctgaggctggatctgttacaatatgagtcatgacactcataactgtaataaaagcacccttgttttctgcttgaaccaataaaaaaaaaaagata

SEQ ID NO: 697812 - DNA, 1311 bp, Homo sapiens
gggagaaagaggagaatcgcccaagcggcctcggaagtcccagtggagtggaggcccccgccgtggagcctgtgtggtgtatgtgtggtaacaccatgtctgtagcccctgctacaccgatgctgccacctgtgtcttggagctgagctgggaaactggcctgcggttatttcttttacactgtgacattgtgagaccacaagggcacagctagtggctagactgccactactaccaccaatccgagcatcccatcacagtcaatgtacaatcttgtaccccatgacgccataggatccactgatgcaccctcaaaccactgcaacgactgcgctgactgcacactccatggcctctcgaccctgactgagcgcgcctgacgatccacgcactgccaccagcagcgaccgacggcctggcaatcacacgacaggccagcccacgacacgaaccactcgacacggcccctctgccactctgcacgccacttgaacacactcgcacacgaaacggcgcgaatcccccatgcccccacacctccgaacactccgctacgcgtcgcgcgccacgaggacctctcaccaaccacgcggccagtgatgtgacccccctgatccacctacatcaccacctcgtgcccctttcgacccatggaacaccgcccaaacccctaacttgtgccctgcgcccatccggtctgcgccgcttcctgacgcccgcctcgcgccctgcgcctcctgaccacctcggccccctactccccacccgaccacggggcccacagcgccttaacaaccaggggcccaacgcctgcctcccaagacgagcgcaaccccccagacgcaacaccacatcaacccgttacacccaagcgactggcccccaacctgagacagcgcaagccccctcgccgcaaacagccaccgcagcgaccgactgcgccacccacgcaacaacgcaccgcccacaggagccgagcacccacatgaaaccccgaggaccactcagccacgcaccgacaagcgccacccccaccgcagctcccacccaggccacctgcatccccaagcgcccccaccctagacaacgcccaaagcgccgcacatcacccaagcgccgacacacaacgcgacacccacctaaacacgccccgcgacgaagatacggcactccacacgaggccaaccacaaacgcaccaccctccctcgcagacccccacgcaccccaagcggcgacacgaaaccacaggccaacaaggccaccggaccgcacaaccgcgcacaagccgcacaccgaacccagcaagccac

SEQ ID NO: 697813 - DNA, 359 bp, Homo sapiens
  misc_feature (40)..(40): n is a, c, g, or t
  misc_feature (47)..(47): n is a, c, g, or t
  misc_feature (153)..(153): n is a, c, g, or t
  misc_feature (232)..(232): n is a, c, g, or t
tactgggatcccgttaaaaaaacgttcaggggaactgcgncgccttnccaccgggtggggccccattgaagcccacgtcccttcatccctcagggctgtgcggccccgagcccaggtactacgtcccaagtggcggctcaggacctcacaganctacggggaactgagtgactggagtctccccgccactgcccacaatgagccctggttctcgatttcttggaaaaccagnaaaacaacttagtttcagcttggtgtaaaacttccgcatgagggacttcattttggtttagtcttttgggcctagtgcaggagctcagtccaaacccatggcttcctgtaaactttatttaacacca

SEQ ID NO: 697814 - DNA, 520 bp, Homo sapiens
  misc_feature (290)..(290): n is a, c, g, or t
ataatacataactagctgtgtgatcatggcagtgacttatctcctaggctctgtttctcaagaaaaattagatgactgtgagtccaccagttctaaaatcataatacaggatatggctccatcttgctgactttgtttcactagcaagtaaatgtgttaaaatttagagaacttacgaattttgaaatcctagttaatttaactaattcctatcactgggcataaattgaaagagcaaaactgtgaagcatcatgaaaacaactctatctactatctatactagaactgnagccttcctgctttaactatgccagccaggtgatggctcctcccccaaatgcctgtctttctttttaaattaaaaaaatatatgatgaaaagcaacttttggccacatcctcacaccattattattttcttttcttttttttttttttttttttttgggggggaagggggcccccctttttgccccgggggggggggcgggggccaaatccgggtctcggggaccctccc

SEQ ID NO: 697815 - DNA, 270 bp, Homo sapiens
acagtcattcacatgcatgtatcatgacactctgaacatgtattgtgactgcaaatcacatgactcgatactagcttaataatcaaacacagcaatcttgttctacactaatcacttcatatgtagctagtctttgatgacatgacggtctctgacaacctcatgagaagtactgagaacatcagtcttgtcgtataccttatctcccttggctgtgatatacttccatcaactaaatgatccagtgcctgtattctcctacacacatta

SEQ ID NO: 697816 - DNA, 511 bp, Homo sapiens
tgggaaaatacagggcctctttgggttacccaatggggccttcccttcccacctttgtttttaaaagcctaaaaatttttatccctttaaaaaacagggggaccaaaaattttaaaaaggccctccaattttaccgggaaaaaaaccaaattcttgtttcccacctcttgaaaaaaaaggatcgggttctggaacccaccccaaccctgggggggggtaataaaaagtcctgcccttaaatccaaatgttgggtaaaaccctgccgggtaaccattaactggaaggggctttaggccttgaacttaaaacccccaacctgggggggcccggcccattccccttaagagggtattcccgctctggccgtggttaaaacgaaggacgaggcgcaaagaagcgagccatgagagagggcggcgggcgccaagaggcagggcgagccataagagaagcgcaacgaggacgtgaagcgcagaagcagagcggaggggccgggaggatagggagagg

SEQ ID NO: 697817 - DNA, 731 bp, Homo sapiens
ctcccccaaccctctcctcaggagcctccccagtcccaggcaccccatccagccctccctgcctgggaccaccagtggcagcctcagcagtgtgccaggatgcccctgccccatcagctgcctccaaacgccccagtagtccccagccctgtgcttcaaagcccatccgaaggactgagggatgggggcagtgcccaaggctgccctctgacctcccactggcatggtgcagaggctttccactttaccccagaccctgagcagggtcctaggcactgcagtggagctagcgcttccctgggatgcttgagaggccttgcctctccctactgagtactagggagcagactaccacgcttcctccatagctacaaccaccagttataaatacaggtagtagctagactaggcagggagcgaggacaaccatcccccatgagaccaccatgctagcaccacacacaaggaaggacctgagtcctcccacctagatccccaggagaggccttgaaggggccttcgcgaacaaggatggcttcctaagcagaccgtacaaccaacctcagaccgttcatatccacgatccgttcagcaacttcccagaaccatcctagcgctctattcatagcccattgatggtcatgcgccaacaagcaaggggactgggaggaatctgcagacggagcgggggccacagtggcgagccatacagactagggagacatgaccac

SEQ ID NO: 697818 - DNA, 984 bp, Homo sapiens
  misc_feature (699)..(699): n is a, c, g, or t
tgtgtcgtccttgtcccgttatttttagaagaaaaaaaaacgaaataaaaaaacgaacaaaagagggcaccagcatgggtcgcttctttgtccgctgttatatctggcagatcctgcaggtgtgtgtgtgcgcaacacacggccttggttgaaaattgtttcgtcggccgcctttggtgcgcgtgttctcttctacgtattggtggcgccgtttttaccgtatgtttttgtgctcggttcgccccagtttggtgtggtgttgccccccccctgcgggtccagggggggagcctgtcggctccggtgttgttgtcgaggtgtctttggtcgccgcctcttgtcagacgagtttggcccccatgtgctttggactgcgtctttattggtcccttaatgtgtgctcgtggcgttcgggtcgaagcacgcgctcctcatccggggcatggtacgcgaccttcacaatgcgggctcaacagatttcctgaacatacttgggccacttgcggtatttggcctcacgacgaagattagtaatttcccacggagtcaattttcttgtctgtctcataaaagatgtctcctcggaatacattctgtgcgccccacgtcaggctccttctggcggagagtcttcaagacacccctctccctccccggtaacttctttgaggagaggaggtcgccacaccattccaaccnaatcaagaagggtctgtttttgttttgggtatgccagcgccgcccactcatttatggtagcattgatgaaggtcatctcgcactcgctattgttggagacgacgatttcttgagcaaaaagatactattccgcgcccctcaatggtagattcttcttttgtattggtgcttttcacaaccttcctgtggtggttcaagaagatttcaatatggagtattcgccccccttccatagcacataataaatacaaaaataaacagaccacaacaattagacaaagaagc

SEQ ID NO: 697819 - DNA, 277 bp, Homo sapiens
  misc_feature (24)..(24): n is a, c, g, or t
  misc_feature (46)..(46): n is a, c, g, or t
  misc_feature (67)..(67): n is a, c, g, or t
  misc_feature (84)..(87): n is a, c, g, or t
  misc_feature (102)..(102): n is a, c, g, or t
  misc_feature (106)..(106): n is a, c, g, or t
  misc_feature (143)..(143): n is a, c, g, or t
  misc_feature (169)..(169): n is a, c, g, or t
  misc_feature (193)..(193): n is a, c, g, or t
  misc_feature (220)..(220): n is a, c, g, or t
  misc_feature (222)..(222): n is a, c, g, or t
  misc_feature (224)..(224): n is a, c, g, or t
  misc_feature (226)..(226): n is a, c, g, or t
  misc_feature (237)..(237): n is a, c, g, or t
  misc_feature (239)..(239): n is a, c, g, or t
atagatatctatttctgttacatnttattactgtatggcacaaganagaagtgacattgggtatgtnagaaatgaaataaggannnnaaatgcattaccatntgtntaataattatctttacagaatgctagtttaatgactnttttaactgaattttttgaataaatnagaaatgtttgtattggtcacagntctatcataattgcttttctgatgcantnananataaatggaanantgaaatgtatattaccgatgcaaactgtggataaagtt

SEQ ID NO: 697820 - DNA, 462 bp, Homo sapiens
ccgcagctggcttggcccgcggtcgtggttcccgccgtcctgtgcctttaacggctctcgccactcatccagcatatggggctcctgctgtgtcgtgcccccagctgcacttgcgcctttagagggtcggctatggagaggttaaatgaggccccggtctgggtttgcggagtcacccaagacctggcgaaatcgaaacgggagggctcaaagagactgtatcctttcaccccctcatatgctggtctacaaggatgggaggccagaccgctgaccgttccccactctcgatagagttcagcgtgttgagcacacctcatgctgccaacgttgcatgctcatctctttcaggtgtggcattcccagggggcttgtgtcttgaaaaccgcaactgttaggaccctttatactcattaccttcagtactgcttatgtctccctaagttactgtcgccttcccca

SEQ ID NO: 697821 - DNA, 715 bp, Homo sapiens
tggcatccgatctggggtttatccaacacaattctcccactctacacaacaatagtacaaacccaaggtcatctaaaaggctccaagggttataaacactccaaaagagaatatttttatagtcactggcactggtgccaatggacaacgccaaaaaagaaaaaaatataaaacgcaatggtgcactttgttgcggccaaatatacacctggtaaagcacccacctatgacacgggcaaggcacacacctagagtgagctgtgcgtgtgatgtgtactctccgcgcagagagactgtgtgtctctctctccaaactctacactctcgccgcacattttctcacagagtataacacggtggtgtggcggtgtgcgcggtgtgtgtgtgcctctcggtgtgcagcggacaggacagaaacccccgcgagcacgagacacacttcaccagtgggtgtgcagagagagcactcattgtgaaggagcggtgtgtgtgcaacccttggagagacatctcagaaagagagagcccctcgagagagagtgtccccagagacccaataaacgagtggtttgtgggccaagaatgtgacaccaatacaaggcccgtgagggagacaagacatcacacttaattccaaaagagggacacaacggtgggcccccagacaaaaacagacaaaggggaccacggggcccgtggaacccaccaaaatcaa

SEQ ID NO: 697822 - DNA, 377 bp, Homo sapiens
ctgtacatgagtgctcagaaagcatataaatgactgcgttcgaagttggcatcctctaatctacgcagacacttctttatgcgcaatcatttcacctattacatatttaggataaccactgccttatttcatttttaattcaatttgaatggctagaaatgtcttccttatatttcagcaaaatctgagctgctctgtgtgatattgtcatccacgagtatcaccttacagaatgacaaagagaaaaatttcactccctttacaccttttttttttttttttttttttgggaaaacggggccctttttgggcccccgggtggaagtccggggaattatacttcttggctaccaggagaaccctccacccctcggggt

SEQ ID NO: 697823 - DNA, 239 bp, Homo sapiens
atgtcttatttttctttgtttaggaagcaagataggctctagaacttggactttgagttaacaattttaaattaatgagataattaaataaatctttgtttctttggttggaatgtagtcatagaaacctgaggctttctaacctaaattgaaagatggagccagagagagaatatgaataagaccaagggaaattgatagattataaactggttatagatttttgattcccctctatc

SEQ ID NO: 697824 - DNA, 229 bp, Homo sapiens
actagtccacgtgttgtgtgtcgatctgggtgttcgcacgtaagcttcgtgtatcaagtattgtgacctcccgaggagctggggtgaccaccagagttgcctaaggattgggtgaaccttgcccagtgtctggaaactggagcagtgtcaataactccctgtgcgtgatcatgtagtgtggatctgcgcgctgtgaatatgccacttgcagtggtacctgaggctcgaa

SEQ ID NO: 697825 - DNA, 447 bp, Homo sapiens
  misc_feature (116)..(116): n is a, c, g, or t
  misc_feature (243)..(243): n is a, c, g, or t
  misc_feature (370)..(370): n is a, c, g, or t
  misc_feature (432)..(432): n is a, c, g, or t
  misc_feature (439)..(439): n is a, c, g, or t
ccagacatcggttgtcagcaggtacccgcagagagcagaagggagactggaagcgtccccacaggaccggaacccatgcaagtcctggcagctccggtggatgtcgcatgcggatnccgtgcgcggatcagccttgtccctccacctctgtacccagaatgtcctgcactgaggccccacagcctatcccaagcgggtaccaccaccaccagcaccatcattgccttggggccaccgcgcgcntcagcatctctgtggagggtgacctggaatgcttggtgtgccgagagcctacaactgtgctcggtcccccaagctgcttagctgtcagcacaccttctgtgccgtatgcctgaagcttcttgctatntgtgcaggaagacacctggtccatcccctgtccgcttgtggcgaaaggtcactgctgtcccngggaggnctcatctg

SEQ ID NO: 697826 - DNA, 181 bp, Homo sapiens
gaggtattatcagcgagcagagtgatctccggtaacagaagtcagatcatgcctttctttgctactcacattcctgctaaagtgtcattctgagtaacttcattttacttgagtaaaagccagagtcctttccctgtgcccatgtaggcctgccagtgatccagtgtcctcctctcccctg

SEQ ID NO: 697827 - DNA, 395 bp, Homo sapiens
  misc_feature (28)..(29): n is a, c, g, or t
tcacgcttcaaccctcaacgctttatannctcaacgcttaactttctcaacgctttatacttctcaacgctttatacttctcaacgctttatacttctcaacgctttatacttctcaacgctttatacttctcaacgctttatacttctcaacgctttatacttctcaacgctttatacttctcaacgctttatacttctcaacgctttatacttctcaacgctttatacttctcaacgctttatacttcctcaacgctttatacttcctcaacgctttatacttctcaacgctttatacttcctcaacgctttatacttctcaacgctttatacttctcaacgctttatacttccaagatcaagaaaaataagaacgtgaagtataagcgttga

SEQ ID NO: 697828 - DNA, 880 bp, Homo sapiens
  misc_feature (548)..(549): n is a, c, g, or t
  misc_feature (591)..(591): n is a, c, g, or t
  misc_feature (661)..(661): n is a, c, g, or t
  misc_feature (682)..(682): n is a, c, g, or t
  misc_feature (685)..(685): n is a, c, g, or t
ggaaggctgctaccatcccagtgagccaaagtctctaccattgcaggctcaatagatctgaagtgagatctttgacaagatccacagcctgctctctggaatacctgttcaatctggtgggcgctctgtgtctgtcacatcttaactcctacaggggctggacatttgttcaattactaatactggctagatatatcttgtgataacaacggcgaggaggaacgtggcctcttcaccagtgaagcagcagttcccgcagttgcaagttgtggcattccgggattctgggaagctccactgccaagatgtgggggacctcacttcttgctcattctacagtaaggaaagtgtccgttacgtcgtgtgtcctttgtctaatccgcatctttccaacggagggacatggcttgtggcacagactattcatagcggattgcttggttgaccacagtacaacggacttccaaaagtggagcaagcgaagacaaagcttttctaaaaacgcaattgtcagggcatgaatccgtctactacgactgctattcatnnccagctccggtggccatatgcgaaacccgacagcgagattcnaccctcatggccttaaatccatggcatggccgctaggttgggcacagaatttcttaaacattggcagccncttgtccagattgtgaacagncanccatccttcttttgaacttccttgggaaggtgtggtgggaaatgcccctcattgaaggcaattacacaggttccagttccctggaacgattgctaaatttctcattcaaacagagggacctaaactttcccaagaacttggaaggctattcacaaagctccaggaccagattgggctccctttcatacgccctcg

SEQ ID NO: 697829 - DNA, 572 bp, Homo sapiens
tgattagaggatcccatgccataacctccatctaaagtcaagaccaaagaaagaatcttaagaactatgagacaaaagtgtcaggtaacccatatgttaatctaacttattagattaaaggacatttttcagcagaaatctcacagatcagaagggattagggtcctatctttagctgccttaaacaaaataattgtcaggcaagaaatttgaatccagcaatcctaaggttcataaatgaaggagagataaattatttttcagacaaatgctgacagaatttaccacttccaagccagcactacaagaaatgctataggagttctaaatcttgaaacaaaacctcgaagtacaccaaaataaaaccttcttaaagcataaatctcacagggaaagcaataactgacaatggggggaaaaaacaaggtattcaagcaacaactagcatgatgcatataacagtgcttcacatcttaatactaatgaacgtaaatggcctaaatgttccacttaaaagatacagaatggcaggatcgataagaatccaccaaccaagtatctgctgtattcac

SEQ ID NO: 697830 - DNA, 697 bp, Homo sapiens
  misc_feature (28)..(29): n is a, c, g, or t
  misc_feature (628)..(628): n is a, c, g, or t
  misc_feature (663)..(663): n is a, c, g, or t
  misc_feature (667)..(667): n is a, c, g, or t
  misc_feature (676)..(676): n is a, c, g, or t
tcacgcttcaaccctcaacgctttatannctcaacgcttaactttctcaacgctttatacttctcaacgctttatacttctcaacgctttatacttctcaacgctttatacttctcaacgctttatacttctcaacgctttatacttctcaacgctttatacttctcaacgctttatacttctcaacgctttatacttctcaacgctttatacttctcaacgctttatacttctcaacgctttatacttcctcaacgctttatacttcctcaacgctttatacttctcactcaacgctttatacttctcaacgctttatacttcctcaacgctttatacttcctcaacgctttatacttcctcaacgctttatacttcctcaacgctttatactttctcaacgctttatactttctcaacgctttatacttcctcaacgctttatacttcataccggaaatgaaatgatttcatttcccggtatgaagtataaagcgttgaggaagtataaagcgttgaggaagtataaagcgttgaggaagtataaagcgttgaggaagtataaagcgttgagaagtataaagcgttgaggaagtataaagcgttgaggaagtataaagcgttgagnaagtataaagcgttgagaagtataaagcgtgagtngtcnagtagccgntgtctccccacagagagtaac

SEQ ID NO: 697831 - DNA, 127 bp, Homo sapiens
cggcacgttccaacacattccaacagtgcagaaccatcaacaggtgctgcagtcccgggtgcaccgtcaaaggcagttttgttgcaccattcaaccacatccaccacaggctcaagtgtcattcaat

SEQ ID NO: 697832 - DNA, 376 bp, Homo sapiens
ccagcttgtgacccagtctttctacagcagagcctgagctaggcaggtcacccattcgtggattccgctcagtacattaagctcctgactgaccttaagaactagctgcacattgaggtcaagcaaaatgccattggtgtagtgcacaatgtacagctgctcctctgccctctgggtctcatccatcctgcatcggttctggtgcacgtccagtaggtccaagcctttcgtgggctgcacatgtgcatgttgctcatctgtgcctgtgtccctctcgtcctaatcagccatcttaagtcatcgtaggcctccatggtgtacctttcgtgacctataacagtcacatctctatataggtcatgacaagttgtgttat

SEQ ID NO: 697833 - DNA, 353 bp, Homo sapiens
gggttttaaaaaaattttcccgggggaatccccggggtttaaaaaaagggaaaccccttttttaaccatggttttccgggtattttaaaatataaaataaaggttttcggggccgggaaattttttggggcccaaaggtttcccccggccttgggcccaagggcggggatttccccttttccgaaaatttttcccccccggccttttcccccgggggtttaggccctccccttttatagggggtggctttaaacccccaaaaaaaaaatggtttttttgtttgatttaaaaggggcccggggggttggtttcccaaaggtttttttaaaaaaaaaaaaactttttttggccca

SEQ ID NO: 697834 - DNA, 358 bp, Homo sapiens
  misc_feature (28)..(29): n is a, c, g, or t
tcacgcttcaaccctcaacgctttatannctcaacgcttaactttctcaacgctttatacttctcaacgctttatacttctcaacgctttatacttctcaacgctttatacttctcaacgctttatacttctcaacgctttatacttctcaacgctttatacttctcaacgctttatacttctcaacgctttatacttctcaacgctttatacttctcaacgctttatacttctcaacgctttatacttcctcaacgctttatacttcctcaacgctttatacttctcaacgctttatacttcataccgggaaatatagagctgaggaagtataaagggatcctctagatcgccgcag

SEQ ID NO: 697835 - DNA, 481 bp, Homo sapiens
  misc_feature (28)..(29): n is a, c, g, or t
tcacgcttcaaccctcaacgctttatannctcaacgcttaactttctcaacgctttatacttctcaacgctttatacttctcaacgctttatacttctcaacgctttatacttctcaacgctttatacttctcaacgctttatacttctcaacgctttatacttctcaacgctttatacttctcaacgctttatacttctcaacgctttatacttctcaacgctttatacttctcaacgctttatacttcctcaacgctttatacttcctcaacgctttatacttctcactcaacgctttatacttctcaacgctttatacttcctcaacgctttatacttcctcaacgctttatacttcctcaacgctttatacttcctcaacgctttatactttctcaacgctttatactttctcaacgctttatacttccctcaacgcttctcatttcatttcccggtatgaagtataaagcgttgag

SEQ ID NO: 697836 - DNA, 379 bp, Homo sapiens
atatatatgtgtatgtctatatttatccatatatacaatataaatgtacagtatatgtaatattgcatatgtaatagctattaaattgtatactgtatataatagctatattttatatacacaatgaatatatttatattttaataaaatttgtgtatgtacattttatgtttatatatcaaagataatatatacaataacatcacacaatcattcataaacatcatattttgcatgcatatatcaatcacacacattcataaaattcatttatatcacaaatatatcatggaaacaatagctcattagttcttatttctcaatctagggtcagtccacagcacggggatcctactagcagtccgacctcgccaggcat

SEQ ID NO: 697837 - DNA, 370 bp, Homo sapiens
  misc_feature (28)..(29): n is a, c, g, or t
tcacgcttcaaccctcaacgctttatannctcaacgcttaactttctcaacgctttatacttctcaacgctttatacttctcaacgctttatacttctcaacgctttatacttctcaacgctttatacttctcaacgctttatacttctcaacgctttatacttctcaacgctttatacttctcaacgctttatacttctcaacgctttatacttctcaacgctttatacttctcaacgctttatacttcctcaacgctttatacttcctcaacgctttatacttctcaacgctgatacttctcaacgcttaacttctcaacgcttatacttcgctcaacgctttatactatgaccgggaatgaagaaga

SEQ ID NO: 697838 - DNA, 417 bp, Homo sapiens
  misc_feature (28)..(29): n is a, c, g, or t
  misc_feature (77)..(77): n is a, c, g, or t
tcacgcttcaaccctcaacgctttatannctcaacgcttaactttctcaacgctttatctatacttctcaacgcttnatacttctcaacgctttatacttctcaacgctttatacttacttctcaacgctttatacttctcaacgctttatacttctcaacgctttatacttctcaacgctttatacttctcaacgctttatacttctcaacgctttatacttctcaacgctttatacttctcaacgctttatacttctcaacgctttatacttctcaacgctttatacttctcaacgctttatacttcctcaacgctttatacttcctcaacgctttatacttctcaacgctttatacttcataccgggaaatatagagctgaggaagtataaagggatcctctagatcgccgcag

SEQ ID NO: 697839 - DNA, 346 bp, Homo sapiens
  misc_feature (34)..(34): n is a, c, g, or t
  misc_feature (231)..(231): n is a, c, g, or t
  misc_feature (334)..(334): n is a, c, g, or t
gcctgtaatcccagcacttagggaggccgagganggcagatcacgaggtcaggagatcgaaaccatcctggctaacacggtgaaaccccgtctctactaaaaaatacaaaaaattagctgggcgcagaggcacgggcctgtagtcccagctactcaggaggcggaggcagggagaatggcgtcaacccgggaggcggaggttgcagtgagccaggattgtgcgactgcatnccagcctgggtgacagggtgaaacgccatctcaaaaaataaaaattaaaaaataaaaaaagaacctgggatcttcaatttaatttttcatattcttgccaatnaaatgggacttg

SEQ ID NO: 697840 - DNA, 357 bp, Homo sapiens
  misc_feature (1)..(1): n is a, c, g, or t
  misc_feature (168)..(168): n is a, c, g, or t
  misc_feature (229)..(229): n is a, c, g, or t
  misc_feature (338)..(338): n is a, c, g, or t
nttcggcacgaggaggtcccctgggaagctgtggtgggactggaaggtcgcaggacttccaaaatctaagttctccagaacagagctgctccaagctttagtctccactcaaaagggtcacttagtaagttctcaggtccctggcttagtgccagcttcccagtagtntgtatactagatgccttgggaataaaaccagttccctaaacctatcccgtgctcacccacnacccgtgacagctgccaaagggacagacgcaaaggctcctttcctcaaggccccctgcagacagcactttccacaatgaagggtgtcagtgacccagccagaaaacttntttaaccacttctgggtaa

SEQ ID NO: 697841 - DNA, 348 bp, Homo sapiens
taggtatccatcttgtatccctggtcttcccaagacttttaacattaaggggtgttggattctaatgagatgattatgtgggttgttttctttgagtttgtgtacatggtggattatgttcctagatttttgtatattcaaccacttctgcatccctgggatgaagcctccttgataatggtggttgatgtctttgatgtgttctttgattcgatttgaaactattcacttgagtgttttgcatcaatgcttataagggagattggtctggactttctttgttgagtctttgtgtggtttaggtattagggtgactgtggccgagtcttctgcaaaaaaaggaaatgg

SEQ ID NO: 697842 - DNA, 83 bp, Homo sapiens
tcaagcttctaacgatgtacggggacatgggctgtacccaagctgatttctcatctggtcaataaagctgtttagaccaaaaa

SEQ ID NO: 697843 - DNA, 274 bp, Homo sapiens
  misc_feature (45)..(45): n is a, c, g, or t
  misc_feature (61)..(61): n is a, c, g, or t
  misc_feature (198)..(198): n is a, c, g, or t
  misc_feature (207)..(207): n is a, c, g, or t
  misc_feature (216)..(216): n is a, c, g, or t
  misc_feature (226)..(226): n is a, c, g, or t
  misc_feature (244)..(245): n is a, c, g, or t
taatctgtaccttgcgggagtacagtgaagaaacagagacccctnaagcatccgtatctgnatggaactgtgaagacatcatgtgtttgactctaatactgtcactgacatgctcatgaccattctgtgcccgctttggcatcaccaatcatgatcaatattcattgcttcgagagctgatcgaccagaaaaaggagnatataacanggacctttngaccggacangaccattgctgcgcaatnngttcagaattacggtaccgatgctcgaag

SEQ ID NO: 697844 - DNA, 999 bp, Homo sapiens
gtgcccccaacgcagacagggggagaacccccaggtggccgcaaccaaatgggggcggcaaaccgcggtgcggagaaccggctgggcgcgcccacacccgagggccggggacgccggcgagtcctcggggccgccccattgccggccccctccggaggcaccaaaggggagaaagcgcccccacacgggcgcgcgagatcccgggggggctcttcggagagcaccccccgcgccctccctcccgggggggacagagggggccccacggctgccacacccacgagagaggtgccacaggaggcgcccccgcagtcaagacaaacggcggctgcaagcgcagctggctctggggggtcaacagggagacacaccaccttctgcggaagcgcccgcggcccccccgtacggagacagaccccctccgcctttgggagcgagcctgggcacaacacacgccctgtcccccaaccgggggggttccacgggaccacagcgcgcgggggggccacacacacccagggagcccttaggggggccccggcgcaaagccaacaccgggggattccgcgcccctccctatacccctgggcccacgtctcgtgccaaccttggaaggggttaacaaagcccccccctctgccaccgtttttgttgtgaaagagattttttttttggctgggaagcagaaactcgatgttcatagttgaaaagaaaaaagtgggtgtaatctaacacgcggagggcgaaaaaggggccatccccgcggaagtggcccccccccctgggactcatacagcccccggggacatctgtggagaggggagccccccccccctgccccccccccctttgcacccctacctggtgggaaaggaacccgccccctgagtttttataagaaggttaattttaaaaaggggtttgtgggtttggtgggggtttgttttttttatggaatctaatttaaggttaaaaaaaaaaggggtccgttaatttata

SEQ ID NO: 697845 - DNA, 995 bp, Homo sapiens
catatactgatgtccaacttccgccggcctctcctggggtataggtccccggacttgtgtttcgcactcgagggtggaactcaccaaagtaggccgggctcccaatgtgctacaccatgagtgaggggccccccccttttgtcggccctttctgagatccccccattctcatgggggctcaccagtagtgtaacctcccccccttgtcaccccatcctggtaaattcccaaatcatcctaggtgccccaccgaattgaatattgtgctttttggttggtgcctatgtctggctcccccaagcggtgcccgtatgtagccgtctacgggtgcttcgtattatgttcttgtgttgtcttattcgctcggtaactccccgcggggcttccctcgtggtacgtgggtataccccctttgctgggccaacctttcgtggccggttggccacgcgaaacccctgtcgcgcggggttcctccccccctgttctctcgtaagggtccttctgctgtctcctttcccgtgcaccgaatgggtccctacactgttgttgtgaacgaaacacttgacgcaacttgtgcgtgttcacctacaggagttcctctaataatcaacgggactccgcggactttggggtgggttgccacttgggtggcttctcgtaactggtggcgtcccacaccttcgctcggagagtgactggagtggcgctggcgtcggagcatcgtgatgtccagtatggcttcctggccattgagtgacccttgtgaaaaagaagaccacgtgatgctatggggcatcctagacagacagcagacgggtaagatatcacacagagtgcgcagcacgcaatgcggctcgctgccgtcggccagctcctataaagtcactaggcatggaccctctgccttccacgatgcccaagaaaccaaagaatgataaacccagtggactacaccgttcttagatcccatcccaagctaacacctgggccatacg

SEQ ID NO: 697846 - DNA, 315 bp, Homo sapiens
tcccaggttcacgcaattctcctgcctcagcgccccctaataatagctgggattacaggcatgcgccaccatgcccggctaatttttgtgtttttagtagaggtggggttccgccatgttggccagactgatctcaaactcgacctcaggtgatctacccgccttggtttaccaaagtgctgggattacaggcatgagccactggacccagccatggctgtatcttagttggcttaaccatttccttttattttaaacttttctttcgaactaattttagatgtacagaagagttggaaaaatatagcagaattc

SEQ ID NO: 697847 - DNA, 406 bp, Homo sapiens
ctctagcgttcggaggccggattgagaggtgctctcgcgagattgtgtctcattcctaagccggtgctcggcaagtactcgccagcgaaaaagccaatgctgcaagttacgagcgccagagatcgatgaaagccccaaaatggcgagcacaggccggacgtatttcgtactccggacgatctcccagggctctgtctgagaacgtggagtatggaatgtgcgaggaactcgaaggttgcgagactccaggggagctggaattattgacggagaggctacggagaatggaagattggtgggtggtgcgggaaagactaggtcataatcttagttcccgtgtcctccacactgattatcttttccggatcacatccgagtccggttagataccgcgaataggtgacaa

SEQ ID NO: 697848 - DNA, 124 bp, Homo sapiens
  misc_feature (104)..(104): n is a, c, g, or t
ggaggaggccagatgcggccagcgtctccaacagggtgaccatccgctcggcttgctgagcgtttaaacaaatgtttagacaggctgtggggactacactgatnctagtcttggccggtggtcc

SEQ ID NO: 697849 - DNA, 635 bp, Homo sapiens
  misc_feature (89)..(89): n is a, c, g, or t
  misc_feature (101)..(101): n is a, c, g, or t
  misc_feature (132)..(132): n is a, c, g, or t
  misc_feature (136)..(136): n is a, c, g, or t
  misc_feature (160)..(160): n is a, c, g, or t
  misc_feature (173)..(175): n is a, c, g, or t
  misc_feature (189)..(189): n is a, c, g, or t
gagttgcgtcatatccggcccttgcgatcagggcttgaggaacccgcgccatgaagtgcgtgtttgttaccgtagggaccaccagcttngacgacctcatngcgtgtgtgtcggcgcccgacagtctgcaanaaantcgagagccttggttacaaccganttatcctgcaaannnggtagaggaacggnggtacctgaacccttcagtactgagtcgtataactctggatgtttacccggtacaaaggattccttgacaacgcacgaccattccagaaagcagatctgtgtcattagtcacgcaggtgcaggaagctgttgggagactctggacacaaggaaagccactcgtaggtggttaataaacgcacacagttggatgaacaatcatcagctggaacctgtggacaaaagcagctacacaacagagggtcatctcttctatggtacctgcgagcacgctttccttgggcttggttacaagttcaattggaccttcatccaacacgtgacaagtgttttattcctcactggccaggccagaaaaaattttctggcatctaaggatagagtatgtgggattaacaaacactaacacactaaactctcaaaactttgaaaagacaacccccaat

SEQ ID NO: 697850 - DNA, 130 bp, Homo sapiens
cagctggccagactgtgcctggagaacattgacaaaaacactggagacgccatcaccgcggaaggcttcaccgacattgacctggacacgctggtgggtgttctggaacgcaacacccggcgggaacgca

SEQ ID NO: 697851 - DNA, 289 bp, Homo sapiens
gacggaggatctcgtcacttctctccgtcctctgcattcttcctgttccatcataagccaaatccatgagaaatgacctgaggtggtgaaggaactatcaagtagaacagactcacgctcaataaggtccagtgccacctccccttcagttctgatgcagccgctccaggtggtgatagcaacagtgatgtgcgccgccatgccaatcacataatcagaatcattgctgcagagctgaatgttcccttcatccagcccttctaatagctggtccctgaatgtatcgtca

SEQ ID NO: 697852 - DNA, 336 bp, Homo sapiens
tttttgggggcccctggtttttttttaaagtccccaaaggaaaggggcccttgttttttttttcccccccccccatttttaaaccccccgtttttttttaaccccctccgggttggttttaaccccccacccccgtttaatccttttttaatttttcccgtccctttttttttaaagaaaaaacccccaaaaaaaagtttgtccctttccccccccaaccccgttttttttttttccaatttttttttcccccattttttggacccccccacccccccccccccttttttagggccccccttttttttttttttttacccctttttttttttttta

SEQ ID NO: 697853 - DNA, 907 bp, Homo sapiens
  misc_feature (442)..(442): n is a, c, g, or t
  misc_feature (523)..(523): n is a, c, g, or t
  misc_feature (556)..(556): n is a, c, g, or t
  misc_feature (562)..(562): n is a, c, g, or t
  misc_feature (574)..(574): n is a, c, g, or t
  misc_feature (589)..(589): n is a, c, g, or t
ggagaaggaggaggcggcgaatcacttataaatggcgccgaagcaggacccgaagcctaaattccaggagggtgagcgagtgctgtgctttcatgggcctcttctttatgaagcaaagtgtgtaaaggttgccataaaggacaaacaagtgaaatacttcatacattacagtggttggaataaaaattgggatgaatgggttccggagagcagagtactcaaatacgtggacaccaatttgcagaaacagcgagaacttcaaaaagccaatcaggagcagtatgcagagggcaagatgagaggggctgccccagggaagaagacatctggtctgcaacagaaaaatgtcgaagtgaaaacgaaaaagaacaaacagaaaacacctggaaatggagatggtggcagtaccagtgagacccctcagcctcctaggaagaagagngcccgggtagatcctactgttgaaaatgaagaaaccttcatgaacagagttgaagttaaagtgaagattcctgaagagctnaaaccgtggcttgtggatgactgggacttaatnaccagncagaagcagctnttttatcttcctgcnaagaagaatgtggattccattctggaggattatgcaaattacaagaaatctcgtggaaacgagagataataaggagtatgcggtcaatgaagttgtggcagggtaaagatctcacgtatgttgggtcccagttactctataattgagagacccaggatgtggattctgcgaatcttcgagcccagtccgggtgtgggcacatcggagttgggatgggatgcgtcccccggggaacggttttcattccaaccaacggaaatgctgttgcgaaaggtccccaagggcaccatgttcctctttaaggattggtaaccaata

SEQ ID NO: 697854 - DNA, 275 bp, Homo sapiens
atgggcggcttgtatgattatgggcgtagatatagtagtagttacaggttgaacatgtctgtggtgtatatatggtaataagagagggctcgggggaatacggttatgtgattaggacgtagggttaggatgagtgggaagaagaaagagaggaagtacagtttaattatgccttttagggttgaggtgactatggaggtggcgatctggtgctgtgaactcgctctaggtaatagcttccctagtcaggttcggtctaggatacagtacggaga

SEQ ID NO: 697855 - DNA, 480 bp, Homo sapiens
  misc_feature (324)..(325): n is a, c, g, or t
ccccccactgagcgcccactgcttgcgtcggggccatcaggaatagcagtgaggggggctctgtggctccctggagctctcagccgccttgcatatctccaggggcttctggaatggtctggatctgtatacagtttcagggtttccttgcttttccagtctgagactgaaactcatcctctaagcatttgaaagaaacaacaggaaaactcaatcctctttccttccacagcacatttagggtgagagcttcacagctgaaaatctcctttaaagaaaacgcggcccaaatgtgctgggaggagaagccagtggatctaggannggcgggttgccggctctgtctctgggctgacaacctggtttcagtattggtaagtgggtcaaccccagctccagcggctcctcctcacctctgccgattgagggccactgcaaatttcaagcagaataaaagagtattctgagggccactgcaaa

SEQ ID NO: 697856 - DNA, 676 bp, Homo sapiens
  misc_feature (93)..(93): n is a, c, g, or t
  misc_feature (197)..(197): n is a, c, g, or t
  misc_feature (229)..(229): n is a, c, g, or t
  misc_feature (271)..(272): n is a, c, g, or t
  misc_feature (279)..(279): n is a, c, g, or t
  misc_feature (284)..(284): n is a, c, g, or t
  misc_feature (289)..(289): n is a, c, g, or t
  misc_feature (299)..(299): n is a, c, g, or t
  misc_feature (324)..(324): n is a, c, g, or t
  misc_feature (345)..(345): n is a, c, g, or t
  misc_feature (368)..(368): n is a, c, g, or t
  misc_feature (388)..(389): n is a, c, g, or t
  misc_feature (413)..(413): n is a, c, g, or t
  misc_feature (429)..(430): n is a, c, g, or t
  misc_feature (439)..(440): n is a, c, g, or t
  misc_feature (442)..(442): n is a, c, g, or t
  misc_feature (447)..(447): n is a, c, g, or t
cgataactgttaaatgtggtgattaccctacccacgagcacagcagagctggatggctctaagtcctcagatgacaagggaatagtcagctanctctggactcgagatgaggggagcccagcagcaggggaggtgttaaatcactctgaccatcaccctatcctttttctttcaaacctggttgagggaacctacancttttcacctgaaagtgaccgatgcaaagggngagagtgacacagaccgggaccactgtggaggtgaacactgnntcccatngaaanacaancctggtggangatcatcttggatatcaacgtcagncagctaacgtgagaggctganaggggatgttcatccgccagatnggggtcctcctgggggtgcnnggattccgacatcattgtgcaaanagattcagccgtacannggagcagannanccaanagatggtattctggtgttcaaacacgagcctccccgagcagatcttcaaaggccatgaggtggcagcgatgctcaaggagtgagctgcggacagcccgaaggcagactttttgatattcagagccttggaagtctaacactgtcacatgtcagctgaactgttccgaccatggcactgtgactcgttcaccaaaacgcggtatcttgtgacccttttggctgggaactc

SEQ ID NO: 697857 - DNA, 138 bp, Homo sapiens
cggcacgaggcagatagtggtccctgcttatcccccagggcctgcctaggctacaactgacagtaatcccaagagctcccctttcagggattgacggagtgatgtcacctgtgtggactcagctgccacctgggattg

SEQ ID NO: 697858 - DNA, 122 bp, Homo sapiens
cggcctgaggtgtcggccggatccctccttctccggcgctcaagcggaagaccattcctcaagacttttgtattcaagggccaaaaggttgttacccaagatgatgaatgctgacatggatg

SEQ ID NO: 697859 - DNA, 162 bp, Homo sapiens
gctcctacagcatataggatgtaacatgtggtgtatgcatcggggtagatccgagtaacgtcgggacattccggataggccgagaaagtgtagtggaaagaaagttagatttacgccgatgaatataatagtgaaatggataatgagtaagtaaggtctaag

SEQ ID NO: 697860 - DNA, 102 bp, Homo sapiens
ctagccgagctaccatactatacctgggatacataggaaaatataccttacaaaatagtgcccccagataatatatatagcgaataagctaggaccataagg

SEQ ID NO: 697861 - DNA, 100 bp, Homo sapiens
gaccaactgtgagatagaaggcacaggtattcttttgtccagtctcctatccgagcttgggagccttttctactatcaccggcacccggtccgggtattt

SEQ ID NO: 697862 - DNA, 1150 bp, Homo sapiens
ggcaagatggcacgaagtagagcatgaagaagaatgcaccgttccggatggttcatctaccgcggcggtgtacctcgatcagctgcgtggacatgttctacgaagcgacgtgtgagtgcaggtgtacaggttgcgcgccaggggcggcggtgtgaaccggggcctgttggcggaagcagcacttccctgcatgaagcgtctctgcaggcaagggcgatgcaaggaggcgccggccatggagtaagccggaagtggtgaagacgcaccgtgcgggcacatgatcatcctagccgagatggtgggcaggatggtgggcgtcttacaaatgtgaagacccttcaagcatgcgtggacgatcagggccccgagaatgatcagaggcactagcctggtgcagaatcttcgtccatccaagctacaatgcgcgtagaatgcattgtgcctggccccgcgtattcagtggggccactccaattctctacaccagcttacagtccacttcttcgatgtaacttggtgctcagcctaagtaaagaggggcgtccaatacttgagcttcgaacacaagaggtaccttaagcaacaagtactattgacagattatctacacgagaacttataccggttgaacaataaacatttttacgcagggtcgtggcgttggctgcatagcggtatttacgcaccagacgagtgggagccaggcatcgacgcgtggaaccacccaaagagaccgtcaagtgtgagctgacaagaaggagggcaccccctggtagatgagaagaggagacgaagagaccaaagacgaggggcacagagagggagatcgcgggtgacatgaaaaccggggagcagcacacacggggagacacgcggcagaattgagcaaaaaaaattaatcaaagacaaagagaaatgcaacaaagaaccgtgggatgtgcgttcaaaacatcgaggagtgtcgatcgcttgaaaagaaaagagcatagcatggggatgacccgtaggtggaaatactaatagtaaccaaatccaaggagcaattaagaggaatattaagaacccccctaacggtttaaatctgtggaggtacgcaaatgatgtcactacatcagtgaagtataaaatgagaagatacattaacacacgg

SEQ ID NO: 697863 - DNA, 118 bp, Homo sapiens
  misc_feature (82)..(82): n is a, c, g, or t
ggcctacaaactagggtttttatattcccttttgttaatggctcaaaataatattttgtataatatgaaaattacgaaattntagtttctctaaataaagttttggaaagaactacca
